United States Patent Application Publication US 2023/0340073 A1 - sequence listing, part 2

SEQ ID NO: 716 - protein, 1457 aa, synthetic construct
  REGION 1..1457: note = Variant of human B-domain deleted Factor VIII
MQIELSTCFFLCLLRFCFSATRRYYLGAVELSWDYMQSDLGELPVDARFPPRVPKSFPFNTSVVYKKTLFVEFTDHLFNIAKPRPPWMGLLGPTIQAEVYDTVVITLKNMASHPVSLHAVGVSYWKASEGAEYDDQTSQREKEDDKVFPGGSHTYVWQVLKENGPMASDPPCLTYSYLSHVDLVKDLNSGLIGALLVCREGSLAKEKTQTLHKFILLFAVFDEGKSWHSETKNSLMQDRDAASARAWPKMHTVNGYVNRTLPGLIGCHRKSVYWHVIGMGTTPEVHSIFLEGHTFLVRNHRQASLEISPITFLTAQTLLMDLGQFLLFCHISSHQHDGMEAYVKVDSCPEEPQLRMKNNEEAEDYDDDLTDSEMDVVRFDDDNSPSFIQIRSVAKKHPKTWVHYIAAEEEDWDYAPLVLAPDDRSYKSQYLNNGPQRIGRKYKKVRFMAYTDETFKTREAIQHESGILGPLLYGEVGDTLLIIFKNQASRPYNIYPHGITDVRPLYSRRLPKGVKHLKDFPILPGEIFKYKWTVTVEDGPTKSDPRCLTRYYSSFVNMERDLASGLIGPLLICYKESVDQRGNQIMSDKRNVILFSVFDENRSWYLTENIQRFLPNPAGVQLEDPEFQASNIMHSINGYVFDSLQLSVCLHEVAYWYILSIGAQTDFLSVFFSGYTFKHKMVYEDTLTLFPFSGETVFMSMENPGLWILGCHNSDFRNRGMTALLKVSSCDKNTGDYYEDSYEDISAYLLSKNNAPEPRSFSQNPPVLKRHQREITRTTLQSDQEEIDYDDTISVEMKKEDFDIYDEDENQSPRSFQKKTRHYFIAAVERLWDYGMSSSPHVLRNRAQSGSVPQFKKVVFQEFTDGSFTQPLYRGELNEHLGLLGPYIRAEVEDNIMVTFRNQASRPYSFYSSLISYEEDQRQGAEPRKNFVKPNETKTYFWKVQHHMAPTKDEFDCKAWAYFSDVDLEKDVHSGLIGPLLVCHTNTLNPAHGRQVTVQEFALFFTIFDETKSWYFTENMERNCRAPCNIQMEDPTFKENYRFHAINGYIMDTLPGLVMAQDQRIRWYLLSMGSNENIHSIHFSGHVFTVRKKEEYKMALYNLYPGVFETVEMLPSKAGIWRVECLIGEHLHAGMSTLFLVYSNKCQTPLGMASGHIRDFQITASGQYGQWAPKLARLHYSGSINAWSTKEPFSWIKVDLLAPMIIHGIKTQGARQKFSSLYISQFIIMYSLDGKKWQTYRGNSTGTLMVFFGNVDSSGIKHNIFNPPIIARYIRLHPTHYSIRSTLRMELMGCDLNSCSMPLGMESKAISDAQITASSYFTNMFATWSPSKARLHLQGRSNAWRPQVNNPKEWLQVDFQKTMKVTGVTTQGVKSLDTSMYVKEFLISSSQDGHQWTLFFQNGKVKVFQGNQDSFTPVVNSLDPPLLTRYLRIHPQSWEHQIALRMEVLGCEAQDLY

SEQ ID NO: 717 - DNA, 4371 bp, synthetic construct
  misc_feature 1..4371: note = Variant of human B-domain deleted Factor VIII
  source 1..4371: mol_type = other DNA
atgcagattgaactgtctacctgcttcttcctctgtttgctgaggttctgctttagcgccactagacggtactaccttggcgctgtggagctgtcctgggactatatgcagagtgatttgggagagcttcccgtcgacgcacgatttcctcctcgcgttccaaagtcatttcccttcaacacaagcgtggtgtacaagaagacgctcttcgtcgaattcaccgatcacctgttcaatatcgccaaacccagaccaccatggatgggtcttttggggcctaccatacaagcggaggtgtatgacacagttgttatcactctcaagaacatggcttctcatccggtaagtcttcacgcagtgggcgtgtcctactggaaagcttcagaaggagccgagtatgatgatcagacatcccagagggagaaagaagacgacaaggtatttccaggtgggtctcatacctatgtgtggcaagtgctcaaagagaatggccctatggcaagcgatccgccgtgtttgacttacagctacctttcacacgttgacctcgtcaaggacctcaactccgggttgattggagccttgttggtatgcagggaaggatctcttgccaaagagaagacacagaccctccacaagtttatccttctctttgctgtgttcgatgagggcaaaagttggcatagcgaaacgaagaattccctcatgcaggatcgcgacgcagccagcgccagagcttggcccaagatgcacactgtgaacggatatgtcaataggtcacttcctggcttgattgggtgtcatcggaaaagtgtctactggcacgtgatcggaatggggacaacaccagaggtccactccatatttctcgaaggccataccttccttgttcgaaaccacagacaggcatccttggagatctctcccattacctttctcactgcccaaacgctccttatggacttgggtcagttccttctcttctgccatatcagctcacaccagcatgatggtatggaagcttatgtgaaagtcgacagttgtcctgaggagccacagttgcgcatgaagaataatgaagaagccgaggattacgacgacgatctcaccgattctgagatggacgtggtgaggtttgatgacgacaactctccctccttcattcaaatccggagcgtggcgaagaaacaccccaagacttgggtccactatatagcggcggaagaggaggattgggattacgctcctcttgtattggcaccagatgaccgctcatacaaaagccagtacctcaacaacggaccgcagagaattggccggaagtataagaaagtgcgatttatggcctatacagacgaaacctttaagacaagggaggccatccagcatgagagtgggattttgggacctcttctttacggcgaagttggtgataccctcctcatcatcttcaagaatcaagcttctcgcccctataacatttacccacacgggatcactgacgttaggcctttgtatagcagaagacttcccaaaggcgtgaagcatctcaaagacttccccattttgccaggcgagatctttaagtacaaatggaccgtcacagtggaagatggaccgactaaatcagaccctcgatgccttacgcggtactattcctccttcgtgaatatggagagagatttggcaagcggactcataggaccactcctcatctgttacaaggaatctgtagaccagaggggtaaccagattatgagtgataaacgcaatgtgatcctttttagcgtcttcgacgagaaccggtcctggtacttgaccgagaatatacaaaggttccttcccaaccccgcaggcgttcagttggaagaccctgagtttcaggccagcaatattatgcactcaatcaacggctatgtgtttgatagtctccagctttctgtttgcctccatgaagtagcctattggtacatcttgtcaattggtgctcaaacagacttcctctccgtcttcttctccggctacacctttaagcacaagatggtgtatgaggacactctcacactctttccattttctggagaaaccgtgttcatgagcatggagaatccaggcctttggatcttgggttgccacaacagtgattttcgcaatcggggaatgactgctctcctcaaagtcagcagctgtgataagaacacaggcgactattacgaagattcttacgaggacataagtgcctacttgttgtccaagaataacgccattgagcccagatcattctcccagaatcctcccgtgcttaaaaggcatcagcgcgaaatcaccagaactactcttcagtctgatcaagaggagattgactatgacgacaccataagcgtggaaatgaagaaggaggatttcgatatctatgacgaagatgagaaccagtctccgcggagctttcagaagaagacgcgacactacttcattgcagcagtcgaaaggctttgggactacggtatgtcatcatcccctcatgtgttgcgcaatagagctcagagtggaagtgttccacagttcaagaaagtcgtctttcaagagtttacagatggcagcttcacacagcctctctatcggggcgagcttaacgaacatttgggactccttggtccctatatccgagccgaagtggaggacaacattatggttacctttaggaatcaagcctctcgcccctacagcttctactcctccctcatcagttatgaggaggatcagagacaaggcgctgaaccacggaagaactttgtgaaaccgaatgagacgaagacctacttctggaaagtacagcaccacatggcccccacaaaagacgaattcgattgcaaagcatgggcgtatttttcagacgttgacttggagaaagatgtacattcaggacttattggtcctttgttggtgtgtcacactaacactctcaatccagcccatggcaggcaggtgacagtccaggaattcgctcttttctttaccatctttgatgagaccaagtcctggtacttcacggaaaacatggagcgcaattgcagagccccctgtaacatacagatggaggaccctacctttaaggaaaattatcggttccacgcaatcaacggatacattatggatacactccctggccttgtgatggctcaggaccaacgaatcaggtggtacctcctcagcatgggttctaatgagaacatacactccattcacttttcaggacatgtgttcactgtccggaagaaagaagagtataagatggccctctacaatttgtatccaggcgtgtttgagaccgttgaaatgcttccctctaaagctggcatctggagagtagagtgcttgatcggagaacatcttcacgcaggtatgagcaccttgttcctcgtgtacagcaacaaatgtcagaccccacttggcatggccagtggacacattcgcgactttcagatcacagcatctggccagtatggacaatgggccccaaagttggctcgcctccattactccggtagcataaatgcgtggtccactaaagaacctttcagctggattaaggtcgatcttcttgcccccatgatcatccacggcattaagacacagggagcgaggcagaaattctcctccctctacatctcacagttcattattatgtatagtttggacggcaagaagtggcaaacttatagaggtaacagtactggaacagacatggtgttcttcggcaacgttgatagctctggcatcaaacacaacatctttaatcctcccataatagctcggtacatcagattgcatccgacccactacagcattaggagtacactccgaatggagcttatgggttgcgacttgaattcctgttcaatgccactcggaatggagtctaaagccatctctgatgcacagataaccgccagtagctactttacgaacatgtttgctacgtggtcaccctctaaggcaaggcttcatttgcaaggccggtctaatgcctggagacctcaggtgaacaacccgaaagaatggctccaggtggactttcagaagaccatgaaagtaacaggtgtcactactcagggagttaagtccttggataccagcatgtatgtgaaggagttccttatttcctcatcacaagatggccaccagtggaccctcttctttcagaatggtaaggtcaaagtgtttcagggcaatcaagacagcttcacacccgtggtgaacagtcttgatcctccactcttgacacgataccttcgaatccatccacagtcttgggagcaccagattgcattgcgcatggaagtacttggatgcgaggctcaggacctctac

SEQ ID NO: 718 - protein, 1457 aa, synthetic construct
  REGION 1..1457: note = Variant of human B-domain deleted Factor VIII
MQIELSTCFFLCLLRFCFSATRRYYLGAVELSWDYMQSDLGELPVDARFPPRVPKSFPFNTSVVYKKTLFVEFTDHLFNIAKPRPPWMGLLGPTIQAEVYDTVVITLKNMASHPVSLHAVGVSYWKASEGAEYDDQTSQREKEDDKVFPGGSHTYVWQVLKENGPMASDPPCLTYSYLSHVDLVKDLNSGLIGALLVCREGSLAKEKTQTLHKFILLFAVFDEGKSWHSETKNSLMQDRDAASARAWPKMHTVNGYVNRSLPGLIGCHRKSVYWHVIGMGTTPEVHSIFLEGHTFLVRNHRQASLEISPITFLTAQTLLMDLGQFLLFCHISSHQHDGMEAYVKVDSCPEEPQLRMKNNEEAEDYDDDLTDSEMDVVRFDDDNSPSFIQIRSVAKKHPKTWVHYIAAEEEDWDYAPLVLAPDDRSYKSQYLNNGPQRIGRKYKKVRFMAYTDETFKTREAIQHESGILGPLLYGEVGDTLLIIFKNQASRPYNIYPHGITDVRPLYSRRLPKGVKHLKDFPILPGEIFKYKWTVTVEDGPTKSDPRCLTRYYSSFVNMERDLASGLIGPLLICYKESVDQRGNQIMSDKRNVILFSVFDENRSWYLTENIQRFLPNPAGVQLEDPEFQASNIMHSINGYVFDSLQLSVCLHEVAYWYILSIGAQTDFLSVFFSGYTFKHKMVYEDTLTLFPFSGETVFMSMENPGLWILGCHNSDFRNRGMTALLKVSSCDKNTGDYYEDSYEDISAYLLSKNNAIEPRSFSQNPPVLKRHQREITRTTLQSDQEEIDYDDTISVEMKKEDFDIYDEDENQSPRSFQKKTRHYFIAAVERLWDYGMSSSPHVLRNRAQSGSVPQFKKVVFQEFTDGSFTQPLYRGELNEHLGLLGPYIRAEVEDNIMVTFRNQASRPYSFYSSLISYEEDQRQGAEPRKNFVKPNETKTYFWKVQHHMAPTKDEFDCKAWAYFSDVDLEKDVHSGLIGPLLVCHTNTLNPAHGRQVTVQEFALFFTIFDETKSWYFTENMERNCRAPCNIQMEDPTFKENYRFHAINGYIMDTLPGLVMAQDQRIRWYLLSMGSNENIHSIHFSGHVFTVRKKEEYKMALYNLYPGVFETVEMLPSKAGIWRVECLIGEHLHAGMSTLFLVYSNKCQTPLGMASGHIRDFQITASGQYGQWAPKLARLHYSGSINAWSTKEPFSWIKVDLLAPMIIHGIKTQGARQKFSSLYISQFIIMYSLDGKKWQTYRGNSTGTDMVFFGNVDSSGIKHNIFNPPIIARYIRLHPTHYSIRSTLRMELMGCDLNSCSMPLGMESKAISDAQITASSYFTNMFATWSPSKARLHLQGRSNAWRPQVNNPKEWLQVDFQKTMKVTGVTTQGVKSLDTSMYVKEFLISSSQDGHQWTLFFQNGKVKVFQGNQDSFTPVVNSLDPPLLTRYLRIHPQSWEHQIALRMEVLGCEAQDLY

SEQ ID NO: 719 - DNA, 4371 bp, synthetic construct
  misc_feature 1..4371: note = Variant of human B-domain deleted Factor VIII
  source 1..4371: mol_type = other DNA
atgcagattgaactgtctacctgcttcttcctctgtttgctgaggttctgctttagcgccactagacggtactaccttggcgctgtggagctgtcctgggactatatgcagagtgatttgggagagcttcccgtcgacgcacgatttcctcctcgcgttccaaagtcatttcccttcaacacaagcgtggtgtacaagaagacgctcttcgtcgaattcaccgatcacctgttcaatatcgccaaacccagaccaccatggatgggtcttttggggcctaccatacaagcggaggtgtatgacacagttgttatcactctcaagaacatggcttctcatccggtaagtcttcacgcagtgggcgtgtcctactggaaagcttcagaaggagccgagtatgatgatcagacatcccagagggagaaagaagacgacaaggtatttccaggtgggtctcatacctatgtgtggcaagtgctcaaagagaatggccctatggcaagcgatccgccgtgtttgacttacagctacctttcacacgttgacctcgtcaaggacctcaactccgggttgattggagccttgttggtatgcagggaaggatctcttgccaaagagaagacacagaccctccacaagtttatccttctctttgctgtgttcgatgagggcaaaagttggcatagcgaaacgaagaattccctcatgcaggatcgcgacgcagccagcgccagagcttggcccaagatgcacactgtgaacggatatgtcaataggtcgcttcctggcttgattgggtgtcatcggaaaagtgtctactggcacgtgatcggaatggggacaacaccagaggtccactccatatttctcgaaggccataccttccttgttcgaaaccacagacaggcatccttggagatctctcccattacctttctcactgcccaaacgctccttatggacttgggtcagttccttctcttctgccatatcagctcacaccagcatgatggtatggaagcttatgtgaaagtcgacagttgtcctgaggagccacagttgcgcatgaagaataatgaagaagccgaggattacgacgacgatctcaccgattctgagatggacgtggtgaggtttgatgacgacaactctccctccttcattcaaatccggagcgtggcgaagaaacaccccaagacttgggtccactatatagcggcggaagaggaggattgggattacgctcctcttgtattggcaccagatgaccgctcatacaaaagccagtacctcaacaacggaccgcagagaattggccggaagtataagaaagtgcgatttatggcctatacagacgaaacctttaagacaagggaggccatccagcatgagagtgggattttgggacctcttctttacggcgaagttggtgataccctcctcatcatcttcaagaatcaagcttctcgcccctataacatttacccacacgggatcactgacgttaggcctttgtatagcagaagacttcccaaaggcgtgaagcatctcaaagacttccccattttgccaggcgagatctttaagtacaaatggaccgtcacagtggaagatggaccgactaaatcagaccctcgatgccttacgcggtactattcctccttcgtgaatatggagagagatttggcaagcggactcataggaccactcctcatctgttacaaggaatctgtagaccagaggggtaaccagattatgagtgataaacgcaatgtgatcctttttagcgtcttcgacgagaaccggtcctggtacttgaccgagaatatacaaaggttccttcccaaccccgcaggcgttcagttggaagaccctgagtttcaggccagcaatattatgcactcaatcaacggctatgtgtttgatagtctccagctttctgtttgcctccatgaagtagcctattggtacatcttgtcaattggtgctcaaacagacttcctctccgtcttcttctccggctacacctttaagcacaagatggtgtatgaggacactctcacactctttccattttctggagaaaccgtgttcatgagcatggagaatccaggcctttggatcttgggttgccacaacagtgattttcgcaatcggggaatgactgctctcctcaaagtcagcagctgtgataagaacacaggcgactattacgaagattcttacgaggacataagtgcctacttgttgtccaagaataacgccattgagcccagatcattctcccagaatcctcccgtgcttaaaaggcatcagcgcgaaatcaccagaactactcttcagtctgatcaagaggagattgactatgacgacaccataagcgtggaaatgaagaaggaggatttcgatatctatgacgaagatgagaaccagtctccgcggagctttcagaagaagacgcgacactacttcattgcagcagtcgaaaggctttgggactacggtatgtcatcatcccctcatgtgttgcgcaatagagctcagagtggaagtgttccacagttcaagaaagtcgtctttcaagagtttacagatggcagcttcacacagcctctctatcggggcgagcttaacgaacatttgggactccttggtccctatatccgagccgaagtggaggacaacattatggttacctttaggaatcaagcctctcgcccctacagcttctactcctccctcatcagttatgaggaggatcagagacaaggcgctgaaccacggaagaactttgtgaaaccgaatgagacgaagacctacttctggaaagtacagcaccacatggcccccacaaaagacgaattcgattgcaaagcatgggcgtatttttcagacgttgacttggagaaagatgtacattcaggacttattggtcctttgttggtgtgtcacactaacactctcaatccagcccatggcaggcaggtgacagtccaggaattcgctcttttctttaccatctttgatgagaccaagtcctggtacttcacggaaaacatggagcgcaattgcagagccccctgtaacatacagatggaggaccctacctttaaggaaaattatcggttccacgcaatcaacggatacattatggatacactccctggccttgtgatggctcaggaccaacgaatcaggtggtacctcctcagcatgggttctaatgagaacatacactccattcacttttcaggacatgtgttcactgtccggaagaaagaagagtataagatggccctctacaatttgtatccaggcgtgtttgagaccgttgaaatgcttccctctaaagctggcatctggagagtagagtgcttgatcggagaacatcttcacgcaggtatgagcaccttgttcctcgtgtacagcaacaaatgtcagaacccacttggcatggccagtggacacattcgcgactttcagatcacagcatctggccagtatggacaatgggccccaaagttggctcgcctccattactccggtagcataaatgcgtggtccactaaagaacctttcagctggattaaggtcgatcttcttgcccccatgatcatccacggcattaagacacagggagcgaggcagaaattctcctccctctacatctcacagttcattattatgtatagtttggacggcaagaagtggcaaacttatagaggtaacagtactggaacactcatggtgttcttcggcaacgttgatagctctggcatcaaacacaacatctttaatcctcccataatagctcggtacatcagattgcatccgacccactacagcattaggagtacactccgaatggagcttatgggttgcgacttgaattcctgttcaatgccactcggaatggagtctaaagccatctctgatgcacagataaccgccagtagctactttacgaacatgtttgctacgtggtcaccctctaaggcaaggcttcatttgcaaggccggtctaatgcctggagacctcaggtgaacaacccgaaagaatggctccaggtggactttcagaagaccatgaaagtaacaggtgtcactactcagggagttaagtccttggataccagcatgtatgtgaaggagttccttatttcctcatcacaagatggccaccagtggaccctcttctttcagaatggtaaggtcaaagtgtttcagggcaatcaagacagcttcacacccgtggtgaacagtcttgatcctccactcttgacacgataccttcgaatccatccacagtcttgggagcaccagattgcattgcgcatggaagtacttggatgcgaggctcaggacctctac

SEQ ID NO: 720 - protein, 1457 aa, synthetic construct
  REGION 1..1457: note = Variant of human B-domain deleted Factor VIII
MQIELSTCFFLCLLRFCFSATRRYYLGAVELSWDYMQSDLGELPVDARFPPRVPKSFPFNTSVVYKKTLFVEFTDHLFNIAKPRPPWMGLLGPTIQAEVYDTVVITLKNMASHPVSLHAVGVSYWKASEGAEYDDQTSQREKEDDKVFPGGSHTYVWQVLKENGPMASDPPCLTYSYLSHVDLVKDLNSGLIGALLVCREGSLAKEKTQTLHKFILLFAVFDEGKSWHSETKNSLMQDRDAASARAWPKMHTVNGYVNRSLPGLIGCHRKSVYWHVIGMGTTPEVHSIFLEGHTFLVRNHRQASLEISPITFLTAQTLLMDLGQFLLFCHISSHQHDGMEAYVKVDSCPEEPQLRMKNNEEAEDYDDDLTDSEMDVVRFDDDNSPSFIQIRSVAKKHPKTWVHYIAAEEEDWDYAPLVLAPDDRSYKSQYLNNGPQRIGRKYKKVRFMAYTDETFKTREAIQHESGILGPLLYGEVGDTLLIIFKNQASRPYNIYPHGITDVRPLYSRRLPKGVKHLKDFPILPGEIFKYKWTVTVEDGPTKSDPRCLTRYYSSFVNMERDLASGLIGPLLICYKESVDQRGNQIMSDKRNVILFSVFDENRSWYLTENIQRFLPNPAGVQLEDPEFQASNIMHSINGYVFDSLQLSVCLHEVAYWYILSIGAQTDFLSVFFSGYTFKHKMVYEDTLTLFPFSGETVFMSMENPGLWILGCHNSDFRNRGMTALLKVSSCDKNTGDYYEDSYEDISAYLLSKNNAIEPRSFSQNPPVLKRHQREITRTTLQSDQEEIDYDDTISVEMKKEDFDIYDEDENQSPRSFQKKTRHYFIAAVERLWDYGMSSSPHVLRNRAQSGSVPQFKKVVFQEFTDGSFTQPLYRGELNEHLGLLGPYIRAEVEDNIMVTFRNQASRPYSFYSSLISYEEDQRQGAEPRKNFVKPNETKTYFWKVQHHMAPTKDEFDCKAWAYFSDVDLEKDVHSGLIGPLLVCHTNTLNPAHGRQVTVQEFALFFTIFDETKSWYFTENMERNCRAPCNIQMEDPTFKENYRFHAINGYIMDTLPGLVMAQDQRIRWYLLSMGSNENIHSIHFSGHVFTVRKKEEYKMALYNLYPGVFETVEMLPSKAGIWRVECLIGEHLHAGMSTLFLVYSNKCQNPLGMASGHIRDFQITASGQYGQWAPKLARLHYSGSINAWSTKEPFSWIKVDLLAPMIIHGIKTQGARQKFSSLYISQFIIMYSLDGKKWQTYRGNSTGTLMVFFGNVDSSGIKHNIFNPPIIARYIRLHPTHYSIRSTLRMELMGCDLNSCSMPLGMESKAISDAQITASSYFTNMFATWSPSKARLHLQGRSNAWRPQVNNPKEWLQVDFQKTMKVTGVTTQGVKSLDTSMYVKEFLISSSQDGHQWTLFFQNGKVKVFQGNQDSFTPVVNSLDPPLLTRYLRIHPQSWEHQIALRMEVLGCEAQDLY

SEQ ID NO: 721 - DNA, 4371 bp, synthetic construct
  misc_feature 1..4371: note = Variant of human B-domain deleted Factor VIII
  source 1..4371: mol_type = other DNA
atgcagattgaactgtctacctgcttcttcctctgtttgctgaggttctgctttagcgccactagacggtactaccttggcgctgtggagctgtcctgggactatatgcagagtgatttgggagagcttcccgtcgacgcacgatttcctcctcgcgttccaaagtcatttcccttcaacacaagcgtggtgtacaagaagacgctcttcgtcgaattcaccgatcacctgttcaatatcgccaaacccagaccaccatggatgggtcttttggggcctaccatacaagcggaggtgtatgacacagttgttatcactctcaagaacatggcttctcatccggtaagtcttcacgcagtgggcgtgtcctactggaaagcttcagaaggagccgagtatgatgatcagacatcccagagggagaaagaagacgacaaggtatttccaggtgggtctcatacctatgtgtggcaagtgctcaaagagaatggccctatggcaagcgatccgctctgtttgacttacagctacctttcacacgttgacctcgtcaaggacctcaactccgggttgattggagccttgttggtatgcagggaaggatctcttgccaaagagaagacacagaccctccacaagtttatccttctctttgctgtgttcgatgagggcaaaagttggcatagcgaaacgaagaattccctcatgcaggatcgcgacgcagccagcgccagagcttggcccaagatgcacactgtgaacggatatgtcaataggtcacttcctggcttgattgggtgtcatcggaaaagtgtctactggcacgtgatcggaatggggacaacaccagaggtccactccatatttctcgaaggccataccttccttgttcgaaaccacagacaggcatccttggagatctctcccattacctttctcactgcccaaacgctccttatggacttgggtcagttccttctcttctgccatatcagctcacaccagcatgatggtatggaagcttatgtgaaagtcgacagttgtcctgaggagccacagttgcgcatgaagaataatgaagaagccgaggattacgacgacgatctcaccgattctgagatggacgtggtgaggtttgatgacgacaactctccctccatcattcaaatccggagcgtggcgaagaaacaccccaagacttgggtccactatatagcggcggaagaggaggattgggattacgctcctcttgtattggcaccagatgaccgctcatacaaaagccagtacctcaacaacggaccgcagagaattggccggaagtataagaaagtgcgatttatggcctatacagacgaaacctttaagacaagggaggccatccagcatgagagtgggattttgggacctcttctttacggcgaagttggtgataccctcctcatcatcttcaagaatcaagcttctcgcccctataacatttacccacacgggatcactgacgttaggcctttgtatagcagaagacttcccaaaggcgtgaagcatctcaaagacttccccattttgccaggcgagatctttaagtacaaatggaccgtcacagtggaagatggaccgactaaatcagaccctcgatgccttacgcggtactattcctccttcgtgaatatggagagagatttggcaagcggactcataggaccactcctcatctgttacaaggaatctgtagaccagaggggtaaccagattatgagtgataaacgcaatgtgatcctttttagcgtcttcgacgagaaccggtcctggtacttgaccgagaatatacaaaggttccttcccaaccccgcaggcgttcagttggaagaccctgagtttcaggccagcaatattatgcactcaatcaacggctatgtgtttgatagtctccagctttctgtttgcctccatgaagtagcctattggtacatcttgtcaattggtgctcaaacagacttcctctccgtcttcttctccggctacacctttaagcacaagatggtgtatgaggacactctcacactctttccattttctggagaaaccgtgttcatgagcatggagaatccaggcctttggatcttgggttgccacaacagtgattttcgcaatcggggaatgactgctctcctcaaagtcagcagctgtgataagaacacaggcgactattacgaagattcttacgaggacataagtgcctacttgttgtccaagaataacgccattgagcccagatcattctcccagaatcctcccgtgcttaaaaggcatcagcgcgaaatcaccagaactactcttcagtctgatcaagaggagattgactatgacgacaccataagcgtggaaatgaagaaggaggatttcgatatctatgacgaagatgagaaccagtctccgcggagctttcagaagaagacgcgacactacttcattgcagcagtcgaaaggctttgggactacggtatgtcatcatcccctcatgtgttgcgcaatagagctcagagtggaagtgttccacagttcaagaaagtcgtctttcaagagtttacagatggcagcttcacacagcctctctatcggggcgagcttaacgaacatttgggactccttggtccctatatccgagccgaagtggaggacaacattatggttacctttaggaatcaagcctctcgcccctacagcttctactcctccctcatcagttatgaggaggatcagagacaaggcgctgaaccacggaagaactttgtgaaaccgaatgagacgaagacctacttctggaaagtacagcaccacatggcccccacaaaagacgaattcgattgcaaagcatgggcgtatttttcagacgttgacttggagaaagatgtacattcaggacttattggtcctttgttggtgtgtcacactaacactctcaatccagcccatggcaggcaggtgacagtccaggaattcgctcttttctttaccatctttgatgagaccaagtcctggtacttcacggaaaacatggagcgcaattgcagagccccctgtaacatacagatggaggaccctacctttaaggaaaattatcggttccacgcaatcaacggatacattatggatacactccctggccttgtgatggctcaggaccaacgaatcaggtggtacctcctcagcatgggttctaatgagaacatacactccattcacttttcaggacatgtgttcactgtccggaagaaagaagagtataagatggccctctacaatttgtatccaggcgtgtttgagaccgttgaaatgcttccctctaaagctggcatctggagagtagagtgcttgatcggagaacatcttcacgcaggtatgagcaccttgttcctcgtgtacagcaacaaatgtcagaccccacttggcatggccagtggacacattcgcgactttcagatcacagcatctggccagtatggacaatgggccccaaagttggctcgcctccattactccggtagcataaatgcgtggtccactaaagaacctttcagctggattaaggtcgatcttcttgcccccatgatcatccacggcattaagacacagggagcgaggcagaaattctcctccctctacatctcacagttcattattatgtatagtttggacggcaagaagtggcaaacttatagaggtaacagtactggaacactcatggtgttcttcggcaacgttgatagctctggcatcaaacacaacatctttaatcctcctataatagctcggtacatcagattgcatccgacccactacagcattaggagtacactccgaatggagcttatgggttgcgacttgaattcctgttcaatgccactcggaatggagtctaaagccatctctgatgcacagataaccgccagtagctactttacgaacatgtttgctacgtggtcaccctctaaggcaaggcttcatttgcaaggccggtctaatgcctggagacctcaggtgaacaacccgaaagaatggctccaggtggactttcagaagaccatgaaagtaacaggtgtcactactcagggagttaagtccttggatactagcatgtatgtgaaggagttccttatttcctcatcacaagatggccaccagtggaccctcttctttcagaatggtaaggtcaaagtgtttcagggcaatcaagacagcttcacacccgtggtgaacagtcttgatcctccactcttgacacgataccttcgaatccatccacagtcttgggagcaccagattgcattgcgcatggaagtacttggatgcgaggctcaggacctctac

SEQ ID NO: 722 - protein, 1457 aa, synthetic construct
  REGION 1..1457: note = Variant of human B-domain deleted Factor VIII
MQIELSTCFFLCLLRFCFSATRRYYLGAVELSWDYMQSDLGELPVDARFPPRVPKSFPFNTSVVYKKTLFVEFTDHLFNIAKPRPPWMGLLGPTIQAEVYDTVVITLKNMASHPVSLHAVGVSYWKASEGAEYDDQTSQREKEDDKVFPGGSHTYVWQVLKENGPMASDPLCLTYSYLSHVDLVKDLNSGLIGALLVCREGSLAKEKTQTLHKFILLFAVFDEGKSWHSETKNSLMQDRDAASARAWPKMHTVNGYVNRSLPGLIGCHRKSVYWHVIGMGTTPEVHSIFLEGHTFLVRNHRQASLEISPITFLTAQTLLMDLGQFLLFCHISSHQHDGMEAYVKVDSCPEEPQLRMKNNEEAEDYDDDLTDSEMDVVRFDDDNSPSIIQIRSVAKKHPKTWVHYIAAEEEDWDYAPLVLAPDDRSYKSQYLNNGPQRIGRKYKKVRFMAYTDETFKTREAIQHESGILGPLLYGEVGDTLLIIFKNQASRPYNIYPHGITDVRPLYSRRLPKGVKHLKDFPILPGEIFKYKWTVTVEDGPTKSDPRCLTRYYSSFVNMERDLASGLIGPLLICYKESVDQRGNQIMSDKRNVILFSVFDENRSWYLTENIQRFLPNPAGVQLEDPEFQASNIMHSINGYVFDSLQLSVCLHEVAYWYILSIGAQTDFLSVFFSGYTFKHKMVYEDTLTLFPFSGETVFMSMENPGLWILGCHNSDFRNRGMTALLKVSSCDKNTGDYYEDSYEDISAYLLSKNNAIEPRSFSQNPPVLKRHQREITRTTLQSDQEEIDYDDTISVEMKKEDFDIYDEDENQSPRSFQKKTRHYFIAAVERLWDYGMSSSPHVLRNRAQSGSVPQFKKVVFQEFTDGSFTQPLYRGELNEHLGLLGPYIRAEVEDNIMVTFRNQASRPYSFYSSLISYEEDQRQGAEPRKNFVKPNETKTYFWKVQHHMAPTKDEFDCKAWAYFSDVDLEKDVHSGLIGPLLVCHTNTLNPAHGRQVTVQEFALFFTIFDETKSWYFTENMERNCRAPCNIQMEDPTFKENYRFHAINGYIMDTLPGLVMAQDQRIRWYLLSMGSNENIHSIHFSGHVFTVRKKEEYKMALYNLYPGVFETVEMLPSKAGIWRVECLIGEHLHAGMSTLFLVYSNKCQTPLGMASGHIRDFQITASGQYGQWAPKLARLHYSGSINAWSTKEPFSWIKVDLLAPMIIHGIKTQGARQKFSSLYISQFIIMYSLDGKKWQTYRGNSTGTLMVFFGNVDSSGIKHNIFNPPIIARYIRLHPTHYSIRSTLRMELMGCDLNSCSMPLGMESKAISDAQITASSYFTNMFATWSPSKARLHLQGRSNAWRPQVNNPKEWLQVDFQKTMKVTGVTTQGVKSLDTSMYVKEFLISSSQDGHQWTLFFQNGKVKVFQGNQDSFTPVVNSLDPPLLTRYLRIHPQSWEHQIALRMEVLGCEAQDLY

SEQ ID NO: 723 - DNA, 4371 bp, synthetic construct
  misc_feature 1..4371: note = Variant of human B-domain deleted Factor VIII
  source 1..4371: mol_type = other DNA
atgcagattgaactgtctacctgcttcttcctctgtttgctgaggttctgctttagcgccactagacggtactaccttggcgctgtggagctgtcctgggactatatgcagagtgatttgggagagcttcccgtcgacgcacgatttcctcctcgcgttccaaagtcatttcccgataacacaagcgtggtgtacaagaagacgctcttcgtcgaattcaccgatcacctgttcaatatcgccaaacccagaccaccatggatgggtcttttggggcctaccatacaagcggaggtgtatgacacagttgttatcactctcaagaacatggcttctcatccggtaagtcttcacgcagtgggcgtgtcctactggaaagcttcagaaggagccgagtatgatgatcagacatcccagagggagaaagaagacgacaaggtatttccaggtgggtctcatacctatgtgtggcaagtgctcaaagagaatggccctatggcaagcgatccgctctgtttgacttacagctacctttcacacgttgacctcgtcaaggacctcaactccgggttgattggagccttgttggtatgcagggaaggatctcttgccaaagagaagacacagaccctccacaagtttatccttctctttgctgtgttcgatgagggcaaaagttggcatagcgaaacgaagaattccctcatgcaggatcgcgacgcagccagcgccagagcttggcccaagatgcacactgtgaacggatatgtcaataggtcacttcctggcttgattgggtgtcatcggaaaagtgtctactggcacgtgatcggaatggggacaacaccagaggtccactccatatttctcgaaggccataccttccttgttcgaaaccacagacaggcatccttggagatctctcccattacctttctcactgcccaaacgctccttatggacttgggtcagttccttctcttctgccatatcagctcacaccagcatgatggtatggaagcttatgtgaaagtcgacagttgtcctgaggagccacagttgcgcatgaagaataatgaagaagccgaggattacgacgacgatctcaccgattctgagatggacgtggtgaggtttgatgacgacaactctccctccttcattcaaatccggagcgtggcgaagaaacaccccaagacttgggtccactatatagcggcggaagaggaggattgggattacgctcctcttgtattggcaccagatgaccgctcatacaaaagccagtacctcaacaacggaccgcagagaattggccggaagtataagaaagtgcgatttatggcctatacagacgaaacctttaagacaagggaggccatccagcatgagagtgggattttgggacctcttctttacggcgaagttggtgataccctcctcatcatcttcaagaatcaagcttctcgcccctataacatttacccacacgggatcactgacgttaggcctttgtatagcagaagacttcccaaaggcgtgaagcatctcaaagacttccccattttgccaggcgagatctttaagtacaaatggaccgtcacagtggaagatggaccgactaaatcagaccctcgatgccttacgcggtactattcctccttcgtgaatatggagagagatttggcaagcggactcataggaccactcctcatctgttacaaggaatctgtagaccagaggggtaaccagattatgagtgataaacgcaatgtgatcctttttagcgtcttcgacgagaaccggtcctggtacttgaccgagaatatacaaaggttccttcccaaccccgcaggcgttcagttggaagaccctgagtttcaggccagcaatattatgcactcaatcaacggctatgtgtttgatagtctccagctttctgtttgcctccatgaagtagcctattggtacatcttgtcaattggtgctcaaacagacttcctctccgtcttcttctccggctacacctttaagcacaagatggtgtatgaggacactctcacactctttccattttctggagaaaccgtgttcatgagcatggagaatccaggcctttggatcttgggttgccacaacagtgattttcgcaatcggggaatgactgctctcctcaaagtcagcagctgtgataagaacacaggcgactattacgaagattcttacgaggacataagtgcctacttgttgtccaagaataacgccattgagcccagatcattctcccagaatcctcccgtgcttaaaaggcatcagcgcgaaatcaccagaactactcttcagtctgatcaagaggagattgactatgacgacaccataagcgtggaaatgaagaaggaggatttcgatatctatgacgaagatgagaaccagtctccgcggagctttcagaagaagacgcgacactacttcattgcagcagtcgaaaggctttgggactacggtatgtcatcatcccctcatgtgttgcgcaatagagctcagagtggaagtgttccacagttcaagaaagtcgtctttcaagagtttacagatggcagcttcacacagcctctctatcggggcgagcttaacgaacatttgggactccttggtccctatatccgagccgaagtggaggacaacattatggttacctttaggaatcaagcctctcgcccctacagcttctactcctccctcatcagttatgaggaggatcagagacaaggcgctgaaccacggaagaactttgtgaaaccgaatgagacgaagacctacttctggaaagtacagcaccacatggcccccacaaaagacgaattcgattgcaaagcatgggcgtatttttcagacgttgacttggagaaagatgtacattcaggacttattggtcctttgttggtgtgtcacactaacactctcaatccagcccatggcaggcaggtgacagtccaggaattcgctcttttctttaccatctttgatgagaccaagtcctggtacttcacggaaaacatggagcgcaattgcagagccccctgtaacatacagatggaggaccctacctttaaggaaaattatcggttccacgcaatcaacggatacattatggatacactccctggccttgtgatggctcaggaccaacgaatcaggtggtacctcctcagcatgggttctaatgagaacatacactccattcacttttcaggacatgtgttcactgtccggaagaaagaagagtataagatggccctctacaatttgtatccaggcgtgtttgagaccgttgaaatgcttccctctaaagctggcatctggagagtagagtgcttgatcggagaacatcttcacgcaggtatgagcaccttgttcctcgtgtacagcaacaaatgtcagaccccacttggcatggccagtggacacattcgcgactttcagatcacagcatctggccagtatggacaatgggccccaaagttggctcgcctccattactccggtagcataaatgcgtggtccactaaagaacctttcagctggattaaggtcgatcttcttgcccccatgatcatccacggcattaagacacagggagcgaggcagaaattctcctccctctacatctcacagttcattattatgtatagtttggacggcaagaagtggcaaacttatagaggtaacagtactggaacactgatggtgttcttcggcaacgttgatagctctggcatcaaacacaacatctttaatcctcccataatagctcggtacatcagattgcatccgacccactacagcattaggagtacactccgaatggagcttatgggttgcgacttgaattcctgttcaatgccactcggaatggagtctaaagccatctctgatgcacagataaccgccagtagctactttacgaacatgtttgctacgtggtcaccctctaaggcaaggcttcatttgcaaggccggtctaatgcctggagacctcaggtgaacaacccgaaagaatggctccaggtggactttcagaagaccatgaaagtaacaggtgtcactactcagggagttaagtccttggataccagcatgtatgtgaaggagttccttatttcctcatcacaagatggccaccagtggaccctcttctttcagaatggtaaggtcaaagtgtttcagggcaatcaagacagcttcacacccgtggtgaacagtcttgatcctccactcttgacacgataccttcgaatccatccacagtcttgggagcaccagattgcattgcgcatggaagtacttggatgcgaggctcaggacctctac

SEQ ID NO: 724 - protein, 1457 aa, synthetic construct
  REGION 1..1457: note = Variant of human B-domain deleted Factor VIII
MQIELSTCFFLCLLRFCFSATRRYYLGAVELSWDYMQSDLGELPVDARFPPRVPKSFPDNTSVVYKKTLFVEFTDHLFNIAKPRPPWMGLLGPTIQAEVYDTVVITLKNMASHPVSLHAVGVSYWKASEGAEYDDQTSQREKEDDKVFPGGSHTYVWQVLKENGPMASDPLCLTYSYLSHVDLVKDLNSGLIGALLVCREGSLAKEKTQTLHKFILLFAVFDEGKSWHSETKNSLMQDRDAASARAWPKMHTVNGYVNRSLPGLIGCHRKSVYWHVIGMGTTPEVHSIFLEGHTFLVRNHRQASLEISPITFLTAQTLLMDLGQFLLFCHISSHQHDGMEAYVKVDSCPEEPQLRMKNNEEAEDYDDDLTDSEMDVVRFDDDNSPSFIQIRSVAKKHPKTWVHYIAAEEEDWDYAPLVLAPDDRSYKSQYLNNGPQRIGRKYKKVRFMAYTDETFKTREAIQHESGILGPLLYGEVGDTLLIIFKNQASRPYNIYPHGITDVRPLYSRRLPKGVKHLKDFPILPGEIFKYKWTVTVEDGPTKSDPRCLTRYYSSFVNMERDLASGLIGPLLICYKESVDQRGNQIMSDKRNVILFSVFDENRSWYLTENIQRFLPNPAGVQLEDPEFQASNIMHSINGYVFDSLQLSVCLHEVAYWYILSIGAQTDFLSVFFSGYTFKHKMVYEDTLTLFPFSGETVFMSMENPGLWILGCHNSDFRNRGMTALLKVSSCDKNTGDYYEDSYEDISAYLLSKNNAIEPRSFSQNPPVLKRHQREITRTTLQSDQEEIDYDDTISVEMKKEDFDIYDEDENQSPRSFQKKTRHYFIAAVERLWDYGMSSSPHVLRNRAQSGSVPQFKKVVFQEFTDGSFTQPLYRGELNEHLGLLGPYIRAEVEDNIMVTFRNQASRPYSFYSSLISYEEDQRQGAEPRKNFVKPNETKTYFWKVQHHMAPTKDEFDCKAWAYFSDVDLEKDVHSGLIGPLLVCHTNTLNPAHGRQVTVQEFALFFTIFDETKSWYFTENMERNCRAPCNIQMEDPTFKENYRFHAINGYIMDTLPGLVMAQDQRIRWYLLSMGSNENIHSIHFSGHVFTVRKKEEYKMALYNLYPGVFETVEMLPSKAGIWRVECLIGEHLHAGMSTLFLVYSNKCQTPLGMASGHIRDFQITASGQYGQWAPKLARLHYSGSINAWSTKEPFSWIKVDLLAPMIIHGIKTQGARQKFSSLYISQFIIMYSLDGKKWQTYRGNSTGTLMVFFGNVDSSGIKHNIFNPPIIARYIRLHPTHYSIRSTLRMELMGCDLNSCSMPLGMESKAISDAQITASSYFTNMFATWSPSKARLHLQGRSNAWRPQVNNPKEWLQVDFQKTMKVTGVTTQGVKSLDTSMYVKEFLISSSQDGHQWTLFFQNGKVKVFQGNQDSFTPVVNSLDPPLLTRYLRIHPQSWEHQIALRMEVLGCEAQDLY

SEQ ID NO: 725 - DNA, 4371 bp, synthetic construct
  misc_feature 1..4371: note = Variant of human B-domain deleted Factor VIII
  source 1..4371: mol_type = other DNA
atgcagattgaactgtctacctgcttcttcctctgtttgctgaggttctgctttagcgccactagacggtactaccttggcgctgtggagctgtcctgggactatatgcagagtgatttgggagagcttcccgtcgacgcacgatttcctcctcgcgttccaaagtcatttccctttaacacaagcgtggtgtacaagaagacgctcttcgtcgaattcaccgatcacctgttcaatatcgccaaacccagaccaccatggatgggtcttttggggcctaccatacaagcggaggtgtatgacacagttgttatcactctcaagaacatggcttctcatccggtaagtcttcacgcagtgggcgtgtcctactggaaagcttcagaaggagccgagtatgatgatcagacatcccagagggagaaagaagacgacaaggtatttccaggtgggtctcatacctatgtgtggcaagtgctcaaagagaatggccctatggcaagcgatccgctctgtttgacttacagctacctttcacacgttgacctcgtcaaggacctcaactccgggttgattggagccttgttggtatgcagggaaggatctcttgccaaagagaagacacagaccctccacaagtttatccttctctttgctgtgttcgatgagggcaaaagttggcatagcgaaacgaagaattccctcatgcaggatcgcgacgcagccagcgccagagcttggcccaagatgcacactgtgaacggatatgtcaataggtcacttcctggcttgattgggtgtcatcggaaaagtgtctactggcacgtgatcggaatggggacaacaccagaggtccactccatatttctcgaaggccataccttccttgttcgaaaccacagacaggcatccttggagatctctcccattacctttctcactgcccaaacgctccttatggacttgggtcagttccttctcttctgccatatcagctcacaccagcatgatggtatggaagcttatgtgaaagtcgacagttgtcctgaggagccacagttgcgcatgaagaataatgaagaagccgaggattacgacgacgatctcaccgattctgagatggacgtggtgaggtttgatgacgacaactctccctccttcattcaaatccggagcgtggcgaagaaacaccccaagacttgggtccactatatagcggcggaagaggaggattgggattacgctcctcttgtattggcaccagatgaccgctcatacaaaagccagtacctcaacaacggaccgcagagaattggccggaagtataagaaagtgcgatttatggcctatacagacgaaacctttaagacaagggaggccatccagcatgagagtgggattttgggacctcttctttacggcgaagttggtgataccctcctcatcatcttcaagaatcaagcttctcgcccctataacatttacccacacgggatcactgacgttaggcctttgtatagcagaagacttcccaaaggcgtgaagcatctcaaagacttccccattttgccaggcgagatctttaagtacaaatggaccgtcacagtggaagatggaccgactaaatcagaccctcgatgccttacgcggtactattcctccttcgtgaatatggagagagatttggcaagcggactcataggaccactcctcatctgttacaaggaatctgtagaccagaggggtaaccagattatgagtgataaacgcaatgtgatcctttttagcgtcttcgacgagaaccggtcctggtacttgaccgagaatatacaaaggttccttcccaaccccgcaggcgttcagttggaagaccctgagtttcaggccagcaatattatgcactcaatcaacggctatgtgtttgatagtctccagctttctgtttgcctccatgaagtagcctattggtacatcttgtcaattggtgctcaaacagacttcctctccgtcttcttctccggctacacctttaagcacaagatggtgtatgaggacactctcacactctttccattttctggagaaaccgtgttcatgagcatggagaatccaggcctttggatcttgggttgccacaacagtgattttcgcaatcggggaatgactgctctcctcaaagtcagcagctgtgataagaacacaggcgactattacgaagattcttacgaggacataagtgcctacttgctgtccaagaataacgccattgagcccagatcattctcccagaatcctcccgtgcttaaaaggcatcagcgcgaaatcaccagaactactcttcagtctgatcaagaggagattgactatgacgacaccataagcgtggaaatgaagaaggaggatttcgatatctatgacgaagatgagaaccagtctccgcggagctttcagaagaagacgcgacactacttcattgcagcagtcgaaaggctttgggactacggtatgtcatcatcccctcatgtgttgcgcaatagagctcagagtggaagtgttccacagttcaagaaagtcgtctttcaagagtttacagatggcagcttcacacagcctctctatcggggcgagcttaacgaacatttgggactccttggtccctatatccgagccgaagtggaggacaacattatggttacctttaggaatcaagcctctcgcccctacagcttctactcctccctcatcagttatgaggaggatcagagacaaggcgctgaaccacggaagaactttgtgaaaccgaatgagacgaagacctacttctggaaagtacagcaccacatggcccccacaaaagacgaattcgattgcaaagcatgggcgtatttttcagacgttgacttggagaaagatgtacattcaggacttattggtcctttgttggtgtgtcacactaacactctcaatccagcccatggcaggcaggtgacagtccaggaattcgctcttttctttaccatctttgatgagaccaagtcctggtacttcacggaaaacatggagcgcaattgcagagccccctgtaacatacagatggaggaccctacctttaaggaaaattatcggttccacgcaatcaacggatacattatggatacactccctggccttgtgatggctcaggaccaacgaatcaggtggtacctcctcagcatgggttctaatgagaacatacactccattcacttttcaggacatgtgttcactgtccggaagaaagaagagtataagatggccctctacaatttgtatccaggcgtgtttgagaccgttgaaatgcttccctctaaagctggcatctggagagtagagtgcttgatcggagaacatcttcacgcaggtatgagcaccttgttcctcgtgtacagcaacaaatgtcagaccccacttggcatggccagtggacacattcgcgactttcagatcacagcatctggccagtatggacaatgggccccaaagttggctcgcctccattactccggtagcataaatgcgtggtccactaaagaacctttcagctggattaaggtcgatcttcttgcccccatgatcatccacggcattaagacacagggagcgaggcagaaattctcctccctctacatctcacagttcattattatgtatagtttggacggcaagaagtggcaaacttatagaggtaacagtactggaacactcatggtgttcttcggcaacgttgatagctctggcatcaaacacaacatctttaatcctcccataatagctcggtacatcagattgcatccgacccactacagcattaggagtacactccgaatggagcttatgggttgcgacttgaattcctgttcaatgccactcggaatggagtctaaagccatctctgatgcacagataaccgccagtagctactttacgaacatgtttgctacgtggtcaccctctaaggcaaggcttcatttgcaaggccggtctaatgcctggagacctcaggtgaacaacccgaaagaatggctccaggtggactttcagaagaccatgaaagtaacaggtgtcactactcagggagttaagtccttggataccagcatgtatgtgaaggagttccttatttcctcatcacaagatggccaccagtggaccctcttctttcagaatggtaaggtcaaagtgtttcagggcaatcaagacagcttcacacccgtggtgaacagtcttgatcctccactcttgacacgataccttcgaatccatccacagtcttgggagtcgcagattgcattgcgcatggaagtacttggatgcgaggctcaggacctctac

SEQ ID NO: 726 - protein, 1457 aa, synthetic construct
  REGION 1..1457: note = Variant of human B-domain deleted Factor VIII
MQIELSTCFFLCLLRFCFSATRRYYLGAVELSWDYMQSDLGELPVDARFPPRVPKSFPFNTSVVYKKTLFVEFTDHLFNIAKPRPPWMGLLGPTIQAEVYDTVVITLKNMASHPVSLHAVGVSYWKASEGAEYDDQTSQREKEDDKVFPGGSHTYVWQVLKENGPMASDPLCLTYSYLSHVDLVKDLNSGLIGALLVCREGSLAKEKTQTLHKFILLFAVFDEGKSWHSETKNSLMQDRDAASARAWPKMHTVNGYVNRSLPGLIGCHRKSVYWHVIGMGTTPEVHSIFLEGHTFLVRNHRQASLEISPITFLTAQTLLMDLGQFLLFCHISSHQHDGMEAYVKVDSCPEEPQLRMKNNEEAEDYDDDLTDSEMDVVRFDDDNSPSFIQIRSVAKKHPKTWVHYIAAEEEDWDYAPLVLAPDDRSYKSQYLNNGPQRIGRKYKKVRFMAYTDETFKTREAIQHESGILGPLLYGEVGDTLLIIFKNQASRPYNIYPHGITDVRPLYSRRLPKGVKHLKDFPILPGEIFKYKWTVTVEDGPTKSDPRCLTRYYSSFVNMERDLASGLIGPLLICYKESVDQRGNQIMSDKRNVILFSVFDENRSWYLTENIQRFLPNPAGVQLEDPEFQASNIMHSINGYVFDSLQLSVCLHEVAYWYILSIGAQTDFLSVFFSGYTFKHKMVYEDTLTLFPFSGETVFMSMENPGLWILGCHNSDFRNRGMTALLKVSSCDKNTGDYYEDSYEDISAYLLSKNNAIEPRSFSQNPPVLKRHQREITRTTLQSDQEEIDYDDTISVEMKKEDFDIYDEDENQSPRSFQKKTRHYFIAAVERLWDYGMSSSPHVLRNRAQSGSVPQFKKVVFQEFTDGSFTQPLYRGELNEHLGLLGPYIRAEVEDNIMVTFRNQASRPYSFYSSLISYEEDQRQGAEPRKNFVKPNETKTYFWKVQHHMAPTKDEFDCKAWAYFSDVDLEKDVHSGLIGPLLVCHTNTLNPAHGRQVTVQEFALFFTIFDETKSWYFTENMERNCRAPCNIQMEDPTFKENYRFHAINGYIMDTLPGLVMAQDQRIRWYLLSMGSNENIHSIHFSGHVFTVRKKEEYKMALYNLYPGVFETVEMLPSKAGIWRVECLIGEHLHAGMSTLFLVYSNKCQTPLGMASGHIRDFQITASGQYGQWAPKLARLHYSGSINAWSTKEPFSWIKVDLLAPMIIHGIKTQGARQKFSSLYISQFIIMYSLDGKKWQTYRGNSTGTLMVFFGNVDSSGIKHNIFNPPIIARYIRLHPTHYSIRSTLRMELMGCDLNSCSMPLGMESKAISDAQITASSYFTNMFATWSPSKARLHLQGRSNAWRPQVNNPKEWLQVDFQKTMKVTGVTTQGVKSLDTSMYVKEFLISSSQDGHQWTLFFQNGKVKVFQGNQDSFTPVVNSLDPPLLTRYLRIHPQSWESQIALRMEVLGCEAQDLY

SEQ ID NO: 727 - DNA, 4371 bp, synthetic construct
  misc_feature 1..4371: note = Variant of human B-domain deleted Factor VIII
  source 1..4371: mol_type = other DNA
atgcagattgaactgtctacctgcttcttcctctgtttgctgaggttctgctttagcgccactagacggtactaccttggcgctgtggagctgtcctgggactatatgcagagtgatttgggagagcttcccgtcgacgcacgatttcctcctcgcgttccaaagtcatttcccttcaacacaagcgtggtgtacaagaagacgctcttcgtcgaattcaccgatcacctgttcaatatcgccaaacccagaccaccatggatgggtcttttggggcctaccatacaagcggaggtgtatgacacagttgttatcactctcaagaacatggcttctcatccggtaagtcttcacgcagtgggcgtgtcctactggaaagcttcagaaggagccgagtatgatgatcagacatcccagagggagaaagaagacgacaaggtatttccaggtgggtctcatacctatgtgtggcaagtgctcaaagagaatggccctatggcaagcgatccgctgtgtttgacttacagctacctttcacacgttgacctcgtcaaggacctcaactccgggttgattggagccttgttggtatgtagggaaggatctcttgccaaagagaagacacagaccctccacaagtttatccttctctttgctgtgttcgatgagggcaaaagttggcatagcgaaacgaagaattccctcatgcaggatcgcgacgcagccagcgccagagcttggcccaagatgcacactgtgaacggatatgtcaataggtcgcttcctggcttgattgggtgtcatcggaaaagtgtctactggcacgtgatcggaatggggacaacaccagaggtccactccatatttctcgaaggccataccttccttgttcgaaaccacagacaggcatccttggagatctctcccattacctttctcactgcccaaacgctccttatggacttgggtcagttccttctcttctgccatatcccgtcacaccagcatgatggtatggaagcttatgtgaaagtcgacagttgtcctgaggagccacagttgcgcatgaagaataatgaagaagccgaggattacgacgacgatctcaccgattctgagatggacgtggtgaggtttgatgacgacaactctccctccttcattcaaatccggagcgtggcgaagaaacaccccaagacttgggtccactatatagcggcggaagaggaggattgggattacgctcctcttgtattggcaccagatgaccgctcatacaaaagccagtacctcaacaacggaccgcagagaattggccggaagtataagaaagtgcgatttatggcctatacagacgaaacctttaagacaagggaggccatccagcatgagagtgggattttgggacctcttctttacggcgaagttggtgataccctcctcatcatcttcaagaatcaagcttctcgcccctataacatttacccacacgggatcactgacgttaggcctttgtatagcagaagacttcccaaaggcgtgaagcatctcaaagacttccccattttgccaggcgagatctttaagtacaaatggaccgtcacagtggaagatggaccgactaaatcagaccctcgatgccttacgcggtactattcctccttcgtgaatatggagagagatttggcaagcggactcataggaccactcctcatctgttacaaggaatctgtagaccagaggggtaaccagattatgagtgataaacgcaatgtgatcctttttagcgtcttcgacgagaaccggtcctggtacttgaccgagaatatacaaaggttccttcccaaccccgcaggcgttcagttggaagaccctgagtttcaggccagcaatattatgcactcaatcaacggctatgtgtttgatagtctccagctttctgtttgcctccatgaagtagcctattggtacatcttgtcaattggtgctcaaacagacttcctctccgtcttcttctccggctacacctttaagcacaagatggtgtatgaggacactctcacactctttccattttctggagaaaccgtgttcatgagcatggagaatccaggcctttggatcttgggttgccacaacagtgattttcgcaatcggggaatgactgctctcctcaaagtcagcagctgtgataagaacacaggcgactattacgaagattcttacgaggacataagtgcctacttggactccaagaataacgccattgagcccagatcattctcccagaatcctcccgtgcttaaaaggcatcagcgcgaaatcaccagaactactcttcagtctgatcaagaggagattgactatgacgacaccataagcgtggaaatgaagaaggaggatttcgatatctatgacgaagatgagaaccagtctccgcggagctttcagaagaagacgcgacactacttcattgcagcagtcgaaaggctttgggactacggtatgtcatcatcccctcatgtgttgcgcaatagagctcagagtggaagtgttccacagttcaagaaagtcgtctttcaagagtttacagatggcagcttcacacagcctctctatcggggcgagcttaacgaacatttgggactccttggtccctatatccgagccgaagtggaggacaacattatggttacctttaggaatcaagcctctcgcccctacagcttctactcctccctcatcagttatgaggaggatcagagacaaggcgctgaaccacggaagaactttgtgaaaccgaatgagacgaagacctacttctggaaagtacagcaccacatggcccccacaaaagacgaattcgattgcaaagcatgggcgtatttttcagacgttgacttggagaaagatgtacattcaggacttattggtcctttgttggtgtgtcacactaacactctcaatccagcccatggcaggcaggtgacagtccaggaattcgctcttttctttaccatctttgatgagaccaagtcctggtacttcacggaaaacatggagcgcaattgcagagccccctgtaacatacagatggaggaccctacctttaaggaaaattatcggttccacgcaatcaacggatacattatggatacactccctggccttgtgatggctcaggaccaacgaatcaggtggtacctcctcagcatgggttctaatgagaacatacactccattcacttttcaggacatgtgttcactgtccggaagaaagaagagtataagatggccctctacaatttgtatccaggcgtgtttgagaccgttgaaatgcttccctctaaagctggcatctggagagtagagtgcttgatcggagaacatcttcacgcaggtatgagcaccttgttcctcgtgtacagcaacaaatgtcagaccccacttggcatggccagtggacacattcgcgactttcagatcacagcatctggccagtatggacaatgggccccaaagttggctcgcctccattactccggtagcataaatgcgtggtccactaaagaaccttttagctggattaaggtcgatcttcttgcccccatgatcatccacggcattaagacacagggagcgaggcagaaattctcctccctgtacatctcacagttcattattatgtatagtttggacggcaagaagtggcaaacttatagaggtaacagtactggaacagacatggtgttcttcggcaacgttgatagctctggcatcaaacacaacatctttaatcctcccataatagctcggtacatcagattgcatccgacccactacagcattaggagtacactccgaatggagcttatgggttgcgacttgaattcctgttcaatgccactcggaatggagtctaaagccatctctgatgcacagataaccgccagtagctactttacgaacatgtttgctacgtggtcaccctctaaggcaaggcttcatttgcaaggccggtctaatgcctggagacctcaggtgaacaacccgaaagaatggctccaggtggactttcagaagaccatgaaagtaacaggtgtcactactcagggagttaagtccttggataccagcatgtatgtgaaggagttccttatttcctcatcacaagatggccaccagtggaccctcttctttcagaatggtaaggtcaaagtgtttcagggcaatcaagacagcttcacacccgtggtgaacagtcttgatcctccactcttgacacgataccttcgaatccatccacagtcttgggagcaccagattgcattgcgcatggaagtacttggatgcgaggctcaggacctctac

SEQ ID NO: 728 - protein, 1457 aa, synthetic construct
  REGION 1..1457: note = Variant of human B-domain deleted Factor VIII
MQIELSTCFFLCLLRFCFSATRRYYLGAVELSWDYMQSDLGELPVDARFPPRVPKSFPFNTSVVYKKTLFVEFTDHLFNIAKPRPPWMGLLGPTIQAEVYDTVVITLKNMASHPVSLHAVGVSYWKASEGAEYDDQTSQREKEDDKVFPGGSHTYVWQVLKENGPMASDPLCLTYSYLSHVDLVKDLNSGLIGALLVCREGSLAKEKTQTLHKFILLFAVFDEGKSWHSETKNSLMQDRDAASARAWPKMHTVNGYVNRSLPGLIGCHRKSVYWHVIGMGTTPEVHSIFLEGHTFLVRNHRQASLEISPITFLTAQTLLMDLGQFLLFCHIPSHQHDGMEAYVKVDSCPEEPQLRMKNNEEAEDYDDDLTDSEMDVVRFDDDNSPSFIQIRSVAKKHPKTWVHYIAAEEEDWDYAPLVLAPDDRSYKSQYLNNGPQRIGRKYKKVRFMAYTDETFKTREAIQHESGILGPLLYGEVGDTLLIIFKNQASRPYNIYPHGITDVRPLYSRRLPKGVKHLKDFPILPGEIFKYKWTVTVEDGPTKSDPRCLTRYYSSFVNMERDLASGLIGPLLICYKESVDQRGNQIMSDKRNVILFSVFDENRSWYLTENIQRFLPNPAGVQLEDPEFQASNIMHSINGYVFDSLQLSVCLHEVAYWYILSIGAQTDFLSVFFSGYTFKHKMVYEDTLTLFPFSGETVFMSMENPGLWILGCHNSDFRNRGMTALLKVSSCDKNTGDYYEDSYEDISAYLDSKNNAIEPRSFSQNPPVLKRHQREITRTTLQSDQEEIDYDDTISVEMKKEDFDIYDEDENQSPRSFQKKTRHYFIAAVERLWDYGMSSSPHVLRNRAQSGSVPQFKKVVFQEFTDGSFTQPLYRGELNEHLGLLGPYIRAEVEDNIMVTFRNQASRPYSFYSSLISYEEDQRQGAEPRKNFVKPNETKTYFWKVQHHMAPTKDEFDCKAWAYFSDVDLEKDVHSGLIGPLLVCHTNTLNPAHGRQVTVQEFALFFTIFDETKSWYFTENMERNCRAPCNIQMEDPTFKENYRFHAINGYIMDTLPGLVMAQDQRIRWYLLSMGSNENIHSIHFSGHVFTVRKKEEYKMALYNLYPGVFETVEMLPSKAGIWRVECLIGEHLHAGMSTLFLVYSNKCQTPLGMASGHIRDFQITASGQYGQWAPKLARLHYSGSINAWSTKEPFSWIKVDLLAPMIIHGIKTQGARQKFSSLYISQFIIMYSLDGKKWQTYRGNSTGTDMVFFGNVDSSGIKHNIFNPPIIARYIRLHPTHYSIRSTLRMELMGCDLNSCSMPLGMESKAISDAQITASSYFTNMFATWSPSKARLHLQGRSNAWRPQVNNPKEWLQVDFQKTMKVTGVTTQGVKSLDTSMYVKEFLISSSQDGHQWTLFFQNGKVKVFQGNQDSFTPVVNSLDPPLLTRYLRIHPQSWEHQIALRMEVLGCEAQDLY

SEQ ID NO: 729 - DNA, 4371 bp, synthetic construct
  misc_feature 1..4371: note = Variant of human B-domain deleted Factor VIII
  source 1..4371: mol_type = other DNA
atgcagattgaactgtctacctgcttcttcctctgtttgctgaggttctgctttagcgccactagacggtactaccttggcgccgtggagctgtcctgggactatatgcagagtgatttgggagagcttcccgtcgacgcacgatttcctcctcgcgttccaaagtcatttccctttaacacaagcgtggtgtacaagaagacgctcttcgtcgaattcaccgatcacctgttcaatatcgccaaacccagaccaccatggatgggtcttttggggcctaccatacaagcggaggtgtatgacacagttgttatcactctcaagaacatggcttctcatccggtaagtcttcacgcagtgggcgtgtcctactggaaagcttcagaaggagccgagtatgatgatcagacatcccagagggagaaagaagacgacaaggtatttccaggtgggtctcatacctatgtgtggcaagtgctcaaagagaatggccctatggcaagcgatccgctctgtttgacttacagctacctttcacacgttgacctcgtcaaggacctcaactccgggttgattggagccttgttggtatgcagggaaggatctcttgccaaagagaagacacagaccctccacaagtttatccttctctttgctgtgttcgatgagggcaaaagttggcatagcgaaacgaagaattccctcatgcaggatcgcgacgcagccagcgccagagcttggcccaagatgcacactgtgaacggatatgtcaataggtcgcttcctggcttgattgggtgtcatcggaaaagtgtctactggcacgtgatcggaatggggacaacaccagaggtccactccatatttctcgaaggccataccttccttgttcgaaaccacagacaggcatccttggagatctctcccattacctttctcactgcccaaacgctccttatggacttgggtcagttccttctcttctgccatatcagctcacaccagcatgatggtatggaagcttatgtgaaagtcgacagttgtcctgaggagccacagttgcgcatgaagaataatgaagaagccgaggattacgacgacgatctcaccgattctgagatggacgtggtgaggtttgatgacgacaactctccctccttcattcaaatccggagcgtggcgaagaaacaccccaagacttgggtccactatatagcggcggaagaggaggattgggattacgctcctcttgtattggcaccagatgaccgctcatacaaaagccagtacctcaacaacggaccgcagagaattggccggaagtataagaaagtgcgatttatggcctatacagacgaaacctttaagacaagggaggccatccagcatgagagtgggattttgggacctcttctttacggcgaagttggtgataccctcctcatcatcttcaagaatcaagcttctcgcccctataacatttacccacacgggatcactgacgttaggcctttgtatagcagaagacttcccaaaggcgtgaagcatctcaaagacttccccattttgccaggcgagatctttaagtacaaatggaccgtcacagtggaagatggaccgactaaatcagaccctcgatgccttacgcggtactattcctccttcgtgaatatggagagagatttggcaagcggactcataggaccactcctcatctgttacaaggaatctgtagaccagaggggtaaccagattatgagtgataaacgcaatgtgatcctttttagcgtcttcgacgagaaccggtcctggtacttgaccgagaatatacaaaggttccttcccaaccccgcaggcgttcagttggaagaccctgagtttcaggccagcaatattatgcactcaatcaacggctatgtgtttgatagtctccagctttctgtttgcctccatgaagtagcctattggtacatcttgtcaattggtgctcaaacagacttcctctccgtcttcttctccggctacacctttaagcacaagatggtgtatgaggacactctcacactctttccattttctggagaaaccgtgttcatgagcatggagaatccaggcctttggatcttgggttgccacaacagtgattttcgcaatcggggaatgactgctctcctcaaagtcagcagctgtgataagaacacaggcgactattacgaagattcttacgaggacataagtgcctacttgttgtccaagaataacgccccggagcccagatcattctcccagaatcctcccgtgcttaaaaggcatcagcgcgaaatcaccagaactactcttcagtctgatcaagaggagattgactatgacgacaccataagcgtggaaatgaagaaggaggatttcgatatctatgacgaagatgagaaccagtctccgcggagctttcagaagaagacgcgacactacttcattgcagcagtcgaaaggctttgggactacggtatgtcatcatcccctcatgtgttgcgcaatagagctcagagtggaagtgttccacagttcaagaaagtcgtctttcaagagtttacagatggcagcttcacacagcctctctatcggggcgagcttaacgaacatttgggactccttggtccctatatccgagccgaagtggaggacaacattatggttacctttaggaatcaagcctctcgcccctacagcttctactcctccctcatcagttatgaggaggatcagagacaaggcgctgaaccacggaagaactttgtgaaaccgaatgagacgaagacctacttctggaaagtacagcaccacatggcccccacaaaagacgaattcgattgcaaagcatgggcgtatttttcagacgttgacttggagaaagatgtacattcaggacttattggtcctttgttggtgtgtcacactaacactctcaatccagcccatggcaggcaggtgacagtccaggaattcgctcttttctttaccatctttgatgagaccaagtcctggtacttcacggaaaacatggagcgcaattgcagagccccctgtaacatacagatggaggaccctacctttaaggaaaattatcggttccacgcaatcaacggatacattatggatacactccctggccttgtgatggctcaggaccaacgaatcaggtggtacctcctcagcatgggttctaatgagaacatacactccattcacttttcaggacatgtgttcactgtccggaagaaagaagagtataagatggccctctacaatttgtatccaggcgtgtttgagaccgttgaaatgcttccctctaaagctggcatctggagagtagagtgcttgatcggagaacatcttcacgcaggtatgagcaccttgttcctcgtgtacagcaacaaatgtcagaccccacttggcatggccagtggacacattcgcgactttcagatcacagcatctggccagtatggacaatgggccccaaagttggctcgcctccattactccggtagcataaatgcgtggtccactaaagaacctttcagctggattaaggtcgatcttcttgcccccatgatcatccacggcattaagacacagggagcgaggcagaaattctcctccctctacatctcacagttcattattatgtatagtttggacggcaagaagtggcaaacttatagaggtaacagtactggaacagacatggtgttcttcggcaacgttgatagctctggcatcaaacacaacatctttaatcctcccataatagctcggtacatcagattgcatccgacccactacagcattaggagtacactccgaatggagcttatgggttgcgacttgaattcctgttcaatgccactcggaatggagtctaaagccatctctgatgcacagataaccgccagtagctactttacgaacatgtttgctacgtggtcaccctctaaggcaaggcttcatttgcaaggccggtctaatgcctggagacctcaggtgaacaacccgaaagaatggctccaggtggactttcagaagaccatgaaagtaacaggtgtcactactcagggagttaagtccttggatactagcatgtatgtgaaggagttccttatttcctcatcacaagatggccaccagtggaccctcttctttcagaatggtaaggtcaaagtgtttcagggcaatcaagacagcttcacacccgtggtgaacagtcttgatcctccactcttgacacgataccttcgaatccatccacagtcttgggagcaccagattgcattgcgcatggaagtacttggatgcgaggctcaggacctctac

SEQ ID NO: 730 - protein, 1457 aa, synthetic construct
  REGION 1..1457: note = Variant of human B-domain deleted Factor VIII
MQIELSTCFFLCLLRFCFSATRRYYLGAVELSWDYMQSDLGELPVDARFPPRVPKSFPFNTSVVYKKTLFVEFTDHLFNIAKPRPPWMGLLGPTIQAEVYDTVVITLKNMASHPVSLHAVGVSYWKASEGAEYDDQTSQREKEDDKVFPGGSHTYVWQVLKENGPMASDPLCLTYSYLSHVDLVKDLNSGLIGALLVCREGSLAKEKTQTLHKFILLFAVFDEGKSWHSETKNSLMQDRDAASARAWPKMHTVNGYVNRSLPGLIGCHRKSVYWHVIGMGTTPEVHSIFLEGHTFLVRNHRQASLEISPITFLTAQTLLMDLGQFLLFCHISSHQHDGMEAYVKVDSCPEEPQLRMKNNEEAEDYDDDLTDSEMDVVRFDDDNSPSFIQIRSVAKKHPKTWVHYIAAEEEDWDYAPLVLAPDDRSYKSQYLNNGPQRIGRKYKKVRFMAYTDETFKTREAIQHESGILGPLLYGEVGDTLLIIFKNQASRPYNIYPHGITDVRPLYSRRLPKGVKHLKDFPILPGEIFKYKWTVTVEDGPTKSDPRCLTRYYSSFVNMERDLASGLIGPLLICYKESVDQRGNQIMSDKRNVILFSVFDENRSWYLTENIQRFLPNPAGVQLEDPEFQASNIMHSINGYVFDSLQLSVCLHEVAYWYILSIGAQTDFLSVFFSGYTFKHKMVYEDTLTLFPFSGETVFMSMENPGLWILGCHNSDFRNRGMTALLKVSSCDKNTGDYYEDSYEDISAYLLSKNNAPEPRSFSQNPPVLKRHQREITRTTLQSDQEEIDYDDTISVEMKKEDFDIYDEDENQSPRSFQKKTRHYFIAAVERLWDYGMSSSPHVLRNRAQSGSVPQFKKVVFQEFTDGSFTQPLYRGELNEHLGLLGPYIRAEVEDNIMVTFRNQASRPYSFYSSLISYEEDQRQGAEPRKNFVKPNETKTYFWKVQHHMAPTKDEFDCKAWAYFSDVDLEKDVHSGLIGPLLVCHTNTLNPAHGRQVTVQEFALFFTIFDETKSWYFTENMERNCRAPCNIQMEDPTFKENYRFHAINGYIMDTLPGLVMAQDQRIRWYLLSMGSNENIHSIHFSGHVFTVRKKEEYKMALYNLYPGVFETVEMLPSKAGIWRVECLIGEHLHAGMSTLFLVYSNKCQTPLGMASGHIRDFQITASGQYGQWAPKLARLHYSGSINAWSTKEPFSWIKVDLLAPMIIHGIKTQGARQKFSSLYISQFIIMYSLDGKKWQTYRGNSTGTDMVFFGNVDSSGIKHNIFNPPIIARYIRLHPTHYSIRSTLRMELMGCDLNSCSMPLGMESKAISDAQITASSYFTNMFATWSPSKARLHLQGRSNAWRPQVNNPKEWLQVDFQKTMKVTGVTTQGVKSLDTSMYVKEFLISSSQDGHQWTLFFQNGKVKVFQGNQDSFTPVVNSLDPPLLTRYLRIHPQSWEHQIALRMEVLGCEAQDLY

SEQ ID NO: 731 - DNA, 4371 bp, synthetic construct
  misc_feature 1..4371: note = Variant of human B-domain deleted Factor VIII
  source 1..4371: mol_type = other DNA
atgcagattgaactgtctacctgcttcttcctctgtttgctgaggttctgctttagcgccactagacggtactaccttggcgctgtggagctgtcctgggactatatgcagagtgatttgggagagcttcccgtcgacgcacgatttcctcctcgcgttccaaagtcatttcccttcaacacaagcgtggtgtacaagaagacgctcttcgtcgaattcaccgatcacctgttcaatatcgccaaacccagaccaccatggatgggtcttttggggcctaccatacaagcggaggtgtatgacacagttgttatcactctcaagaacatggcttctcatccggtaagtcttcacgcagtgggcgtgtcctactggaaagcttcagaaggagccgagtatgatgatcagacatcccagagggagaaagaagacgacaaggtatttccaggtgggtctcatacctatgtgtggcaagtgctcaaagagaatggccctatggcaagcgatccgctctgtttgacttacagctacctttcacacgttgacctcgtcaaggacctcaactccgggttgattggagccttgttggtatgcagggaaggatctcttgccaaagagaagacacagaccctccacaagtttatccttctctttgctgtgttcgatgagggcaaaagttggcatagcgaaacgaagaattccctcatgcaggatcgcgacgcagccagcgccagagcttggcccaagatgcacactgtgaacggatatgtcaataggtcacttcctggcttgattgggtgtcatcggaaaagtgtctactggcacgtgatcggaatggggacaacaccagaggtccactccatatttctcgaaggccataccttccttgttcgaaaccacagacaggcatccttggagatctctcccattacctttctcactgcccaaacgctccttatggacttgggtcagttccttctcttctgccatatcagctcacaccagcatgatggtatggaagcttatgtgaaagtcgacagttgtcctgaggagccacagttgcgcatgaagaataatgaagaagccgaggattacgacgacgatctcaccgattctgagatggacgtggtgaggtttgatgacgacaactctccctccttcattcaaatccggagcgtggcgaagaaacaccccaagacttgggtccactatatagcggcggaagaggaggattgggattacgctcctcttgtattggcaccagatgaccgctcatacaaaagccagtacctcaacaacggaccgcagagaattggccggaagtataagaaagtgcgatttatggcctatacagacgaaacctttaagacaagggaggccatccagcatgagagtgggattttgggacctcttctttacggcgaagttggtgataccctcctcatcatcttcaagaatcaagcttctcgcccctataacatttacccacacgggatcactgacgttaggcctttgtatagcagaagacttcccaaaggcgtgaagcatctcaaagacttccccattttgccaggcgagatctttaagtacaaatggaccgtcacagtggaagatggaccgactaaatcagaccctcgatgccttacgcggtactattcctccttcgtgaatatggagagagatttggcaagcggactcataggaccactcctcatctgttacaaggaatctgtagaccagaggggtaaccagattatgagtgataaacgcaatgtgatcctttttagcgtcttcgacgagaaccggtcctggtacttgaccgagaatatacaaaggttccttcccaaccccgcaggcgttcagttggaagaccctgagtttcaggccagcaatattatgcactcaatcaacggctatgtgtttgatagtctccagctttctgtttgcctccatgaagtagcctattggtacatcttgtcaattggtgctcaaacagacttcctctccgtcttcttctccggctacacctttaagcacaagatggtgtatgaggacactctcacactctttccattttctggagaaaccgtgttcatgagcatggagaatccaggcctttggatcttgggttgccacaacagtgattttcgcaatcggggaatgactgctctcctcaaagtcagcagctgtgataagaacacaggcgactattacgaagattcttacgaggacataagtgcctacttgctgtccaagaataacgccattgagcccagatcattctcccagaatcctcccgtgcttaaaaggcatcagcgcgaaatcaccagaactactcttcagtctgatcaagaggagattgactatgacgacaccataagcgtggaaatgaagaaggaggatttcgatatctatgacgaagatgagaaccagtctccgcggagctttcagaagaagacgcgacactacttcattgcagcagtcgaaaggctttgggactacggtatgtcatcatcccctcatgtgttgcgcaatagagctcagagtggaagtgttccacagttcaagaaagtcgtctttcaagagtttacagatggcagcttcacacagcctctctatcggggcgagcttaacgaacatttgggactccttggtccctatatccgagccgaagtggaggacaacattatggttacctttaggaatcaagcctctcgcccctacagcttctactcctccctcatcagttatgaggaggatcagagacaaggcgctgaaccacggaagaactttgtgaaaccgaatgagacgaagacctacttctggaaagtacagcaccacatggcccccacaaaagacgaattcgattgcaaagcatgggcgtatttttcagacgttgacttggagaaagatgtacattcaggacttattggtcctttgttggtgtgtcacactaacactctcaatccagcccatggcaggcaggtgacagtccaggaattcgctcttttctttaccatctttgatgagaccaagtcctggtacttcacggaaaacatggagcgcaattgcagagccccctgtaacatacagatggaggaccctacctttaaggaaaattatcggttccacgcaatcaacggatacattatggatacactccctggccttgtgatggctcaggaccaacgaatcaggtggtacctcctcagcatgggttctaatgagaacatacactccattcacttttcaggacatgtgttcactgtccggaagaaagaagagtataagatggccctctacaatttgtatccaggcgtgtttgagaccgttgaaatgcttccctctaaagctggcatctggagagtagagtgcttgatcggagaacatcttcacgcaggtatgagcaccttgttcctcgtgtacagcaacaaatgtcagaccccacttggcatggccagtggacacattcgcgactttcagatcacagcatctggccagtatggacaatgggccccaaagttggctcgcctccattactccggtagcataaatgcgtggtccactaaagaacctttcagctggattaaggtcgatcttcttgcccccatgatcatccacggcattaagacacagggagcgaggcagaaattctcctccctgtacatctcacagttcattattatgtatagtttggacggcaagaagtggcaaacttatagaggtaacagtactggaacagacatggtgttcttcggcaacgttgatagctctggcatcaaacacaacatctttaatcctcccataatagctcggtacatcagattgcatccgacccactacagcattaggagtacactccgaatggagcttatgggttgcgacttgaattcctgttcaatgccactcggaatggagtctaaagccatctctgatgcacagataaccgccagtagctactttacgaacatgtttgctacgtggtcaccctctaaggcaaggcttcatttgcaaggccggtctaatgcctggagacctcaggtgaacaacccgaaagaatggctccaggtggactttcagaagaccatgaaagtaacaggtgtcactactcagggagttaagtccttggataccagcatgtatgtgaaggagttccttatttcctcatcacaagatggccaccagtggaccctcttctttcagaatggtaaggtcaaagtgtttcagggcaatcaagacagcttcacacccgtggtgaacagtcttgatcctccactcttgacacgataccttcgaatccatccacagtcttgggagcaccagattgcattgcgcatggaagtacttggatgcgaggctcaggacctctac

SEQ ID NO: 732 - protein, 1457 aa, synthetic construct
  REGION 1..1457: note = Variant of human B-domain deleted Factor VIII
MQIELSTCFFLCLLRFCFSATRRYYLGAVELSWDYMQSDLGELPVDARFPPRVPKSFPFNTSVVYKKTLFVEFTDHLFNIAKPRPPWMGLLGPTIQAEVYDTVVITLKNMASHPVSLHAVGVSYWKASEGAEYDDQTSQREKEDDKVFPGGSHTYVWQVLKENGPMASDPLCLTYSYLSHVDLVKDLNSGLIGALLVCREGSLAKEKTQTLHKFILLFAVFDEGKSWHSETKNSLMQDRDAASARAWPKMHTVNGYVNRSLPGLIGCHRKSVYWHVIGMGTTPEVHSIFLEGHTFLVRNHRQASLEISPITFLTAQTLLMDLGQFLLFCHISSHQHDGMEAYVKVDSCPEEPQLRMKNNEEAEDYDDDLTDSEMDVVRFDDDNSPSFIQIRSVAKKHPKTWVHYIAAEEEDWDYAPLVLAPDDRSYKSQYLNNGPQRIGRKYKKVRFMAYTDETFKTREAIQHESGILGPLLYGEVGDTLLIIFKNQASRPYNIYPHGITDVRPLYSRRLPKGVKHLKDFPILPGEIFKYKWTVTVEDGPTKSDPRCLTRYYSSFVNMERDLASGLIGPLLICYKESVDQRGNQIMSDKRNVILFSVFDENRSWYLTENIQRFLPNPAGVQLEDPEFQASNIMHSINGYVFDSLQLSVCLHEVAYWYILSIGAQTDFLSVFFSGYTFKHKMVYEDTLTLFPFSGETVFMSMENPGLWILGCHNSDFRNRGMTALLKVSSCDKNTGDYYEDSYEDISAYLLSKNNAIEPRSFSQNPPVLKRHQREITRTTLQSDQEEIDYDDTISVEMKKEDFDIYDEDENQSPRSFQKKTRHYFIAAVERLWDYGMSSSPHVLRNRAQSGSVPQFKKVVFQEFTDGSFTQPLYRGELNEHLGLLGPYIRAEVEDNIMVTFRNQASRPYSFYSSLISYEEDQRQGAEPRKNFVKPNETKTYFWKVQHHMAPTKDEFDCKAWAYFSDVDLEKDVHSGLIGPLLVCHTNTLNPAHGRQVTVQEFALFFTIFDETKSWYFTENMERNCRAPCNIQMEDPTFKENYRFHAINGYIMDTLPGLVMAQDQRIRWYLLSMGSNENIHSIHFSGHVFTVRKKEEYKMALYNLYPGVFETVEMLPSKAGIWRVECLIGEHLHAGMSTLFLVYSNKCQTPLGMASGHIRDFQITASGQYGQWAPKLARLHYSGSINAWSTKEPFSWIKVDLLAPMIIHGIKTQGARQKFSSLYISQFIIMYSLDGKKWQTYRGNSTGTDMVFFGNVDSSGIKHNIFNPPIIARYIRLHPTHYSIRSTLRMELMGCDLNSCSMPLGMESKAISDAQITASSYFTNMFATWSPSKARLHLQGRSNAWRPQVNNPKEWLQVDFQKTMKVTGVTTQGVKSLDTSMYVKEFLISSSQDGHQWTLFFQNGKVKVFQGNQDSFTPVVNSLDPPLLTRYLRIHPQSWEHQIALRMEVLGCEAQDLY

SEQ ID NO: 733 - DNA, 4371 bp, synthetic construct
  misc_feature 1..4371: note = Variant of human B-domain deleted Factor VIII
  source 1..4371: mol_type = other DNA
atgcagattgaactgtctacctgcttcttcctctgtttgctgaggttctgctttagcgccactagacggtactaccttggcgctgtggagctgtcctgggactatatgcagagtgatttgggagagcttcccgtcgacgcacgatttcctcctcgcgttccaaagtcatttccctttaacacaagcgtggtgtacaagaagacgctcttcgtcgaattcaccgatcacctgttcaatatcgccaaacccagaccaccatggatgggtcttttggggcctaccatacaagcggaggtgtatgacacagttgttatcactctcaagaacatggcttctcatccggtaagtcttcacgcagtgggcgtgtcctactggaaagcttcagaaggagccgagtatgatgatcagacatcccagagggagaaagaagacgacaaggtatttccaggtgggtctcatacctatgtgtggcaagtgctcaaagagaatggccctatggcaagcgatccgccgtgtttgacttacagctacctttcacacgttgacctcgtcaaggacctcaactccgggttgattggagccttgttggtatgcagggaaggatctcttgccaaagagaagacacagaccctccacaagtttatccttctctttgctgtgttcgatgagggcaaaagttggcatagcgaaacgaagaattccctcatgcaggatcgcgacgcagccagcgccagagcttggcccaagatgcacactgtgaacggatatgtcaataggtcgcttcctggcttgattgggtgtcatcggaaaagtgtctactggcacgtgatcggaatggggacaacaccagaggtccactccatatttctcgaaggccataccttccttgttcgaaaccacagacaggcatccttggagatctctcccattacctttctcactgcccaaacgctccttatggacttgggtcagttccttctcttctgccatatcagctcacaccagcatgatggtatggaagcttatgtgaaagtcgacagttgtcctgaggagccacagttgcgcatgaagaataatgaagaagccgaggattacgacgacgatctcaccgattctgagatggacgtggtgaggtttgatgacgacaactctccctccatcattcaaatccggagcgtggcgaagaaacaccccaagacttgggtccactatatagcggcggaagaggaggattgggattacgctcctcttgtattggcaccagatgaccgctcatacaaaagccagtacctcaacaacggaccgcagagaattggccggaagtataagaaagtgcgatttatggcctatacagacgaaacctttaagacaagggaggccatccagcatgagagtgggattttgggacctcttctttacggcgaagttggtgataccctcctcatcatcttcaagaatcaagcttctcgcccctataacatttacccacacgggatcactgacgttaggcctttgtatagcagaagacttcccaaaggcgtgaagcatctcaaagacttccccattttgccaggcgagatctttaagtacaaatggaccgtcacagtggaagatggaccgactaaatcagaccctcgatgccttacgcggtactattcctccttcgtgaatatggagagagatttggcaagcggactcataggaccactcctcatctgttacaaggaatctgtagaccagaggggtaaccagattatgagtgataaacgcaatgtgatcctttttagcgtcttcgacgagaaccggtcctggtacttgaccgagaatatacaaaggttccttcccaaccccgcaggcgttcagttggaagaccctgagtttcaggccagcaatattatgcactcaatcaacggctatgtgtttgatagtctccagctttctgtttgcctccatgaagtagcctattggtacatcttgtcaattggtgctcaaacagacttcctctccgtcttcttctccggctacacctttaagcacaagatggtgtatgaggacactctcacactctttccattttctggagaaaccgtgttcatgagcatggagaatccaggcctttggatcttgggttgccacaacagtgattttcgcaatcggggaatgactgctctcctcaaagtcagcagctgtgataagaacacaggcgactattacgaagattcttacgaggacataagtgcctacttgttgtccaagaataacgccattgagcccagatcattctcccagaatcctcccgtgcttaaaaggcatcagcgcgaaatcaccagaactactcttcagtctgatcaagaggagattgactatgacgacaccataagcgtggaaatgaagaaggaggatttcgatatctatgacgaagatgagaaccagtctccgcggagctttcagaagaagacgcgacactacttcattgcagcagtcgaaaggctttgggactacggtatgtcatcatcccctcatgtgttgcgcaatagagctcagagtggaagtgttccacagttcaagaaagtcgtctttcaagagtttacagatggcagcttcacacagcctctctatcggggcgagcttaacgaacatttgggactccttggtccctatatccgagccgaagtggaggacaacattatggttacctttaggaatcaagcctctcgcccctacagcttctactcctccctcatcagttatgaggaggatcagagacaaggcgctgaaccacggaagaactttgtgaaaccgaatgagacgaagacctacttctggaaagtacagcaccacatggcccccacaaaagacgaattcgattgcaaagcatgggcgtatttttcagacgttgacttggagaaagatgtacattcaggacttattggtcctttgttggtgtgtcacactaacactctcaatccagcccatggcaggcaggtgacagtccaggaattcgctcttttctttaccatctttgatgagaccaagtcctggtacttcacggaaaacatggagcgcaattgcagagccccctgtaacatacagatggaggaccctacctttaaggaaaattatcggttccacgcaatcaacggatacattatggatacactccctggccttgtgatggctcaggaccaacgaatcaggtggtacctcctcagcatgggttctaatgagaacatacactccattcacttttcaggacatgtgttcactgtccggaagaaagaagagtataagatggccctctacaatttgtatccaggcgtgtttgagaccgttgaaatgcttccctctaaagctggcatctggagagtagagtgcttgatcggagaacatcttcacgcaggtatgagcaccttgttcctcgtgtacagcaacaaatgtcagaccccacttggcatggccagtggacacattcgcgactttcagatcacagcatctggccagtatggacaatgggccccaaagttggctcgcctccattactccggtagcataaatgcgtggtccactaaagaacctttcagctggattaaggtcgatcttcttgcccccatgatcatccacggcattaagacacagggagcgaggcagaaattctcctccctctacatctcacagttcattattatgtatagtttggacggcaagaagtggcaaacttatagaggtaacagtactggaacagacatggtgttcttcggcaacgttgatagctctggcatcaaacacaacatctttaatcctcccataatagctcggtacatcagattgcatccgacccactacagcattaggagtacactccgaatggagcttatgggttgcgacttgaattcctgttcaatgccactcggaatggagtctaaagccatctctgatgcacagataaccgccagtagctactttacgaacatgtttgctacgtggtcaccctctaaggcaaggcttcatttgcaaggccggtctaatgcctggagacctcaggtgaacaacccgaaagaatggctccaggtggactttcagaagaccatgaaagtaacaggtgtcactactcagggagttaagtccttggataccagcatgtatgtgaaggagttccttatttcctcatcacaagatggccaccagtggaccctcttctttcagaatggtaaggtcaaagtgtttcagggcaatcaagacagcttcacacccgtggtgaacagtcttgatcctccactcttgacacgataccttcgaatccatccacagtcttgggagtcgcagattgcattgcgcatggaagtacttggatgcgaggctcaggacctctac

SEQ ID NO: 734 - protein, 1457 aa, synthetic construct
  REGION 1..1457: note = Variant of human B-domain deleted Factor VIII
MQIELSTCFFLCLLRFCFSATRRYYLGAVELSWDYMQSDLGELPVDARFPPRVPKSFPFNTSVVYKKTLFVEFTDHLFNIAKPRPPWMGLLGPTIQAEVYDTVVITLKNMASHPVSLHAVGVSYWKASEGAEYDDQTSQREKEDDKVFPGGSHTYVWQVLKENGPMASDPPCLTYSYLSHVDLVKDLNSGLIGALLVCREGSLAKEKTQTLHKFILLFAVFDEGKSWHSETKNSLMQDRDAASARAWPKMHTVNGYVNRSLPGLIGCHRKSVYWHVIGMGTTPEVHSIFLEGHTFLVRNHRQASLEISPITFLTAQTLLMDLGQFLLFCHISSHQHDGMEAYVKVDSCPEEPQLRMKNNEEAEDYDDDLTDSEMDVVRFDDDNSPSIIQIRSVAKKHPKTWVHYIAAEEEDWDYAPLVLAPDDRSYKSQYLNNGPQRIGRKYKKVRFMAYTDETFKTREAIQHESGILGPLLYGEVGDTLLIIFKNQASRPYNIYPHGITDVRPLYSRRLPKGVKHLKDFPILPGEIFKYKWTVTVEDGPTKSDPRCLTRYYSSFVNMERDLASGLIGPLLICYKESVDQRGNQIMSDKRNVILFSVFDENRSWYLTENIQRFLPNPAGVQLEDPEFQASNIMHSINGYVFDSLQLSVCLHEVAYWYILSIGAQTDFLSVFFSGYTFKHKMVYEDTLTLFPFSGETVFMSMENPGLWILGCHNSDFRNRGMTALLKVSSCDKNTGDYYEDSYEDISAYLLSKNNAIEPRSFSQNPPVLKRHQREITRTTLQSDQEEIDYDDTISVEMKKEDFDIYDEDENQSPRSFQKKTRHYFIAAVERLWDYGMSSSPHVLRNRAQSGSVPQFKKVVFQEFTDGSFTQPLYRGELNEHLGLLGPYIRAEVEDNIMVTFRNQASRPYSFYSSLISYEEDQRQGAEPRKNFVKPNETKTYFWKVQHHMAPTKDEFDCKAWAYFSDVDLEKDVHSGLIGPLLVCHTNTLNPAHGRQVTVQEFALFFTIFDETKSWYFTENMERNCRAPCNIQMEDPTFKENYRFHAINGYIMDTLPGLVMAQDQRIRWYLLSMGSNENIHSIHFSGHVFTVRKKEEYKMALYNLYPGVFETVEMLPSKAGIWRVECLIGEHLHAGMSTLFLVYSNKCQTPLGMASGHIRDFQITASGQYGQWAPKLARLHYSGSINAWSTKEPFSWIKVDLLAPMIIHGIKTQGARQKFSSLYISQFIIMYSLDGKKWQTYRGNSTGTDMVFFGNVDSSGIKHNIFNPPIIARYIRLHPTHYSIRSTLRMELMGCDLNSCSMPLGMESKAISDAQITASSYFTNMFATWSPSKARLHLQGRSNAWRPQVNNPKEWLQVDFQKTMKVTGVTTQGVKSLDTSMYVKEFLISSSQDGHQWTLFFQNGKVKVFQGNQDSFTPVVNSLDPPLLTRYLRIHPQSWESQIALRMEVLGCEAQDLY

SEQ ID NO: 735 - DNA, 4371 bp, synthetic construct
  misc_feature 1..4371: note = Variant of human B-domain deleted Factor VIII
  source 1..4371: mol_type = other DNA
atgcagattgaactgtctacctgcttcttcctctgtttgctgaggttctgctttagcgccactagacggtactaccttggcgctgtggagctgtcctgggactatatgcagagtgatttgggagagcttcccgtcgacgcacgatttcctcctcgcgttccaaagtcatttccctttaacacaagcgtggtgtacaagaagacgctcttcgtcgaattcaccgatcacctgttcaatatcgccaaacccagaccaccatggatgggtcttttggggcctaccatacaagcggaggtgtatgacacagttgttatcactctcaagaacatggcttctcatccggtaagtcttcacgcagtgggcgtgtcctactggaaagcttcagaaggagccgagtatgatgatcagacatcccagagggagaaagaagacgacaaggtatttccaggtgggtctcatacctatgtgtggcaagtgctcaaagagaatggccctatggcaagcgatccgctgtgtttgacttacagctacctttcacacgttgacctcgtcaaggacctcaactccgggttgattggagccttgttggtatgcagggaaggatctcttgccaaagagaagacacagaccctccacaagtttatccttctctttgctgtgttcgatgagggcaaaagttggcatagcgaaacgaagaattccctcatgcaggatcgcgacgcagccagcgccagagcttggcccaagatgcacactgtgaacggatatgtcaataggtcacttcctggcttgattgggtgtcatcggaaaagtgtctactggcacgtgatcggaatggggacaacaccagaggtccactccatatttctcgaaggccataccttccttgttcgaaaccacagacaggcatccttggagatctctcccattacctttctcactgcccaaacgctccttatggacttgggtcagttccttctcttctgccatatcagctcacaccagcatgatggtatggaagcttatgtgaaagtcgacagttgtcctgaggagccacagttgcgcatgaagaataatgaagaagccgaggattacgacgacgatctcaccgattctgagatggacgtggtgaggtttgatgacgacaactctccctccttcattcaaatccggagcgtggcgaagaaacaccccaagacttgggtccactatatagcggcggaagaggaggattgggattacgctcctcttgtattggcaccagatgaccgctcatacaaaagccagtacctcaacaacggaccgcagagaattggccggaagtataagaaagtgcgatttatggcctatacagacgaaacctttaagacaagggaggccatccagcatgagagtgggattttgggacctcttctttacggcgaagttggtgataccctcctcatcatcttcaagaatcaagcttctcgcccctataacatttacccacacgggatcactgacgttaggcctttgtatagcagaagacttcccaaaggcgtgaagcatctcaaagacttccccattttgccaggcgagatctttaagtacaaatggaccgtcacagtggaagatggaccgactaaatcagaccctcgatgccttacgcggtactattcctccttcgtgaatatggagagagatttggcaagcggactcataggaccactcctcatctgttacaaggaatctgtagaccagaggggtaaccagattatgagtgataaacgcaatgtgatcctttttagcgtcttcgacgagaaccggtcctggtacttgaccgagaatatacaaaggttccttcccaaccccgcaggcgttcagttggaagaccctgagtttcaggccagcaatattatgcactcaatcaacggctatgtgtttgatagtctccagctttctgtttgcctccatgaagtagcctattggtacatcttgtcaattggtgctcaaacagacttcctctccgtcttcttctccggctacacctttaagcacaagatggtgtatgaggacactctcacactctttccattttctggagaaaccgtgttcatgagcatggagaatccaggcctttggatcttgggttgccacaacagtgattttcgcaatcggggaatgactgctctcctcaaagtcagcagctgtgataagaacacaggcgactattacgaagattcttacgaggacataagtgcctacttggactccaagaataacgccattgagcccagatcattctcccagaatcctcccgtgcttaaaaggcatcagcgcgaaatcaccagaactactcttcagtctgatcaagaggagattgactatgacgacaccataagcgtggaaatgaagaaggaggatttcgatatctatgacgaagatgagaaccagtctccgcggagctttcagaagaagacgcgacactacttcattgcagcagtcgaaaggctttgggactacggtatgtcatcatcccctcatgtgttgcgcaatagagctcagagtggaagtgttccacagttcaagaaagtcgtctttcaagagtttacagatggcagcttcacacagcctctctatcggggcgagcttaacgaacatttgggactccttggtccctatatccgagccgaagtggaggacaacattatggttacctttaggaatcaagcctctcgcccctacagcttctactcctccctcatcagttatgaggaggatcagagacaaggcgctgaaccacggaagaactttgtgaaaccgaatgagacgaagacctacttctggaaagtacagcaccacatggcccccacaaaagacgaattcgattgcaaagcatgggcgtatttttcagacgttgacttggagaaagatgtacattcaggacttattggtcctttgttggtgtgtcacactaacactctcaatccagcccatggcaggcaggtgacagtccaggaattcgctcttttctttaccatctttgatgagaccaagtcctggtacttcacggaaaacatggagcgcaattgcagagccccctgtaacatacagatggaggaccctacctttaaggaaaattatcggttccacgcaatcaacggatacattatggatacactccctggccttgtgatggctcaggaccaacgaatcaggtggtacctcctcagcatgggttctaatgagaacatacactccattcacttttcaggacatgtgttcactgtccggaagaaagaagagtataagatggccctctacaatttgtatccaggcgtgtttgagaccgttgaaatgcttccctctaaagctggcatctggagagtagagtgcttgatcggagaacatcttcacgcaggtatgagcaccttgttcctcgtgtacagcaacaaatgtcagaccccacttggcatggccagtggacacattcgcgactttcagatcacagcatctggccagtatggacaatgggccccaaagttggctcgcctccattactccggtagcataaatgcgtggtccactaaagaacctttcagctggattaaggtcgatcttcttgcccccatgatcatccacggcattaagacacagggagcgaggcagaaattctcctccctctacatctcacagttcattattatgtatagtttggacggcaagaagtggcaaacttatagaggtaacagtactggaacactgatggtgttcttcggcaacgttgatagctctggcatcaaacacaacatctttaatcctcccataatagctcggtacatcagattgcatccgacccactacagcattaggagtacactccgaatggagcttatgggttgcgacttgaattcctgttcaatgccactcggaatggagtctaaagccatctctgatgcacagataaccgccagtagctactttacgaacatgtttgctacgtggtcaccctctaaggcaaggcttcatttgcaaggccggtctaatgcctggagacctcaggtgaacaacccgaaagaatggctccaggtggactttcagaagaccatgaaagtaacaggtgtcactactcagggagttaagtccttggatactagcatgtatgtgaaggagttccttatttcctcatcacaagatggccaccagtggaccctcttctttcagaatggtaaggtcaaagtgtttcagggcaatcaagacagcttcacacccgtggtgaacagtcttgatcctccactcttgacacgataccttcgaatccatccacagtcttgggagtcgcagattgcattgcgcatggaagtacttggatgcgaggctcaggacctctac

SEQ ID NO: 736 - protein, 1457 aa, synthetic construct
  REGION 1..1457: note = Variant of human B-domain deleted Factor VIII
MQIELSTCFFLCLLRFCFSATRRYYLGAVELSWDYMQSDLGELPVDARFPPRVPKSFPFNTSVVYKKTLFVEFTDHLFNIAKPRPPWMGLLGPTIQAEVYDTVVITLKNMASHPVSLHAVGVSYWKASEGAEYDDQTSQREKEDDKVFPGGSHTYVWQVLKENGPMASDPLCLTYSYLSHVDLVKDLNSGLIGALLVCREGSLAKEKTQTLHKFILLFAVFDEGKSWHSETKNSLMQDRDAASARAWPKMHTVNGYVNRSLPGLIGCHRKSVYWHVIGMGTTPEVHSIFLEGHTFLVRNHRQASLEISPITFLTAQTLLMDLGQFLLFCHISSHQHDGMEAYVKVDSCPEEPQLRMKNNEEAEDYDDDLTDSEMDVVRFDDDNSPSFIQIRSVAKKHPKTWVHYIAAEEEDWDYAPLVLAPDDRSYKSQYLNNGPQRIGRKYKKVRFMAYTDETFKTREAIQHESGILGPLLYGEVGDTLLIIFKNQASRPYNIYPHGITDVRPLYSRRLPKGVKHLKDFPILPGEIFKYKWTVTVEDGPTKSDPRCLTRYYSSFVNMERDLASGLIGPLLICYKESVDQRGNQIMSDKRNVILFSVFDENRSWYLTENIQRFLPNPAGVQLEDPEFQASNIMHSINGYVFDSLQLSVCLHEVAYWYILSIGAQTDFLSVFFSGYTFKHKMVYEDTLTLFPFSGETVFMSMENPGLWILGCHNSDFRNRGMTALLKVSSCDKNTGDYYEDSYEDISAYLDSKNNAIEPRSFSQNPPVLKRHQREITRTTLQSDQEEIDYDDTISVEMKKEDFDIYDEDENQSPRSFQKKTRHYFIAAVERLWDYGMSSSPHVLRNRAQSGSVPQFKKVVFQEFTDGSFTQPLYRGELNEHLGLLGPYIRAEVEDNIMVTFRNQASRPYSFYSSLISYEEDQRQGAEPRKNFVKPNETKTYFWKVQHHMAPTKDEFDCKAWAYFSDVDLEKDVHSGLIGPLLVCHTNTLNPAHGRQVTVQEFALFFTIFDETKSWYFTENMERNCRAPCNIQMEDPTFKENYRFHAINGYIMDTLPGLVMAQDQRIRWYLLSMGSNENIHSIHFSGHVFTVRKKEEYKMALYNLYPGVFETVEMLPSKAGIWRVECLIGEHLHAGMSTLFLVYSNKCQTPLGMASGHIRDFQITASGQYGQWAPKLARLHYSGSINAWSTKEPFSWIKVDLLAPMIIHGIKTQGARQKFSSLYISQFIIMYSLDGKKWQTYRGNSTGTLMVFFGNVDSSGIKHNIFNPPIIARYIRLHPTHYSIRSTLRMELMGCDLNSCSMPLGMESKAISDAQITASSYFTNMFATWSPSKARLHLQGRSNAWRPQVNNPKEWLQVDFQKTMKVTGVTTQGVKSLDTSMYVKEFLISSSQDGHQWTLFFQNGKVKVFQGNQDSFTPVVNSLDPPLLTRYLRIHPQSWESQIALRMEVLGCEAQDLY

SEQ ID NO: 737 - DNA, 4371 bp, synthetic construct
  misc_feature 1..4371: note = Variant of human B-domain deleted Factor VIII
  source 1..4371: mol_type = other DNA
atgcagattgaactgtctacctgcttcttcctctgtttgctgaggttctgctttagcgccactagacggtactaccttggcgctgtggagctgtcctgggactatatgcagagtgatttgggagagcttcccgtcgacgcacgatttcctcctcgcgttccaaagtcatttcccgataacacaagcgtggtgtacaagaagacgctcttcgtcgaattcaccgatcacctgttcaatatcgccaaacccagaccaccatggatgggtcttttggggcctaccatacaagcggaggtgtatgacacagttgttatcactctcaagaacatggcttctcatccggtaagtcttcacgcagtgggcgtgtcctactggaaagcttcagaaggagccgagtatgatgatcagacatcccagagggagaaagaagacgacaaggtatttccaggtgggtctcatacctatgtgtggcaagtgctcaaagagaatggccctatggcaagcgatccgccgtgtttgacttacagctacctttcacacgttgacctcgtcaaggacctcaactccgggttgattggagccttgttggtatgcagggaaggatctcttgccaaagagaagacacagaccctccacaagtttatccttctctttgctgtgttcgatgagggcaaaagttggcatagcgaaacgaagaattccctcatgcaggatcgcgacgcagccagcgccagagcttggcccaagatgcacactgtgaacggatatgtcaataggtcgcttcctggcttgattgggtgtcatcggaaaagtgtctactggcacgtgatcggaatggggacaacaccagaggtccactccatatttctcgaaggccataccttccttgttcgaaaccacagacaggcatccttggagatctctcccattacctttctcactgcccaaacgctccttatggacttgggtcagttccttctcttctgccatatcagctcacaccagcatgatggtatggaagcttatgtgaaagtcgacagttgtcctgaggagccacagttgcgcatgaagaataatgaagaagccgaggattacgacgacgatctcaccgattctgagatggacgtggtgaggtttgatgacgacaactctccctccttcattcaaatccggagcgtggcgaagaaacaccccaagacttgggtccactatatagcggcggaagaggaggattgggattacgctcctcttgtattggcaccagatgaccgctcatacaaaagccagtacctcaacaacggaccgcagagaattggccggaagtataagaaagtgcgatttatggcctatacagacgaaacctttaagacaagggaggccatccagcatgagagtgggattttgggacctcttctttacggcgaagttggtgataccctcctcatcatcttcaagaatcaagcttctcgcccctataacatttacccacacgggatcactgacgttaggcctttgtatagcagaagacttcccaaaggcgtgaagcatctcaaagacttccccattttgccaggcgagatctttaagtacaaatggaccgtcacagtggaagatggaccgactaaatcagaccctcgatgccttacgcggtactattcctccttcgtgaatatggagagagatttggcaagcggactcataggaccactcctcatctgttacaaggaatctgtagaccagaggggtaaccagattatgagtgataaacgcaatgtgatcctttttagcgtcttcgacgagaaccggtcctggtacttgaccgagaatatacaaaggttccttcccaaccccgcaggcgttcagttggaagaccctgagtttcaggccagcaatattatgcactcaatcaacggctatgtgtttgatagtctccagctttctgtttgcctccatgaagtagcctattggtacatcttgtcaattggtgctcaaacagacttcctctccgtcttcttctccggctacacctttaagcacaagatggtgtatgaggacactctcacactctttccattttctggagaaaccgtgttcatgagcatggagaatccaggcctttggatcttgggttgccacaacagtgattttcgcaatcggggaatgactgctctcctcaaagtcagcagctgtgataagaacacaggcgactattacgaagattcttacgaggacataagtgcctacttggactccaagaataacgccattgagcccagatcattctcccagaatcctcccgtgcttaaaaggcatcagcgcgaaatcaccagaactactcttcagtctgatcaagaggagattgactatgacgacaccataagcgtggaaatgaagaaggaggatttcgatatctatgacgaagatgagaaccagtctccgcggagctttcagaagaagacgcgacactacttcattgcagcagtcgaaaggctttgggactacggtatgtcatcatcccctcatgtgttgcgcaatagagctcagagtggaagtgttccacagttcaagaaagtcgtctttcaagagtttacagatggcagcttcacacagcctctctatcggggcgagcttaacgaacatttgggactccttggtccctatatccgagccgaagtggaggacaacattatggttacctttaggaatcaagcctctcgcccctacagcttctactcctccctcatcagttatgaggaggatcagagacaaggcgctgaaccacggaagaactttgtgaaaccgaatgagacgaagacctacttctggaaagtacagcaccacatggcccccacaaaagacgaattcgattgcaaagcatgggcgtatttttcagacgttgacttggagaaagatgtacattcaggacttattggtcctttgttggtgtgtcacactaacactctcaatccagcccatggcaggcaggtgacagtccaggaattcgctcttttctttaccatctttgatgagaccaagtcctggtacttcacggaaaacatggagcgcaattgcagagccccctgtaacatacagatggaggaccctacctttaaggaaaattatcggttccacgcaatcaacggatacattatggatacactccctggccttgtgatggctcaggaccaacgaatcaggtggtacctcctcagcatgggttctaatgagaacatacactccattcacttttcaggacatgtgttcactgtccggaagaaagaagagtataagatggccctctacaatttgtatccaggcgtgtttgagaccgttgaaatgcttccctctaaagctggcatctggagagtagagtgcttgatcggagaacatcttcacgcaggtatgagcaccttgttcctcgtgtacagcaacaaatgtcagaccccacttggcatggccagtggacacattcgcgactttcagatcacagcatctggccagtatggacaatgggccccaaagttggctcgcctccattactccggtagcataaatgcgtggtccactaaagaacctttcagctggattaaggtcgatcttcttgcccccatgatcatccacggcattaagacacagggagcgaggcagaaattctcctccctctacatctcacagttcattattatgtatagtttggacggcaagaagtggcaaacttatagaggtaacagtactggaacactcatggtgttcttcggcaacgttgatagctctggcatcaaacacaacatctttaatcctcccataatagctcggtacatcagattgcatccgacccactacagcattaggagtacactccgaatggagcttatgggttgcgacttgaattcctgttcaatgccactcggaatggagtctaaagccatctctgatgcacagataaccgccagtagctactttacgaacatgtttgctacgtggtcaccctctaaggcaaggcttcatttgcaaggccggtctaatgcctggagacctcaggtgaacaacccgaaagaatggctccaggtggactttcagaagaccatgaaagtaacaggtgtcactactcagggagttaagtccttggatactagcatgtatgtgaaggagttccttatttcctcatcacaagatggccaccagtggaccctcttctttcagaatggtaaggtcaaagtgtttcagggcaatcaagacagcttcacacccgtggtgaacagtcttgatcctccactcttgacacgataccttcgaatccatccacagtcttgggagcaccagattgcattgcgcatggaagtacttggatgcgaggctcaggacctctac

SEQ ID NO: 738 - protein, 1457 aa, synthetic construct
  REGION 1..1457: note = Variant of human B-domain deleted Factor VIII
MQIELSTCFFLCLLRFCFSATRRYYLGAVELSWDYMQSDLGELPVDARFPPRVPKSFPDNTSVVYKKTLFVEFTDHLFNIAKPRPPWMGLLGPTIQAEVYDTVVITLKNMASHPVSLHAVGVSYWKASEGAEYDDQTSQREKEDDKVFPGGSHTYVWQVLKENGPMASDPPCLTYSYLSHVDLVKDLNSGLIGALLVCREGSLAKEKTQTLHKFILLFAVFDEGKSWHSETKNSLMQDRDAASARAWPKMHTVNGYVNRSLPGLIGCHRKSVYWHVIGMGTTPEVHSIFLEGHTFLVRNHRQASLEISPITFLTAQTLLMDLGQFLLFCHISSHQHDGMEAYVKVDSCPEEPQLRMKNNEEAEDYDDDLTDSEMDVVRFDDDNSPSFIQIRSVAKKHPKTWVHYIAAEEEDWDYAPLVLAPDDRSYKSQYLNNGPQRIGRKYKKVRFMAYTDETFKTREAIQHESGILGPLLYGEVGDTLLIIFKNQASRPYNIYPHGITDVRPLYSRRLPKGVKHLKDFPILPGEIFKYKWTVTVEDGPTKSDPRCLTRYYSSFVNMERDLASGLIGPLLICYKESVDQRGNQIMSDKRNVILFSVFDENRSWYLTENIQRFLPNPAGVQLEDPEFQASNIMHSINGYVFDSLQLSVCLHEVAYWYILSIGAQTDFLSVFFSGYTFKHKMVYEDTLTLFPFSGETVFMSMENPGLWILGCHNSDFRNRGMTALLKVSSCDKNTGDYYEDSYEDISAYLDSKNNAIEPRSFSQNPPVLKRHQREITRTTLQSDQEEIDYDDTISVEMKKEDFDIYDEDENQSPRSFQKKTRHYFIAAVERLWDYGMSSSPHVLRNRAQSGSVPQFKKVVFQEFTDGSFTQPLYRGELNEHLGLLGPYIRAEVEDNIMVTFRNQASRPYSFYSSLISYEEDQRQGAEPRKNFVKPNETKTYFWKVQHHMAPTKDEFDCKAWAYFSDVDLEKDVHSGLIGPLLVCHTNTLNPAHGRQVTVQEFALFFTIFDETKSWYFTENMERNCRAPCNIQMEDPTFKENYRFHAINGYIMDTLPGLVMAQDQRIRWYLLSMGSNENIHSIHFSGHVFTVRKKEEYKMALYNLYPGVFETVEMLPSKAGIWRVECLIGEHLHAGMSTLFLVYSNKCQTPLGMASGHIRDFQITASGQYGQWAPKLARLHYSGSINAWSTKEPFSWIKVDLLAPMIIHGIKTQGARQKFSSLYISQFIIMYSLDGKKWQTYRGNSTGTLMVFFGNVDSSGIKHNIFNPPIIARYIRLHPTHYSIRSTLRMELMGCDLNSCSMPLGMESKAISDAQITASSYFTNMFATWSPSKARLHLQGRSNAWRPQVNNPKEWLQVDFQKTMKVTGVTTQGVKSLDTSMYVKEFLISSSQDGHQWTLFFQNGKVKVFQGNQDSFTPVVNSLDPPLLTRYLRIHPQSWEHQIALRMEVLGCEAQDLY

SEQ ID NO: 739 - DNA, 4371 bp, synthetic construct
  misc_feature 1..4371: note = Variant of human B-domain deleted Factor VIII
  source 1..4371: mol_type = other DNA
atgcagattgaactgtctacctgcttcttcctctgtttgctgaggttctgctttagcgccactagacggtactaccttggcgctgtggagctgtcctgggactatatgcagagtgatttgggagagcttcccgtcgacgcacgatttcctcctcgcgttccaaagtcatttccctttaacacaagcgtggtgtacaagaagacgctcttcgtcgaattcaccgatcacctgttcaatatcgccaaacccagaccaccatggatgggtcttttggggcctaccatacaagcggaggtgtatgacacagttgttatcactctcaagaacatggcttctcatccggtaagtcttcacgcagtgggcgtgtcctactggaaagcttcagaaggagccgagtatgatgatcagacatcccagagggagaaagaagacgacaaggtatttccaggtgggtctcatacctatgtgtggcaagtgctcaaagagaatggccctatggcaagcgatccgccgtgtttgacttacagctacctttcacacgttgacctcgtcaaggacctcaactccgggttgattggagccttgttggtatgcagggaaggatctcttgccaaagagaagacacagaccctccacaagtttatccttctctttgctgtgttcgatgagggcaaaagttggcatagcgaaacgaagaattccctcatgcaggatcgcgacgcagccagcgccagagcttggcccaagatgcacactgtgaacggatatgtcaataggtcacttcctggcttgattgggtgtcatcggaaaagtgtctactggcacgtgatcggaatggggacaacaccagaggtccactccatatttctcgaaggccataccttccttgttcgaaaccacagacaggcatccttggagatctctcccattacctttctcactgcccaaacgctccttatggacttgggtcagttccttctcttctgccatatcagctcacaccagcatgatggtatggaagcttatgtgaaagtcgacagttgtcctgaggagccacagttgcgcatgaagaataatgaagaagccgaggattacgacgacgatctcaccgattctgagatggacgtggtgaggtttgatgacgacaactctccctccttcattcaaatccggagcgtggcgaagaaacaccccaagacttgggtccactatatagcggcggaagaggaggattgggattacgctcctcttgtattggcaccagatgaccgctcatacaaaagccagtacctcaacaacggaccgcagagaattggccggaagtataagaaagtgcgatttatggcctatacagacgaaacctttaagacaagggaggccatccagcatgagagtgggattttgggacctcttctttacggcgaagttggtgataccctcctcatcatcttcaagaatcaagcttctcgcccctataacatttacccacacgggatcactgacgttaggcctttgtatagcagaagacttcccaaaggcgtgaagcatctcaaagacttccccattttgccaggcgagatctttaagtacaaatggaccgtcacagtggaagatggaccgactaaatcagaccctcgatgccttacgcggtactattcctccttcgtgaatatggagagagatttggcaagcggactcataggaccactcctcatctgttacaaggaatctgtagaccagaggggtaaccagattatgagtgataaacgcaatgtgatcctttttagcgtcttcgacgagaaccggtcctggtacttgaccgagaatatacaaaggttccttcccaaccccgcaggcgttcagttggaagaccctgagtttcaggccagcaatattatgcactcaatcaacggctatgtgtttgatagtctccagctttctgtttgcctccatgaagtagcctattggtacatcttgtcaattggtgctcaaacagacttcctctccgtcttcttctccggctacacctttaagcacaagatggtgtatgaggacactctcacactctttccattttctggagaaaccgtgttcatgagcatggagaatccaggcctttggatcttgggttgccacaacagtgattttcgcaatcggggaatgactgctctcctcaaagtcagcagctgtgataagaacacaggcgactattacgaagattcttacgaggacataagtgcctacttgctgtccaagaataacgccattgagcccagatcattctcccagaatcctcccgtgcttaaaaggcatcagcgcgaaatcaccagaactactcttcagtctgatcaagaggagattgactatgacgacaccataagcgtggaaatgaagaaggaggatttcgatatctatgacgaagatgagaaccagtctccgcggagctttcagaagaagacgcgacactacttcattgcagcagtcgaaaggctttgggactacggtatgtcatcatcccctcatgtgttgcgcaatagagctcagagtggaagtgttccacagttcaagaaagtcgtctttcaagagtttacagatggcagcttcacacagcctctctatcggggcgagcttaacgaacatttgggactccttggtccctatatccgagccgaagtggaggacaacattatggttacctttaggaatcaagcctctcgcccctacagcttctactcctccctcatcagttatgaggaggatcagagacaaggcgctgaaccacggaagaactttgtgaaaccgaatgagacgaagacctacttctggaaagtacagcaccacatggcccccacaaaagacgaattcgattgcaaagcatgggcgtatttttcagacgttgacttggagaaagatgtacattcaggacttattggtcctttgttggtgtgtcacactaacactctcaatccagcccatggcaggcaggtgacagtccaggaattcgctcttttctttaccatctttgatgagaccaagtcctggtacttcacggaaaacatggagcgcaattgcagagccccctgtaacatacagatggaggaccctacctttaaggaaaattatcggttccacgcaatcaacggatacattatggatacactccctggccttgtgatggctcaggaccaacgaatcaggtggtacctcctcagcatgggttctaatgagaacatacactccattcacttttcaggacatgtgttcactgtccggaagaaagaagagtataagatggccctctacaatttgtatccaggcgtgtttgagaccgttgaaatgcttccctctaaagctggcatctggagagtagagtgcttgatcggagaacatcttcacgcaggtatgagcaccttgttcctcgtgtacagcaacaaatgtcagaccccacttggcatggccagtggacacattcgcgactttcagatcacagcatctggccagtatggacaatgggccccaaagttggctcgcctccattactccggtagcataaatgcgtggtccactaaagaacctgccagctggattaaggtcgatcttcttgcccccatgatcatccacggcattaagacacagggagcgaggcagaaattctcctccctgtacatctcacagttcattattatgtatagtttggacggcaagaagtggcaaacttatagaggtaacagtactggaacagacatggtgttcttcggcaacgttgatagctctggcatcaaacacaacatctttaatcctcccataatagctcggtacatcagattgcatccgacccactacagcattaggagtacactccgaatggagcttatgggttgcgacctgaattcctgttcaatgccactcggaatggagtctaaagccatctctgatgcacagataaccgccagtagctactttacgaacatgtttgctacgtggtcaccctctaaggcaaggcttcatttgcaaggccggtctaatgcctggagacctcaggtgaacaacccgaaagaatggctccaggtggactttcagaagaccatgaaagtaacaggtgtcactactcagggagttaagtccttggataccagcatgtatgtgaaggagttccttatttcctcatcacaagatggccaccagtggaccctcttctttcagaatggtaaggtcaaagtgtttcagggcaatcaagacagcttcacacccgtggtgaacagtcttgatcctccactcttgacacgataccttcgaatccatccacagtcttgggagcaccagattgcattgcgcatggaagtacttggatgcgaggctcaggacctctac

SEQ ID NO: 740 - protein, 1457 aa, synthetic construct
  REGION 1..1457: note = Variant of human B-domain deleted Factor VIII
MQIELSTCFFLCLLRFCFSATRRYYLGAVELSWDYMQSDLGELPVDARFPPRVPKSFPFNTSVVYKKTLFVEFTDHLFNIAKPRPPWMGLLGPTIQAEVYDTVVITLKNMASHPVSLHAVGVSYWKASEGAEYDDQTSQREKEDDKVFPGGSHTYVWQVLKENGPMASDPPCLTYSYLSHVDLVKDLNSGLIGALLVCREGSLAKEKTQTLHKFILLFAVFDEGKSWHSETKNSLMQDRDAASARAWPKMHTVNGYVNRSLPGLIGCHRKSVYWHVIGMGTTPEVHSIFLEGHTFLVRNHRQASLEISPITFLTAQTLLMDLGQFLLFCHISSHQHDGMEAYVKVDSCPEEPQLRMKNNEEAEDYDDDLTDSEMDVVRFDDDNSPSFIQIRSVAKKHPKTWVHYIAAEEEDWDYAPLVLAPDDRSYKSQYLNNGPQRIGRKYKKVRFMAYTDETFKTREAIQHESGILGPLLYGEVGDTLLIIFKNQASRPYNIYPHGITDVRPLYSRRLPKGVKHLKDFPILPGEIFKYKWTVTVEDGPTKSDPRCLTRYYSSFVNMERDLASGLIGPLLICYKESVDQRGNQIMSDKRNVILFSVFDENRSWYLTENIQRFLPNPAGVQLEDPEFQASNIMHSINGYVFDSLQLSVCLHEVAYWYILSIGAQTDFLSVFFSGYTFKHKMVYEDTLTLFPFSGETVFMSMENPGLWILGCHNSDFRNRGMTALLKVSSCDKNTGDYYEDSYEDISAYLLSKNNAIEPRSFSQNPPVLKRHQREITRTTLQSDQEEIDYDDTISVEMKKEDFDIYDEDENQSPRSFQKKTRHYFIAAVERLWDYGMSSSPHVLRNRAQSGSVPQFKKVVFQEFTDGSFTQPLYRGELNEHLGLLGPYIRAEVEDNIMVTFRNQASRPYSFYSSLISYEEDQRQGAEPRKNFVKPNETKTYFWKVQHHMAPTKDEFDCKAWAYFSDVDLEKDVHSGLIGPLLVCHTNTLNPAHGRQVTVQEFALFFTIFDETKSWYFTENMERNCRAPCNIQMEDPTFKENYRFHAINGYIMDTLPGLVMAQDQRIRWYLLSMGSNENIHSIHFSGHVFTVRKKEEYKMALYNLYPGVFETVEMLPSKAGIWRVECLIGEHLHAGMSTLFLVYSNKCQTPLGMASGHIRDFQITASGQYGQWAPKLARLHYSGSINAWSTKEPASWIKVDLLAPMIIHGIKTQGARQKFSSLYISQFIIMYSLDGKKWQTYRGNSTGTDMVFFGNVDSSGIKHNIFNPPIIARYIRLHPTHYSIRSTLRMELMGCDLNSCSMPLGMESKAISDAQITASSYFTNMFATWSPSKARLHLQGRSNAWRPQVNNPKEWLQVDFQKTMKVTGVTTQGVKSLDTSMYVKEFLISSSQDGHQWTLFFQNGKVKVFQGNQDSFTPVVNSLDPPLLTRYLRIHPQSWEHQIALRMEVLGCEAQDLY

SEQ ID NO: 741 - DNA, 4371 bp, synthetic construct
  misc_feature 1..4371: note = Variant of human B-domain deleted Factor VIII
  source 1..4371: mol_type = other DNA
atgcagattgaactgtctacctgcttcttcctctgtttgctgaggttctgctttagcgccactagacggtactaccttggcgctgtggagctgtcctgggactatatgcagagtgatttgggagagcttcccgtcgacgcacgatttcctcctcgcgttccaaagtcatttccctttaacacaagcgtggtgtacaagaagacgctcttcgtcgaattcaccgatcacctgttcaatatcgccaaacccagaccaccatggatgggtcttttggggcctaccatacaagcggaggtgtatgacacagttgttatcactctcaagaacatggcttctcatccggtaagtcttcacgcagtgggcgtgtcctactggaaagcttcagaaggagccgagtatgatgatcagacatcccagagggagaaagaagacgacaaggtatttccaggtgggtctcatacctatgtgtggcaagtgctcaaagagaatggccctatggcaagcgatccgctctgtttgacttacagctacctttcacacgttgacctcgtcaaggacctcaactccgggttgattggagccttgttggtatgcagggaaggatctcttgccaaagagaagacacagaccctccacaagtttatccttctctttgctgtgttcgatgagggcaaaagttggcatagcgaaacgaagaattccctcatgcaggatcgcgacgcagccagcgccagagcttggcccaagatgcacactgtgaacggatatgtcaataggtcgcttcctggcttgattgggtgtcatcggaaaagtgtctactggcacgtgatcggaatggggacaacaccagaggtccactccatatttctcgaaggccataccttccttgttcgaaaccacagacaggcatccttggagatctctcccattacctttctcactgcccaaacgctccttatggacttgggtcagttccttctcttctgccatatcagctcacaccagcatgatggtatggaagcttatgtgaaagtcgacagttgtcctgaggagccacagttgcgcatgaagaataatgaagaagccgaggattacgacgacgatctcaccgattctgagatggacgtggtgaggtttgatgacgacaactctccctccttcattcaaatccggagcgtggcgaagaaacaccccaagacttgggtccactatatagcggcggaagaggaggattgggattacgctcctcttgtattggcaccagatgaccgctcatacaaaagccagtacctcaacaacggaccgcagagaattggccggaagtataagaaagtgcgatttatggcctatacagacgaaacctttaagacaagggaggccatccagcatgagagtgggattttgggacctcttctttacggcgaagttggtgataccctcctcatcatcttcaagaatcaagcttctcgcccctataacatttacccacacgggatcactgacgttaggcctttgtatagcagaagacttcccaaaggcgtgaagcatctcaaagacttccccattttgccaggcgagatctttaagtacaaatggaccgtcacagtggaagatggaccgactaaatcagaccctcgatgccttacgcggtactattcctccttcgtgaatatggagagagatttggcaagcggactcataggaccactcctcatctgttacaaggaatctgtagaccagaggggtaaccagattatgagtgataaacgcaatgtgatcctttttagcgtcttcgacgagaaccggtcctggtacttgaccgagaatatacaaaggttccttcccaaccccgcaggcgttcagttggaagaccctgagtttcaggccagcaatattatgcactcaatcaacggctatgtgtttgatagtctccagctttctgtttgcctccatgaagtagcctattggtacatcttgtcaattggtgctcaaacagacttcctctccgtcttcttctccggctacacctttaagcacaagatggtgtatgaggacactctcacactctttccattttctggagaaaccgtgttcatgagcatggagaatccaggcctttggatcttgggttgccacaacagtgattttcgcaatcggggaatgactgctctcctcaaagtcagcagctgtgataagaacacaggcgactattacgaagattcttacgaggacataagtgcctacttggactccaagaataacgccattgagcccagatcattctcccagaatcctcccgtgcttaaaaggcatcagcgcgaaatcaccagaactactcttcagtctgatcaagaggagattgactatgacgacaccataagcgtggaaatgaagaaggaggatttcgatatctatgacgaagatgagaaccagtctccgcggagctttcagaagaagacgcgacactacttcattgcagcagtcgaaaggctttgggactacggtatgtcatcatcccctcatgtgttgcgcaatagagctcagagtggaagtgttccacagttcaagaaagtcgtctttcaagagtttacagatggcagcttcacacagcctctctatcggggcgagcttaacgaacatttgggactccttggtccctatatccgagccgaagtggaggacaacattatggttacctttaggaatcaagcctctcgcccctacagcttctactcctccctcatcagttatgaggaggatcagagacaaggcgctgaaccacggaagaactttgtgaaaccgaatgagacgaagacctacttctggaaagtacagcaccacatggcccccacaaaagacgaattcgattgcaaagcatgggcgtatttttcagacgttgacttggagaaagatgtacattcaggacttattggtcctttgttggtgtgtcacactaacactctcaatccagcccatggcaggcaggtgacagtccaggaattcgctcttttctttaccatctttgatgagaccaagtcctggtacttcacggaaaacatggagcgcaattgcagagccccctgtaacatacagatggaggaccctacctttaaggaaaattatcggttccacgcaatcaacggatacattatggatacactccctggccttgtgatggctcaggaccaacgaatcaggtggtacctcctcagcatgggttctaatgagaacatacactccattcacttttcaggacatgtgttcactgtccggaagaaagaagagtataagatggccctctacaatttgtatccaggcgtgtttgagaccgttgaaatgcttccctctaaagctggcatctggagagtagagtgcttgatcggagaacatcttcacgcaggtatgagcaccttgttcctcgtgtacagcaacaaatgtcagaacccacttggcatggccagtggacacattcgcgactttcagatcacagcatctggccagtatggacaatgggccccaaagttggctcgcctccattactccggtagcataaatgcgtggtccactaaagaacctgccagctggattaaggtcgatcttcttgcccccatgatcatccacggcattaagacacagggagcgaggcagaaattctcctccctctacatctcacagttcattattatgtatagtttggacggcaagaagtggcaaacttatagaggtaacagtactggaacactgatggtgttcttcggcaacgttgatagctctggcatcaaacacaacatctttaatcctcccataatagctcggtacatcagattgcatccgacccactacagcattaggagtacactccgaatggagcttatgggttgcgacttgaattcctgttcaatgccactcggaatggagtctaaagccatctctgatgcacagataaccgccagtagctactttacgaacatgtttgctacgtggtcaccctctaaggcaaggcttcatttgcaaggccggtctaatgcctggagacctcaggtgaacaacccgaaagaatggctccaggtggactttcagaagaccatgaaagtaacaggtgtcactactcagggagttaagtccttggataccagcatgtatgtgaaggagttccttatttcctcatcacaagatggccaccagtggaccctcttctttcagaatggtaaggtcaaagtgtttcagggcaatcaagacagcttcacacccgtggtgaacagtcttgatcctccactcttgacacgataccttcgaatccatccacagtcttgggagtcgcagattgcattgcgcatggaagtacttggatgcgaggctcaggacctctac

SEQ ID NO: 742 - protein, 1457 aa, synthetic construct
  REGION 1..1457: note = Variant of human B-domain deleted Factor VIII
MQIELSTCFFLCLLRFCFSATRRYYLGAVELSWDYMQSDLGELPVDARFPPRVPKSFPFNTSVVYKKTLFVEFTDHLFNIAKPRPPWMGLLGPTIQAEVYDTVVITLKNMASHPVSLHAVGVSYWKASEGAEYDDQTSQREKEDDKVFPGGSHTYVWQVLKENGPMASDPLCLTYSYLSHVDLVKDLNSGLIGALLVCREGSLAKEKTQTLHKFILLFAVFDEGKSWHSETKNSLMQDRDAASARAWPKMHTVNGYVNRSLPGLIGCHRKSVYWHVIGMGTTPEVHSIFLEGHTFLVRNHRQASLEISPITFLTAQTLLMDLGQFLLFCHISSHQHDGMEAYVKVDSCPEEPQLRMKNNEEAEDYDDDLTDSEMDVVRFDDDNSPSFIQIRSVAKKHPKTWVHYIAAEEEDWDYAPLVLAPDDRSYKSQYLNNGPQRIGRKYKKVRFMAYTDETFKTREAIQHESGILGPLLYGEVGDTLLIIFKNQASRPYNIYPHGITDVRPLYSRRLPKGVKHLKDFPILPGEIFKYKWTVTVEDGPTKSDPRCLTRYYSSFVNMERDLASGLIGPLLICYKESVDQRGNQIMSDKRNVILFSVFDENRSWYLTENIQRFLPNPAGVQLEDPEFQASNIMHSINGYVFDSLQLSVCLHEVAYWYILSIGAQTDFLSVFFSGYTFKHKMVYEDTLTLFPFSGETVFMSMENPGLWILGCHNSDFRNRGMTALLKVSSCDKNTGDYYEDSYEDISAYLDSKNNAIEPRSFSQNPPVLKRHQREITRTTLQSDQEEIDYDDTISVEMKKEDFDIYDEDENQSPRSFQKKTRHYFIAAVERLWDYGMSSSPHVLRNRAQSGSVPQFKKVVFQEFTDGSFTQPLYRGELNEHLGLLGPYIRAEVEDNIMVTFRNQASRPYSFYSSLISYEEDQRQGAEPRKNFVKPNETKTYFWKVQHHMAPTKDEFDCKAWAYFSDVDLEKDVHSGLIGPLLVCHTNTLNPAHGRQVTVQEFALFFTIFDETKSWYFTENMERNCRAPCNIQMEDPTFKENYRFHAINGYIMDTLPGLVMAQDQRIRWYLLSMGSNENIHSIHFSGHVFTVRKKEEYKMALYNLYPGVFETVEMLPSKAGIWRVECLIGEHLHAGMSTLFLVYSNKCQNPLGMASGHIRDFQITASGQYGQWAPKLARLHYSGSINAWSTKEPASWIKVDLLAPMIIHGIKTQGARQKFSSLYISQFIIMYSLDGKKWQTYRGNSTGTLMVFFGNVDSSGIKHNIFNPPIIARYIRLHPTHYSIRSTLRMELMGCDLNSCSMPLGMESKAISDAQITASSYFTNMFATWSPSKARLHLQGRSNAWRPQVNNPKEWLQVDFQKTMKVTGVTTQGVKSLDTSMYVKEFLISSSQDGHQWTLFFQNGKVKVFQGNQDSFTPVVNSLDPPLLTRYLRIHPQSWESQIALRMEVLGCEAQDLY

SEQ ID NO: 743 - DNA, 4371 bp, synthetic construct
  misc_feature 1..4371: note = Variant of human B-domain deleted Factor VIII
  source 1..4371: mol_type = other DNA
atgcagattgaactgtctacctgcttcttcctctgtttgctgaggttctgctttagcgccactagacggtactaccttggcgctgtggagctgtcctgggactatatgcagagtgatttgggagagcttcccgtcgacgcacgatttcctcctcgcgttccaaagtcatttcccttcaacacaagcgtggtgtacaagaagacgctcttcgtcgaattcaccgatcacctgttcaatatcgccaaacccagaccaccatggatgggtcttttggggcctaccatacaagcggaggtgtatgacacagttgttatcactctcaagaacatggcttctcatccggtaagtcttcacgcagtgggcgtgtcctactggaaagcttcagaaggagccgagtatgatgatcagacatcccagagggagaaagaagacgacaaggtatttccaggtgggtctcatacctatgtgtggcaagtgctcaaagagaatggccctatggcaagcgatccgctctgtttgacttacagctacctttcacacgttgacctcgtcaaggacctcaactccgggttgattggagccttgttggtatgcagggaaggatctcttgccaaagagaagacacagaccctccacaagtttatccttctctttgctgtgttcgatgagggcaaaagttggcatagcgaaacgaagaattccctcatgcaggatcgcgacgcagccagcgccagagcttggcccaagatgcacactgtgaacggatatgtcaataggtcacttcctggcttgattgggtgtcatcggaaaagtgtctactggcacgtgatcggaatggggacaacaccagaggtccactccatatttctcgaaggccataccttccttgttcgaaaccacagacaggcatccttggagatctctcccattacctttctcactgcccaaacgctccttatggacttgggtcagttccttctcttctgccatatcagctcacaccagcatgatggtatggaagcttatgtgaaagtcgacagttgtcctgaggagccacagttgcgcatgaagaataatgaagaagccgaggattacgacgacgatctcaccgattctgagatggacgtggtgaggtttgatgacgacaactctccctccttcattcaaatccggagcgtggcgaagaaacaccccaagacttgggtccactatatagcggcggaagaggaggattgggattacgctcctcttgtattggcaccagatgaccgctcatacaaaagccagtacctcaacaacggaccgcagagaattggccggaagtataagaaagtgcgatttatggcctatacagacgaaacctttaagacaagggaggccatccagcatgagagtgggattttgggacctcttctttacggcgaagttggtgataccctcctcatcatcttcaagaatcaagcttctcgcccctataacatttacccacacgggatcactgacgttaggcctttgtatagcagaagacttcccaaaggcgtgaagcatctcaaagacttccccattttgccaggcgagatctttaagtacaaatggaccgtcacagtggaagatggaccgactaaatcagaccctcgatgccttacgcggtactattcctccttcgtgaatatggagagagatttggcaagcggactcataggaccactcctcatctgttacaaggaatctgtagaccagaggggtaaccagattatgagtgataaacgcaatgtgatcctttttagcgtcttcgacgagaaccggtcctggtacttgaccgagaatatacaaaggttccttcccaaccccgcaggcgttcagttggaagaccctgagtttcaggccagcaatattatgcactcaatcaacggctatgtgtttgatagtctccagctttctgtttgcctccatgaagtagcctattggtacatcttgtcaattggtgctcaaacagacttcctctccgtcttcttctccggctacacctttaagcacaagatggtgtatgaggacactctcacactctttccattttctggagaaaccgtgttcatgagcatggagaatccaggcctttggatcttgggttgccacaacagtgattttcgcaatcggggaatgactgctctcctcaaagtcagcagctgtgataagaacacaggcgactattacgaagattcttacgaggacataagtgcctacttgttgtccaagaataacgccattgagcccagatcattctcccagaatcctcccgtgcttaaaaggcatcagcgcgaaatcaccagaactactcttcagtctgatcaagaggagattgactatgacgacaccataagcgtggaaatgaagaaggaggatttcgatatctatgacgaagatgagaaccagtctccgcggagctttcagaagaagacgcgacactacttcattgcagcagtcgaaaggctttgggactacggtatgtcatcatcccctcatgtgttgcgcaatagagctcagagtggaagtgttccacagttcaagaaagtcgtctttcaagagtttacagatggcagcttcacacagcctctctatcggggcgagcttaacgaacatttgggactccttggtccctatatccgagccgaagtggaggacaacattatggttacctttaggaatcaagcctctcgcccctacagcttctactcctccctcatcagttatgaggaggatcagagacaaggcgctgaaccacggaagaactttgtgaaaccgaatgagacgaagacctacttctggaaagtacagcaccacatggcccccacaaaagacgaattcgattgcaaagcatgggcgtatttttcagacgttgacttggagaaagatgtacattcaggacttattggtcctttgttggtgtgtcacactaacactctcaatccagcccatggcaggcaggtgacagtccaggaattcgctcttttctttaccatctttgatgagaccaagtcctggtacttcacggaaaacatggagcgcaattgcagagccccctgtaacatacagatggaggaccctacctttaaggaaaattatcggttccacgcaatcaacggatacattatggatacactccctggccttgtgatggctcaggaccaacgaatcaggtggtacctcctcagcatgggttctaatgagaacatacactccattcacttttcaggacatgtgttcactgtccggaagaaagaagagtataagatggccctctacaatttgtatccaggcgtgtttgagaccgttgaaatgcttccctctaaagctggcatctggagagtagagtgcttgatcggagaacatcttcacgcaggtatgagcaccttgttcctcgtgtacagcaacaaatgtcagaacccacttggcatggccagtggacacattcgcgactttcagatcacagcatctggccagtatggacaatgggccccaaagttggctcgcctccattactccggtagcataaatgcgtggtccactaaagaacctttcagctggattaaggtcgatcttcttgcccccatgatcatccacggcattaagacacagggagcgaggcagaaattctcctccctctacatctcacagttcattattatgtatagtttggacggcaagaagtggcaaacttatagaggtaacagtactggaacactcatggtgttcttcggcaacgttgatagctctggcatcaaacacaacatctttaatcctcccataatagctcggtacatcagattgcatccgacccactacagcattaggagtacactccgaatggagcttatgggttgcgacttgaattcctgttcaatgccactcggaatggagtctaaagccatctctgatgcacagataaccgccagtagctactttacgaacatgtttgctacgtggtcaccctctaaggcaaggcttcatttgcaaggccggtctaatgcctggagacctcaggtgaacaacccgaaagaatggctccaggtggactttcagaagaccatgaaagtaacaggtgtcactactcagggagttaagtccttggataccagcatgtatgtgaaggagttccttatttcctcatcacaagatggccaccagtggaccctcttctttcagaatggtaaggtcaaagtgtttcagggcaatcaagacagcttcacacccgtggtgaacagtcttgatcctccactcttgacacgataccttcgaatccatccacagtcttgggagcaccagattgcattgcgcatggaagtacttggatgcgaggctcaggacctctac

SEQ ID NO: 744 - protein, 1457 aa, synthetic construct
  REGION 1..1457: note = Variant of human B-domain deleted Factor VIII
MQIELSTCFFLCLLRFCFSATRRYYLGAVELSWDYMQSDLGELPVDARFPPRVPKSFPFNTSVVYKKTLFVEFTDHLFNIAKPRPPWMGLLGPTIQAEVYDTVVITLKNMASHPVSLHAVGVSYWKASEGAEYDDQTSQREKEDDKVFPGGSHTYVWQVLKENGPMASDPLCLTYSYLSHVDLVKDLNSGLIGALLVCREGSLAKEKTQTLHKFILLFAVFDEGKSWHSETKNSLMQDRDAASARAWPKMHTVNGYVNRSLPGLIGCHRKSVYWHVIGMGTTPEVHSIFLEGHTFLVRNHRQASLEISPITFLTAQTLLMDLGQFLLFCHISSHQHDGMEAYVKVDSCPEEPQLRMKNNEEAEDYDDDLTDSEMDVVRFDDDNSPSFIQIRSVAKKHPKTWVHYIAAEEEDWDYAPLVLAPDDRSYKSQYLNNGPQRIGRKYKKVRFMAYTDETFKTREAIQHESGILGPLLYGEVGDTLLIIFKNQASRPYNIYPHGITDVRPLYSRRLPKGVKHLKDFPILPGEIFKYKWTVTVEDGPTKSDPRCLTRYYSSFVNMERDLASGLIGPLLICYKESVDQRGNQIMSDKRNVILFSVFDENRSWYLTENIQRFLPNPAGVQLEDPEFQASNIMHSINGYVFDSLQLSVCLHEVAYWYILSIGAQTDFLSVFFSGYTFKHKMVYEDTLTLFPFSGETVFMSMENPGLWILGCHNSDFRNRGMTALLKVSSCDKNTGDYYEDSYEDISAYLLSKNNAIEPRSFSQNPPVLKRHQREITRTTLQSDQEEIDYDDTISVEMKKEDFDIYDEDENQSPRSFQKKTRHYFIAAVERLWDYGMSSSPHVLRNRAQSGSVPQFKKVVFQEFTDGSFTQPLYRGELNEHLGLLGPYIRAEVEDNIMVTFRNQASRPYSFYSSLISYEEDQRQGAEPRKNFVKPNETKTYFWKVQHHMAPTKDEFDCKAWAYFSDVDLEKDVHSGLIGPLLVCHTNTLNPAHGRQVTVQEFALFFTIFDETKSWYFTENMERNCRAPCNIQMEDPTFKENYRFHAINGYIMDTLPGLVMAQDQRIRWYLLSMGSNENIHSIHFSGHVFTVRKKEEYKMALYNLYPGVFETVEMLPSKAGIWRVECLIGEHLHAGMSTLFLVYSNKCQNPLGMASGHIRDFQITASGQYGQWAPKLARLHYSGSINAWSTKEPFSWIKVDLLAPMIIHGIKTQGARQKFSSLYISQFIIMYSLDGKKWQTYRGNSTGTLMVFFGNVDSSGIKHNIFNPPIIARYIRLHPTHYSIRSTLRMELMGCDLNSCSMPLGMESKAISDAQITASSYFTNMFATWSPSKARLHLQGRSNAWRPQVNNPKEWLQVDFQKTMKVTGVTTQGVKSLDTSMYVKEFLISSSQDGHQWTLFFQNGKVKVFQGNQDSFTPVVNSLDPPLLTRYLRIHPQSWEHQIALRMEVLGCEAQDLY

SEQ ID NO: 745 - DNA, 4371 bp, synthetic construct
  misc_feature 1..4371: note = Variant of human B-domain deleted Factor VIII
  source 1..4371: mol_type = other DNA
atgcagattgaactgtctacctgcttcttcctctgtttgctgaggttctgctttagcgccactagacggtactaccttggcgctgtggagctgtcctgggactatatgcagagtgatttgggagagcttcccgtcgacgcacgatttcctcctcgcgttccaaagtcatttcccttcaacacaagcgtggtgtacaagaagacgctcttcgtcgaattcaccgatcacctgttcaatatcgccaaacccagaccaccatggatgggtcttttggggcctaccatacaagcggaggtgtatgacacagttgttatcactctcaagaacatggcttctcatccggtaagtcttcacgcagtgggcgtgtcctactggaaagcttcagaaggagccgagtatgatgatcagacatcccagagggagaaagaagacgacaaggtatttccaggtgggtctcatacctatgtgtggcaagtgctcaaagagaatggccctatggcaagcgatccgccgtgtttgacttacagctacctttcacacgttgacctcgtcaaggacctcaactccgggttgattggagccttgttggtatgcagggaaggatctcttgccaaagagaagacacagaccctccacaagtttatccttctctttgctgtgttcgatgagggcaaaagttggcatagcgaaacgaagaattccctcatgcaggatcgcgacgcagccagcgccagagcttggcccaagatgcacactgtgaacggatatgtcaataggtcgcttcctggcttgattgggtgtcatcggaaaagtgtctactggcacgtgatcggaatggggacaacaccagaggtccactccatatttctcgaaggccataccttccttgttcgaaaccacagacaggcatccttggagatctctcccattacctttctcactgcccaaacgctccttatggacttgggtcagttccttctcttctgccatatcagctcacaccagcatgatggtatggaagcttatgtgaaagtcgacagttgtcctgaggagccacagttgcgcatgaagaataatgaagaagccgaggattacgacgacgatctcaccgattctgagatggacgtggtgaggtttgatgacgacaactctccctccatcattcaaatccggagcgtggcgaagaaacaccccaagacttgggtccactatatagcggcggaagaggaggattgggattacgctcctcttgtattggcaccagatgaccgctcatacaaaagccagtacctcaacaacggaccgcagagaattggccggaagtataagaaagtgcgatttatggcctatacagacgaaacctttaagacaagggaggccatccagcatgagagtgggattttgggacctcttctttacggcgaagttggtgataccctcctcatcatcttcaagaatcaagcttctcgcccctataacatttacccacacgggatcactgacgttaggcctttgtatagcagaagacttcccaaaggcgtgaagcatctcaaagacttccccattttgccaggcgagatctttaagtacaaatggaccgtcacagtggaagatggaccgactaaatcagaccctcgatgccttacgcggtactattcctccttcgtgaatatggagagagatttggcaagcggactcataggaccactcctcatctgttacaaggaatctgtagaccagaggggtaaccagattatgagtgataaacgcaatgtgatcctttttagcgtcttcgacgagaaccggtcctggtacttgaccgagaatatacaaaggttccttcccaaccccgcaggcgttcagttggaagaccctgagtttcaggccagcaatattatgcactcaatcaacggctatgtgtttgatagtctccagctttctgtttgcctccatgaagtagcctattggtacatcttgtcaattggtgctcaaacagacttcctctccgtcttcttctccggctacacctttaagcacaagatggtgtatgaggacactctcacactctttccattttctggagaaaccgtgttcatgagcatggagaatccaggcctttggatcttgggttgccacaacagtgattttcgcaatcggggaatgactgctctcctcaaagtcagcagctgtgataagaacacaggcgactattacgaagattcttacgaggacataagtgcctacttgctgtccaagaataacgccattgagcccagatcattctcccagaatcctcccgtgcttaaaaggcatcagcgcgaaatcaccagaactactcttcagtctgatcaagaggagattgactatgacgacaccataagcgtggaaatgaagaaggaggatttcgatatctatgacgaagatgagaaccagtctccgcggagctttcagaagaagacgcgacactacttcattgcagcagtcgaaaggctttgggactacggtatgtcatcatcccctcatgtgttgcgcaatagagctcagagtggaagtgttccacagttcaagaaagtcgtctttcaagagtttacagatggcagcttcacacagcctctctatcggggcgagcttaacgaacatttgggactccttggtccctatatccgagccgaagtggaggacaacattatggttacctttaggaatcaagcctctcgcccctacagcttctactcctccctcatcagttatgaggaggatcagagacaaggcgctgaaccacggaagaactttgtgaaaccgaatgagacgaagacctacttctggaaagtacagcaccacatggcccccacaaaagacgaattcgattgcaaagcatgggcgtatttttcagacgttgacttggagaaagatgtacattcaggacttattggtcctttgttggtgtgtcacactaacactctcaatccagcccatggcaggcaggtgacagtccaggaattcgctcttttctttaccatctttgatgagaccaagtcctggtacttcacggaaaacatggagcgcaattgcagagccccctgtaacatacagatggaggaccctacctttaaggaaaattatcggttccacgcaatcaacggatacattaaggatacactccctggccttgtgatggctcaggaccaacgaatcaggtggtacctcctcagcatgggttctaatgagaacatacactccattcacttttcaggacatgtgttcactgtccggaagaaagaagagtataagatggccctctacaatttgtatccaggcgtgtttgagaccgttgaaatgcttccctctaaagctggcatctggagagtagagtgcttgatcggagaacatcttcacgcaggtatgagcaccttgttcctcgtgtacagcaacaaatgtcagaccccacttggcatggccagtggacacattcgcgactttcagatcacagcatctggccagtatggacaatgggccccaaagttggctcgcctccattactccggtagcataaatgcgtggtccactaaagaacctttcagctggattaaggtcgatcttcttgcccccatgatcatccacggcattaagacacagggagcgaggcagaaattctcctccctctacatctcacagttcattattatgtatagtttggacggcaagaagtggcaaacttatagaggtaacagtactggaacactcatggtgttcttcggcaacgttgatagctctggcatcaaacacaacatctttaatcctcccataatagctcggtacatcagattgcatccgacccactacagcattaggagtacactccgaatggagcttatgggttgcgacttgaattcctgttcaatgccactcggaatggagtctaaagccatctctgatgcacagataaccgccagtagctactttacgaacatgtttgctacgtggtcaccctctaaggcaaggcttcatttgcaaggccggtctaatgcctggagacctcaggtgaacaacccgaaagaatggctccaggtggactttcagaagaccatgaaagtaacaggtgtcactactcagggagttaagtccttggataccagcatgtatgtgaaggagttccttatttcctcatcacaagatggccaccagtggaccctcttctttcagaatggtaaggtcaaagtgtttcagggcaatcaagacagcttcacacccgtggtgaacagtcttgatcctccactcttgacacgataccttcgaatccatccacagtcttgggagcaccagattgcattgcgcatggaagtacttggatgcgaggctcaggacctctac

SEQ ID NO: 746 - protein, 1457 aa, synthetic construct
  REGION 1..1457: note = Variant of human B-domain deleted Factor VIII
MQIELSTCFFLCLLRFCFSATRRYYLGAVELSWDYMQSDLGELPVDARFPPRVPKSFPFNTSVVYKKTLFVEFTDHLFNIAKPRPPWMGLLGPTIQAEVYDTVVITLKNMASHPVSLHAVGVSYWKASEGAEYDDQTSQREKEDDKVFPGGSHTYVWQVLKENGPMASDPPCLTYSYLSHVDLVKDLNSGLIGALLVCREGSLAKEKTQTLHKFILLFAVFDEGKSWHSETKNSLMQDRDAASARAWPKMHTVNGYVNRSLPGLIGCHRKSVYWHVIGMGTTPEVHSIFLEGHTFLVRNHRQASLEISPITFLTAQTLLMDLGQFLLFCHISSHQHDGMEAYVKVDSCPEEPQLRMKNNEEAEDYDDDLTDSEMDVVRFDDDNSPSIIQIRSVAKKHPKTWVHYIAAEEEDWDYAPLVLAPDDRSYKSQYLNNGPQRIGRKYKKVRFMAYTDETFKTREAIQHESGILGPLLYGEVGDTLLIIFKNQASRPYNIYPHGITDVRPLYSRRLPKGVKHLKDFPILPGEIFKYKWTVTVEDGPTKSDPRCLTRYYSSFVNMERDLASGLIGPLLICYKESVDQRGNQIMSDKRNVILFSVFDENRSWYLTENIQRFLPNPAGVQLEDPEFQASNIMHSINGYVFDSLQLSVCLHEVAYWYILSIGAQTDFLSVFFSGYTFKHKMVYEDTLTLFPFSGETVFMSMENPGLWILGCHNSDFRNRGMTALLKVSSCDKNTGDYYEDSYEDISAYLLSKNNAIEPRSFSQNPPVLKRHQREITRTTLQSDQEEIDYDDTISVEMKKEDFDIYDEDENQSPRSFQKKTRHYFIAAVERLWDYGMSSSPHVLRNRAQSGSVPQFKKVVFQEFTDGSFTQPLYRGELNEHLGLLGPYIRAEVEDNIMVTFRNQASRPYSFYSSLISYEEDQRQGAEPRKNFVKPNETKTYFWKVQHHMAPTKDEFDCKAWAYFSDVDLEKDVHSGLIGPLLVCHTNTLNPAHGRQVTVQEFALFFTIFDETKSWYFTENMERNCRAPCNIQMEDPTFKENYRFHAINGYIKDTLPGLVMAQDQRIRWYLLSMGSNENIHSIHFSGHVFTVRKKEEYKMALYNLYPGVFETVEMLPSKAGIWRVECLIGEHLHAGMSTLFLVYSNKCQTPLGMASGHIRDFQITASGQYGQWAPKLARLHYSGSINAWSTKEPFSWIKVDLLAPMIIHGIKTQGARQKFSSLYISQFIIMYSLDGKKWQTYRGNSTGTLMVFFGNVDSSGIKHNIFNPPIIARYIRLHPTHYSIRSTLRMELMGCDLNSCSMPLGMESKAISDAQITASSYFTNMFATWSPSKARLHLQGRSNAWRPQVNNPKEWLQVDFQKTMKVTGVTTQGVKSLDTSMYVKEFLISSSQDGHQWTLFFQNGKVKVFQGNQDSFTPVVNSLDPPLLTRYLRIHPQSWEHQIALRMEVLGCEAQDLY

SEQ ID NO: 747 - DNA, 4371 bp, synthetic construct
  misc_feature 1..4371: note = Variant of human B-domain deleted Factor VIII
  source 1..4371: mol_type = other DNA
atgcagattgaactgtctacctgcttcttcctctgtttgctgaggttctgctttagcgccactagacggtactaccttggcgctgtggagctgtcctgggactatatgcagagtgatttgggagagcttcccgtcgacgcacgatttcctcctcgcgttccaaagtcatttcccttcaacacaagcgtggtgtacaagaagacgctcttcgtcgaattcaccgatcacctgttcaatatcgccaaacccagaccaccatggatgggtcttttggggcctaccatacaagcggaggtgtatgacacagttgttatcactctcaagaacatggcttctcatccggtaagtcttcacgcagtgggcgtgtcctactggaaagcttcagaaggagccgagtatgatgatcagacatcccagagggagaaagaagacgacaaggtatttccaggtgggtctcatacctatgtgtggcaagtgctcaaagagaatggccctatggcaagcgatccgctctgtttgacttacagctacctttcacacgttgacctcgtcaaggacctcaactccgggttgattggagccttgttggtatgcagggaaggatctcttgccaaagagaagacacagaccctccacaagtttatccttctctttgctgtgttcgatgagggcaaaagttggcatagcgaaacgaagaattccctcatgcaggatcgcgacgcagccagcgccagagcttggcccaagatgcacactgtgaacggatatgtcaataggtcacttcctggcttgattgggtgtcatcggaaaagtgtctactggcacgtgatcggaatggggacaacaccagaggtccactccatatttctcgaaggccataccttccttgttcgaaaccacagacaggcatccttggagatctctcccattacctttctcactgcccaaacgctccttatggacttgggtcagttccttctcttctgccatatcagctcacaccagcatgatggtatggaagcttatgtgaaagtcgacagttgtcctgaggagccacagttgcgcatgaagaataatgaagaagccgaggattacgacgacgatctcaccgattctgagatggacgtggtgaggtttgatgacgacaactctccctccttcattcaaatccggagcgtggcgaagaaacaccccaagacttgggtccactatatagcggcggaagaggaggattgggattacgctcctcttgtattggcaccagatgaccgctcatacaaaagccagtacctcaacaacggaccgcagagaattggccggaagtataagaaagtgcgatttatggcctatacagacgaaacctttaagacaagggaggccatccagcatgagagtgggattttgggacctcttctttacggcgaagttggtgataccctcctcatcatcttcaagaatcaagcttctcgcccctataacatttacccacacgggatcactgacgttaggcctttgtatagcagaagacttcccaaaggcgtgaagcatctcaaagacttccccattttgccaggcgagatctttaagtacaaatggaccgtcacagtggaagatggaccgactaaatcagaccctcgatgccttacgcggtactattcctccttcgtgaatatggagagagatttggcaagcggactcataggaccactcctcatctgttacaaggaatctgtagaccagaggggtaaccagattatgagtgataaacgcaatgtgatcctttttagcgtcttcgacgagaaccggtcctggtacttgaccgagaatatacaaaggttcctgcccaaccccgcaggcgttcagttggaagaccctgagtttcaggccagcaatattatgcactcaatcaacggctatgtgtttgatagtctccagctttctgtttgcctccatgaagtagcctattggtacatcttgtcaattggtgctcaaacagacttcctctccgtcttcttctccggctacacctttaagcacaagatggtgtatgaggacactctcacactctttccattttctggagaaaccgtgttcatgagcatggagaatccaggcctttggatcttgggttgccacaacagtgattttcgcaatcggggaatgactgctctcctcaaagtcagcagctgtgataagaacacaggcgactattacgaagattcttacgaggacataagtgccgggttgttgtccaagaataacgccattgagcccagatcattctcccagaatcctcccgtgcttaaaaggcatcagcgcgaaatcaccagaactactcttcagtctgatcaagaggagattgactatgacgacaccataagcgtggaaatgaagaaggaggatttcgatatctatgacgaagatgagaaccagtctccgcggagctttcagaagaagacgcgacactacttcattgcagcagtcgaaaggctttgggactacggtatgtcatcatcccctcatgtgttgcgcaatagagctcagagtggaagtgttccacagttcaagaaagtcgtctttcaagagtttacagatggcagcttcacacagcctctctatcggggcgagcttaacgaacatttgggactccttggtccctatatccgagccgaagtggaggacaacattatggttacctttaggaatcaagcctctcgcccctacagcttctactcctccctcatcagttatgaggaggatcagagacaaggcgctgaaccacggaagaactttgtgaaaccgaatgagacgaagacctacttctggaaagtacagcaccacatggcccccacaaaagacgaattcgattgcaaagcatgggcgtatttttcagacgttgacttggagaaagatgtacattcaggacttattggtcctttgttggtgtgtcacactaacactctcaatccagcccatggcaggcaggtgacagtccaggaattcgctcttttctttaccatctttgatgagaccaagtcctggtacttcacggaaaacatggagcgcaattgcagagccccctgtaacatacagatggaggaccctacctttaaggaaaattatcggttccacgcaatcaacggatacattatggatacactccctggccttgtgatggctcaggaccaacgaatcaggtggtacctcctcagcatgggttctaatgagaacatacactccattcacttttcaggacatgtgttcactgtccggaagaaagaagagtataagatggccctctacaatttgtatccaggcgtgtttgagaccgttgaaatgcttccctctaaagctggcatctggagagtagagtgcttgatcggagaacatcttcacgcaggtatgagcaccttgttcctcgtgtacagcaacaaatgtcagaccccacttggcatggccagtggacacattcgcgactttcagatcacagcatctggccagtatggacaatgggccccaaagttggctcgcctccattactccggtagcataaatgcgtggtccactaaagaacctttcagctggattaaggtcgatcttcttgcccccatgatcatccacggcattaagacacagggagcgaggcagaaattctcctccctctacatctcacagttcattattatgtatagtttggacggcaagaagtggcaaacttatagaggtaacagtactggaacactcatggtgttcttcggcaacgttgatagctctggcatcaaacacaacatctttaatcctcccataatagctcggtacatcagattgcatccgacccactacagcattaggagtacactccgaatggagcttatgggttgcgacttgaattcctgttcaatgccactcggaatggagtctaaagccatctctgatgcacagataaccgccagtagctactttacgaacatgtttgctacgtggtcaccctctaaggcaaggcttcatttgcaaggccggtctaatgcctggagacctcaggtgaacaacccgaaagaatggctccaggtggactttcagaagaccatgaaagtaacaggtgtcactactcagggagttaagtccttggataccagcatgtatgtgaaggagttccttatttcctcatcacaagatggccaccagtggaccctcttctttcagaatggtaaggtcaaagtgtttcagggcaatcaagacagcttcacacccgtggtgaacagtcttgatcctccactcttgacacgataccttcgaatccatccacagtcttgggagcaccagattgcattgcgcatggaagtacttggatgcgaggctcaggacctctac

SEQ ID NO: 748 - protein, 1457 aa, synthetic construct
  REGION 1..1457: note = Variant of human B-domain deleted Factor VIII
MQIELSTCFFLCLLRFCFSATRRYYLGAVELSWDYMQSDLGELPVDARFPPRVPKSFPFNTSVVYKKTLFVEFTDHLFNIAKPRPPWMGLLGPTIQAEVYDTVVITLKNMASHPVSLHAVGVSYWKASEGAEYDDQTSQREKEDDKVFPGGSHTYVWQVLKENGPMASDPLCLTYSYLSHVDLVKDLNSGLIGALLVCREGSLAKEKTQTLHKFILLFAVFDEGKSWHSETKNSLMQDRDAASARAWPKMHTVNGYVNRSLPGLIGCHRKSVYWHVIGMGTTPEVHSIFLEGHTFLVRNHRQASLEISPITFLTAQTLLMDLGQFLLFCHISSHQHDGMEAYVKVDSCPEEPQLRMKNNEEAEDYDDDLTDSEMDVVRFDDDNSPSFIQIRSVAKKHPKTWVHYIAAEEEDWDYAPLVLAPDDRSYKSQYLNNGPQRIGRKYKKVRFMAYTDETFKTREAIQHESGILGPLLYGEVGDTLLIIFKNQASRPYNIYPHGITDVRPLYSRRLPKGVKHLKDFPILPGEIFKYKWTVTVEDGPTKSDPRCLTRYYSSFVNMERDLASGLIGPLLICYKESVDQRGNQIMSDKRNVILFSVFDENRSWYLTENIQRFLPNPAGVQLEDPEFQASNIMHSINGYVFDSLQLSVCLHEVAYWYILSIGAQTDFLSVFFSGYTFKHKMVYEDTLTLFPFSGETVFMSMENPGLWILGCHNSDFRNRGMTALLKVSSCDKNTGDYYEDSYEDISAGLLSKNNAIEPRSFSQNPPVLKRHQREITRTTLQSDQEEIDYDDTISVEMKKEDFDIYDEDENQSPRSFQKKTRHYFIAAVERLWDYGMSSSPHVLRNRAQSGSVPQFKKVVFQEFTDGSFTQPLYRGELNEHLGLLGPYIRAEVEDNIMVTFRNQASRPYSFYSSLISYEEDQRQGAEPRKNFVKPNETKTYFWKVQHHMAPTKDEFDCKAWAYFSDVDLEKDVHSGLIGPLLVCHTNTLNPAHGRQVTVQEFALFFTIFDETKSWYFTENMERNCRAPCNIQMEDPTFKENYRFHAINGYIMDTLPGLVMAQDQRIRWYLLSMGSNENIHSIHFSGHVFTVRKKEEYKMALYNLYPGVFETVEMLPSKAGIWRVECLIGEHLHAGMSTLFLVYSNKCQTPLGMASGHIRDFQITASGQYGQWAPKLARLHYSGSINAWSTKEPFSWIKVDLLAPMIIHGIKTQGARQKFSSLYISQFIIMYSLDGKKWQTYRGNSTGTLMVFFGNVDSSGIKHNIFNPPIIARYIRLHPTHYSIRSTLRMELMGCDLNSCSMPLGMESKAISDAQITASSYFTNMFATWSPSKARLHLQGRSNAWRPQVNNPKEWLQVDFQKTMKVTGVTTQGVKSLDTSMYVKEFLISSSQDGHQWTLFFQNGKVKVFQGNQDSFTPVVNSLDPPLLTRYLRIHPQSWEHQIALRMEVLGCEAQDLY

SEQ ID NO: 749 - DNA, 4371 bp, synthetic construct
  misc_feature 1..4371: note = Variant of human B-domain deleted Factor VIII
  source 1..4371: mol_type = other DNA
atgcagattgaactgtctacctgcttcttcctctgtttgctgaggttctgctttagcgccactagacggtactaccttggcgctgtggagctgtcctgggactatatgcagagtgatttgggagagcttcccgtcgacgcacgatttcctcctcgcgttccaaagtcatttcccttcaacacaagcgtggtgtacaagaagacgctcttcgtcgaattcaccgatcacctgttcaatatcgccaaacccagaccaccatggatgggtcttttggggcctaccatacaagcggaggtgtatgacacagttgttatcactctcaagaacatggcttctcatccggtaagtcttcacgcagtgggcgtgtcctactggaaagcttcagaaggagccgagtatgatgatcagacatcccagagggagaaagaagacgacaaggtatttccaggtgggtctcatacctatgtgtggcaagtgctcaaagagaatggccctatggcaagcgatccgctctgtttgacttacagctacctttcacacgttgacctcgtcaaggacctcaactccgggttgattggagccttgttggtatgcagggaaggatctcttgccaaagagaagacacagaccctccacaagtttatccttctctttgctgtgttcgatgagggcaaaagttggcatagcgaaacgaagaattccctcatgcaggatcgcgacgcagccagcgccagagcttggcccaagatgcacactgtgaacggatatgtcaataggtcacttcctggcttgattgggtgtcatcggaaaagtgtctactggcacgtgatcggaatggggacaacaccagaggtccactccatatttctcgaaggccataccttccttgttcgaaaccacagacaggcatccttggggatctctcccattacctttctcactgcccaaacgctccttatggacttgggtcagttccttctcttctgccatatcagctcacaccagcatgatggtatggaagcttatgtgaaagtcgacagttgtcctgaggagccacagttgcgcatgaagaataatgaagaagccgaggattacgacgacgatctcaccgattctgagatggacgtggtgaggtttgatgacgacaactctccctccttcattcaaatccggagcgtggcgaagaaacaccccaagacttgggtccactatatagcggcggaagaggaggattgggattacgctcctcttgtattggcaccagatgaccgctcatacaaaagccagtacctcaacaacggaccgcagagaattggccggaagtataagaaagtgcgatttatggcctatacagacgaaacctttaagacaagggaggccatccagcatgagagtgggattttgggacctcttctttacggcgaagttggtgataccctcctcatcatcttcaagaatcaagcttctcgcccctataacatttacccacacgggatcactgacgttaggcctttgtatagcagaagacttcccaaaggcgtgaagcatctcaaagacttccccattttgccaggcgagatctttaagtacaaatggaccgtcacagtggaagatggaccgactaaatcagaccctcgatgccttacgcggtactattcctccttcgtgaatatggagagagatttggcaagcggactcataggaccactcctcatctgttacaaggaatctgtagaccagaggggtaaccagattatgagtgataaacgcaatgtgatcctttttagcgtcttcgacgagaaccggtcctggtacttgaccgagaatatacaaaggttccttcccaaccccgcaggcgttcagttggaagaccctgagtttcaggccagcaatattatgcactcaatcaacggctatgtgtttgatagtctccagctttctgtttgcctccatgaagtagcctattggtacatcttgtcaattggtgctcaaacagacttcctctccgtcttcttctccggctacacctttaagcacaagatggtgtatgaggacactctcacactctttccattttctggagaaaccgtgttcatgagcatggagaatccaggcctttggatcttgggttgccacaacagtgattttcgcaatcggggaatgactgctctcctcaaagtcagcagctgtgataagaacacaggcgactattacgaagattcttacgaggacataagtgcctacttgttgtccaagaataacgccattgagcccagatcattctcccagaatcctcccgtgcttaaaaggcatcagcgcgaaatcaccagaactactcttcagtctgatcaagaggagattgactatgacgacaccataagcgtggaaatgaagaaggaggatttcgatatctatgacgaagatgagaaccagtctccgcggagctttcagaagaagacgcgacactacttcattgcagcagtcgaaaggctttgggactacggtatgtcatcatcccctcatgtgttgcgcaatagagctcagagtggaagtgttccacagttcaagaaagtcgtctttcaagagtttacagatggcagcttcacacagcctctctatcggggcgagcttaacgaacatttgggactccttggtccctatatccgagccgaagtggaggacaacattatggttacctttaggaatcaagcctctcgcccctacagcttctactcctccctcatcagttatgaggaggatcagagacaaggcgctgaaccacggaagaactttgtgaaaccgaatgagacgaagacctacttctggaaagtacagcaccacatggcccccacaaaagacgaattcgattgcaaagcatgggcgtatttttcagacgttgacttggagaaagatgtacattcaggacttattggtcctttgttggtgtgtcacactaacactctcaatccagcccatggcaggcaggtgacagtccaggaattcgctcttttctttaccatctttgatgagaccaagtcctggtacttcacggaaaacatggagcgcaattgcagagccccctgtaacatacagatggaggaccctaccttcaaggaaaattatcggttccacgcaatcaacggatatattatggatacactccctggccttgtgatggctcaggaccaacgaatcaggtggtacctcctcagcatgggttctaatgagaacatacactccattcacttttcaggacatgtgttcactgtccggaagaaagaagagtataagatggccctctacaatttgtatccaggcgtgtttgagaccgttgaaatgcttccctctaaagctggcatctggagagtagagtgcttgatcggagaacatcttcacgcaggtatgagcaccttgttcctcgtgtacagcaacaaatgtcagaccccacttggcatggccagtggacacattcgcgactttcagatcacagcatctggccagtatggacaatgggccccaaagttggctcgcctccattactccggtagcataaatgcgtggtccactaaagaacctttcagctggattaaggtcgatcttcttgcccccatgatcatccacggcattaagacacagggagcgaggcagaaattctcctccctctacatctcacagttcattattatgtatagtttggacggcaagaagtggcaaacttatagaggtaacagtactggaacactcatggtgttcttcggcaacgttgatagctctggcatcaaacacaacatctttaatcctcccataatagctcggtacatcagattgcatccgacccactacagcattaggagtacactccgaatggagcttatgggttgcgacttgaattcctgttcaatgccactcggaatggagtctaaagccatctctgatgcacagataaccgccagtagctactttacgaacatgtttgctacgtggtcaccctctaaggcaaggcttcatttgcaaggccggtctaatgcctggagacctcaggtgaacaacccgaaagaatggctccaggtggactttcagaagaccatgaaagtaacaggtgtcactactcagggagttaagtccttggataccagcatgtatgtgaaggagttccttatttcctcatcacaagatggccaccagtggaccctcttctttcagaatggtaaggtcaaagtgtttcagggcaatcaagacagcttcacacccgtggtgaacagtcttgatcctccactcttgacacgataccttcgaatccatccacagtcttgggagcaccagattgcattgcgcatggaagtacttggatgcgaggctcaggacctctac

SEQ ID NO: 750 - protein, 1457 aa, synthetic construct
  REGION 1..1457: note = Variant of human B-domain deleted Factor VIII
MQIELSTCFFLCLLRFCFSATRRYYLGAVELSWDYMQSDLGELPVDARFPPRVPKSFPFNTSVVYKKTLFVEFTDHLFNIAKPRPPWMGLLGPTIQAEVYDTVVITLKNMASHPVSLHAVGVSYWKASEGAEYDDQTSQREKEDDKVFPGGSHTYVWQVLKENGPMASDPLCLTYSYLSHVDLVKDLNSGLIGALLVCREGSLAKEKTQTLHKFILLFAVFDEGKSWHSETKNSLMQDRDAASARAWPKMHTVNGYVNRSLPGLIGCHRKSVYWHVIGMGTTPEVHSIFLEGHTFLVRNHRQASLGISPITFLTAQTLLMDLGQFLLFCHISSHQHDGMEAYVKVDSCPEEPQLRMKNNEEAEDYDDDLTDSEMDVVRFDDDNSPSFIQIRSVAKKHPKTWVHYIAAEEEDWDYAPLVLAPDDRSYKSQYLNNGPQRIGRKYKKVRFMAYTDETFKTREAIQHESGILGPLLYGEVGDTLLIIFKNQASRPYNIYPHGITDVRPLYSRRLPKGVKHLKDFPILPGEIFKYKWTVTVEDGPTKSDPRCLTRYYSSFVNMERDLASGLIGPLLICYKESVDQRGNQIMSDKRNVILFSVFDENRSWYLTENIQRFLPNPAGVQLEDPEFQASNIMHSINGYVFDSLQLSVCLHEVAYWYILSIGAQTDFLSVFFSGYTFKHKMVYEDTLTLFPFSGETVFMSMENPGLWILGCHNSDFRNRGMTALLKVSSCDKNTGDYYEDSYEDISAYLLSKNNAIEPRSFSQNPPVLKRHQREITRTTLQSDQEEIDYDDTISVEMKKEDFDIYDEDENQSPRSFQKKTRHYFIAAVERLWDYGMSSSPHVLRNRAQSGSVPQFKKVVFQEFTDGSFTQPLYRGELNEHLGLLGPYIRAEVEDNIMVTFRNQASRPYSFYSSLISYEEDQRQGAEPRKNFVKPNETKTYFWKVQHHMAPTKDEFDCKAWAYFSDVDLEKDVHSGLIGPLLVCHTNTLNPAHGRQVTVQEFALFFTIFDETKSWYFTENMERNCRAPCNIQMEDPTFKENYRFHAINGYIMDTLPGLVMAQDQRIRWYLLSMGSNENIHSIHFSGHVFTVRKKEEYKMALYNLYPGVFETVEMLPSKAGIWRVECLIGEHLHAGMSTLFLVYSNKCQTPLGMASGHIRDFQITASGQYGQWAPKLARLHYSGSINAWSTKEPFSWIKVDLLAPMIIHGIKTQGARQKFSSLYISQFIIMYSLDGKKWQTYRGNSTGTLMVFFGNVDSSGIKHNIFNPPIIARYIRLHPTHYSIRSTLRMELMGCDLNSCSMPLGMESKAISDAQITASSYFTNMFATWSPSKARLHLQGRSNAWRPQVNNPKEWLQVDFQKTMKVTGVTTQGVKSLDTSMYVKEFLISSSQDGHQWTLFFQNGKVKVFQGNQDSFTPVVNSLDPPLLTRYLRIHPQSWEHQIALRMEVLGCEAQDLY

SEQ ID NO: 751 - DNA, 4371 bp, synthetic construct
  misc_feature 1..4371: note = Variant of human B-domain deleted Factor VIII
  source 1..4371: mol_type = other DNA
atgcagattgaactgtctacctgcttcttcctctgtttgctgaggttctgctttagcgccactagacggtactaccttggcgctgtggagctgtcctgggactatatgcagagtgatttgggagagcttcccgtcgacgcacgatttcctcctcgcgttccaaagtcatttcccttcaacacaagcgtggtgtacaagaagacgctcttcgtcgaattcaccgatcacctgttcaatatcgccaaacccagaccaccatggatgggtcttttggggcctaccatacaagcggaggtgtatgacacagttgttatcactctcaagaacatggcttctcatccggtaagtcttcacgcagtgggcgtgtcctactggaaagcttcagaaggagccgagtatgatgatcagacatcccagagggagaaagaagacgacaaggtatttccaggtgggtctcatacctatgtgtggcaagtgctcaaagagaatggccctatggcaagcgatccgctctgtttgacttacagctacctttcacacgttgacctcgtcaaggacctcaactccgggttgattggagccttgttggtatgcagggaaggatctcttgccaaagagaagacacagaccctccacaagtttatccttctctttgctgtgttcgatgagggcaaaagttggcatagcgaaacgaagaattccctcatgcaggatcgcgacgcagccagcgccagagcttggcccaagatgcacactgtgaacggatatgtcaataggtcacttcctggcttgattgggtgtcatcggaaaagtgtctactggcacgtgatcggaatggggacaacaccagaggtccactccatatttctcgaaggccataccttccttgttcgaaaccacagacaggcatccttggggatctctcccattacctttctcactgcccaaacgctccttatggacttgggtcagttccttctcttctgccatatcagctcacaccagcatgatggtatggaagcttatgtgaaagtcgacagttgtcctgaggagccacagttgcgcatgaagaataatgaagaagccgaggattacgacgacgatctcaccgattctgagatggacgtggtgaggtttgatgacgacaactctccctcccgcattcaagcacggagcgtggcgaagaaacaccccaagacttgggtccactatatagcggcggaagaggaggattgggattacgctcctcttgtattggcaccagatgaccgctcatacaaaagccagtacctcaacaacggaccgcagagaattggccggaagtataagaaagtgcgatttatggcctatacagacgaaacctttaagacaagggaggccatccagcatgagagtgggattttgggacctcttctttacggcgaagttggtgataccctcctcatcatcttcaagaatcaagcttctcgcccctataacatttacccacacgggatcactgacgttaggcctttgtatagcagaagacttcccaaaggcgtgaagcatctcaaagacttccccattttgccaggcgagatctttaagtacaaatggaccgtcacagtggaagatggaccgactaaatcagaccctcgatgccttacgcggtactattcctccttcgtgaatatggagagagatttggcaagcggactcataggaccactcctcatctgttacaaggaatctgtagaccagaggggtaaccagattatgagtgataaacgcaatgtgatcctttttagcgtcttcgacgagaaccggtcctggtacttgaccgagaatatacaaaggttccttcccaaccccgcaggcgttcagttggaagaccctgagtttcaggccagcaatattatgcactcaatcaacggctatgtgtttgatagtctccagctttctgtttgcctccatgaagtagcctattggtacatcttgtcaattggtgctcaaacagacttcctctccgtcttcttctccggctacacctttaagcacaagatggtgtatgaggacactctcacactctttccattttctggagaaaccgtgttcatgagcatggagaatccaggcctttggatcttgggttgccacaacagtgattttcgcaatcggggaatgactgctctcctcaaagtcagcagctgtgataagaacacaggcgactattacgaagattcttacgaggacataagtgcctactttttgtccaagaataacgccattgagcccagatcattctcccagaatcctcccgtgcttaaaaggcatcagcgcgaaatcaccagaactactcttcagtctgatcaagaggagattgactatgacgacaccataagcgtggaaatgaagaaggaggatttcgatatctatgacgaagatgagaaccagtctccgcggagctttcagaagaagacgcgacactacttcattgcagcagtcgaaaggctttgggactacggtatgtcatcatcccctcatgtgttgcgcaatagagctcagagtggaagtgttccacagttcaagaaagtcgtctttcaagagtttacagatggcagcttcacacagcctctctatcggggcgagcttaacgaacatttgggactccttggtccctatatccgagccgaagtggaggacaacattatggttacctttaggaatcaagcctctcgcccctacagcttctactcctccctcatcagttatgaggaggatcagagacaaggcgctgaaccacggaagaactttgtgaaaccgaatgagacgaagacctacttctggaaagtacagcaccacatggcccccacaaaagacgaattcgattgcaaagcatgggcgtatttttcagacgttgacttggagaaagatgtacattcaggacttattggtcctttgttggtgtgtcacactaacactctcaatccagcccatggcaggcaggtgacagtccaggaattcgctcttttctttaccatctttgatgagaccaagtcctggtacttcacggaaaacatggagcgcaattgcagagccccctgtaacatacagatggaggaccctaccttcaaggaaaattatcggttccacgcaatcaacggatacattatggatacactccctggccttgtgatggctcaggaccaacgaatcaggtggtacctcctcagcatgggttctaatgagaacatacactccattcacttttcaggacatgtgttcactgtccggaagaaagaagagtataagatggccctctacaatttgtatccaggcgtgtttgagaccgttgaaatgcttccctctaaagctggcatctggagagtagagtgcttgatcggagaacatcttcacgcaggtatgagcaccttgttcctcgtgtacagcaacaaatgtcagaccccacttggcatggccagtggacacattcgcgactttcagatcacagcatctggccagtatggacaatgggccccaaagttggctcgcctccattactccggtagcataaatgcgtggtccactaaagaacctttcagctggattaaggtcgatcttcttgcccccatgatcatccacggcattaagacacagggagcgaggcagaaattctccgatctctacatctcacagttcattattatgtatagtttggacggcaagaagtggcaaacttatagaggtaacagtactggaacactcatggtgttcttcggcaacgttgatagctctggcatcaaacacaacatctttaatcctcccataatagctcggtacatcagattgcatccgacccactacagcattaggagtacactccgaatggagcttatgggttgcgacttgaattcctgttcaatgccactcggaatggagtctaaagccatctctgatgcacagataaccgccagtagctactttacgaacatgtttgctacgtggtcaccctctaaggcaaggcttcatttgcaaggccggtctaatgcctggagacctcaggtgaacaacccgaaagaatggctccaggtggactttcagaagaccatgaaagtaacaggtgtcactactcagggagttaagtccttggataccagcatgtatgtgaaggagttccttatttcctcatcacaagatggccaccagtggaccctcttctttcagaatggtaaggtcaaagtgtttcagggcaatcaagacagcttcacacccgtggtgaacagtcttgatcctccactcttgacacgataccttcgaatccatccacagtcttgggagcaccagattgcattgcgcatggaagtacttggatgcgaggctcaggacctctac

SEQ ID NO: 752 - protein, 1457 aa, synthetic construct
  REGION 1..1457: note = Variant of human B-domain deleted Factor VIII
MQIELSTCFFLCLLRFCFSATRRYYLGAVELSWDYMQSDLGELPVDARFPPRVPKSFPFNTSVVYKKTLFVEFTDHLFNIAKPRPPWMGLLGPTIQAEVYDTVVITLKNMASHPVSLHAVGVSYWKASEGAEYDDQTSQREKEDDKVFPGGSHTYVWQVLKENGPMASDPLCLTYSYLSHVDLVKDLNSGLIGALLVCREGSLAKEKTQTLHKFILLFAVFDEGKSWHSETKNSLMQDRDAASARAWPKMHTVNGYVNRSLPGLIGCHRKSVYWHVIGMGTTPEVHSIFLEGHTFLVRNHRQASLGISPITFLTAQTLLMDLGQFLLFCHISSHQHDGMEAYVKVDSCPEEPQLRMKNNEEAEDYDDDLTDSEMDVVRFDDDNSPSRIQARSVAKKHPKTWVHYIAAEEEDWDYAPLVLAPDDRSYKSQYLNNGPQRIGRKYKKVRFMAYTDETFKTREAIQHESGILGPLLYGEVGDTLLIIFKNQASRPYNIYPHGITDVRPLYSRRLPKGVKHLKDFPILPGEIFKYKWTVTVEDGPTKSDPRCLTRYYSSFVNMERDLASGLIGPLLICYKESVDQRGNQIMSDKRNVILFSVFDENRSWYLTENIQRFLPNPAGVQLEDPEFQASNIMHSINGYVFDSLQLSVCLHEVAYWYILSIGAQTDFLSVFFSGYTFKHKMVYEDTLTLFPFSGETVFMSMENPGLWILGCHNSDFRNRGMTALLKVSSCDKNTGDYYEDSYEDISAYFLSKNNAIEPRSFSQNPPVLKRHQREITRTTLQSDQEEIDYDDTISVEMKKEDFDIYDEDENQSPRSFQKKTRHYFIAAVERLWDYGMSSSPHVLRNRAQSGSVPQFKKVVFQEFTDGSFTQPLYRGELNEHLGLLGPYIRAEVEDNIMVTFRNQASRPYSFYSSLISYEEDQRQGAEPRKNFVKPNETKTYFWKVQHHMAPTKDEFDCKAWAYFSDVDLEKDVHSGLIGPLLVCHTNTLNPAHGRQVTVQEFALFFTIFDETKSWYFTENMERNCRAPCNIQMEDPTFKENYRFHAINGYIMDTLPGLVMAQDQRIRWYLLSMGSNENIHSIHFSGHVFTVRKKEEYKMALYNLYPGVFETVEMLPSKAGIWRVECLIGEHLHAGMSTLFLVYSNKCQTPLGMASGHIRDFQITASGQYGQWAPKLARLHYSGSINAWSTKEPFSWIKVDLLAPMIIHGIKTQGARQKFSDLYISQFIIMYSLDGKKWQTYRGNSTGTLMVFFGNVDSSGIKHNIFNPPIIARYIRLHPTHYSIRSTLRMELMGCDLNSCSMPLGMESKAISDAQITASSYFTNMFATWSPSKARLHLQGRSNAWRPQVNNPKEWLQVDFQKTMKVTGVTTQGVKSLDTSMYVKEFLISSSQDGHQWTLFFQNGKVKVFQGNQDSFTPVVNSLDPPLLTRYLRIHPQSWEHQIALRMEVLGCEAQDLY

SEQ ID NO: 753 - DNA, 4371 bp, synthetic construct
  misc_feature 1..4371: note = Variant of human B-domain deleted Factor VIII
  source 1..4371: mol_type = other DNA
atgcagattgaactgtctacctgcttcttcctctgtttgctgaggttctgctttagcgccactagacggtactaccttggcgctgtggagctgtcctgggactatatgcagagtgatttgggagagcttcccgtcgacgcacgatttcctcctcgcgttccaaagtcatttcccttcaacacaagcgtggtgtacaagaagacgctcttcgtcgaattcaccgatcacctgttcaatatcgccaaacccagaccaccatggatgggtcttttggggcctaccatacaagcggaggtgtatgacacagttgttatcactctcaagaacatggcttctcatccggtaagtcttcacgcagtgggcgtgtcctactggaaagcttcagaaggagccgagtatgatgatcagacatcccagagggagaaagaagacgacaaggtatttccaggtgggtctcatacctatgtgtggcaagtgctcaaagagaatggccctatggcaagcgatccgctctgtttgacttacagctacctttcacacgttgacctcgtcaaggacctcaactccgggttgattggagccttgttggtatgcagggaaggatctcttgccaaagagaagacacagaccctccacaagtttatccttctctttgctgtgttcgatgagggcaaaagttggcatagcgaaacgaagaattccctcatgcaggatcgcgacgcagccagcgccagagcttggcccaagatgcacactgtgaacggatatgtcaataggtcacttcctggcttgattgggtgtcatcggaaaagtgtctactggcacgtgatcggaatggggacaacaccagaggtccactccatatttctcgaaggccataccttccttgttcgaaaccacagacaggcatccttggagatctctcccattacctttctcactgcccaaacgctccttatggacttgggtcagttccttctcttctgccatatcagctcacaccagcatgatggtatggaagcttatgtgaaagtcgacagttgtcctgaggagccacagttgcgcatgaagaataatgaagaagccgaggattacgacgacgatctcaccgattctgagatggacgtggtgaggtttgatgacgacaactctccctccttcattcaagcacggagcgtggcgaagaaacaccccaagacttgggtccactatatagcggcggaagaggaggattgggattacgctcctcttgtattggcaccagatgaccgctcatacaaaagccagtacctcaacaacggaccgcagagaattggccggaagtataagaaagtgcgatttatggcctatacagacgaaacctttaagacaagggaggccatccagcatgagagtgggattttgggacctcttctttacggcgaagttggtgataccctcctcatcatcttcaagaatcaagcttctcgcccctataacatttacccacacgggatcactgacgttaggcctttgtatagcagaagacttcccaaaggcgtgaagcatctcaaagacttccccattttgccaggcgagatctttaagtacaaatggaccgtcacagtggaagatggaccgactaaatcagaccctcgatgccttacgcggtactattcctccttcgtgaatatggagagagatttggcaagcggactcataggaccactcctcatctgttacaaggaatctgtagaccagaggggtaaccagattatgagtgataaacgcaatgtgatcctttttagcgtcttcgacgagaaccggtcctggtacttgaccgagaatatacaaaggttccttcccaaccccgcaggcgttcagttggaagaccctgagtttcaggccagcaatattatgcactcaatcaacggctatgtgtttgatagtctccagctttctgtttgcctccatgaagtagcctattggtacatcttgtcaattggtgctcaaacagacttcctctccgtcttcttctccggctacacctttaagcacaagatggtgtatgaggacactctcacactctttccattttctggagaaaccgtgttcatgagcatggagaatccaggcctttggatcttgggttgccacaacagtgattttcgcaatcggggaatgactgctctcctcaaagtcagcagctgtgataagaacacaggcgactattacgaagattcttacgaggacataagtgcctacttgttgtccaagaataacgccattgagcccagatcattctcccagaatcctcccgtgcttaaaaggcatcagcgcgaaatcaccagaactactcttcagtctgatcaagaggagattgactatgacgacaccataagcgtggaaatgaagaaggaggatttcgatatctatgacgaagatgagaaccagtctccgcggagctttcagaagaagacgcgacactacttcattgcagcagtcgaaaggctttgggactacggtatgtcatcatcccctcatgtgttgcgcaatagagctcagagtggaagtgttccacagttcaagaaagtcgtctttcaagagtttacagatggcagcttcacacagcctctctatcggggcgagcttaacgaacatttgggactccttggtccctatatccgagccgaagtggaggacaacattatggttacctttaggaatcaagcctctcgcccctacagcttctactcctccctcatcagttatgaggaggatcagagacaaggcgctgaaccacggaagaactttgtgaaaccgaatgagacgaagacctacttctggaaagtacagcaccacatggcccccacaaaagacgaattcgattgcaaagcatgggcgtatttttcagacgttgacttggagaaagatgtacattcaggacttattggtcctttgttggtgtgtcacactaacactctcaatccagcccatggcaggcaggtgacagtccaggaattcgctcttttctttaccatctttgatgagaccaagtcctggtacttcacggaaaacatggagcgcaattgcagagccccctgtaacatacagatggaggaccctacctttaaggaaaattatcggttccacgcaatcaacggatacattatggatacactccctggccttgtgatggctcaggaccaacgaatcaggtggtacctcctcagcatgggttctaatgagaacatacactccattcacttttcaggacatgtgttcactgtccggaagaaagaagagtataagatggccctctacaatttgtatccaggcgtgtttgagaccgttgaaatgcttccctctaaagctggcatctggagagtagagtgcttgatcggagaacatcttcacgcaggtatgagcaccttgttcctcgtgtacagcaacaaatgtcagaccccacttggcatggccagtggacacattcgcgactttcagatcacagcatctggccagtatggacaatgggccccaaagttggctcgcctccattactccggtagcataaatgcgtggtccactaaagaacctttcagctggattaaggtcgatcttcttgcccccatgatcatccacggcattaagacacagggagcgaggcagaaattctcctccctctacatctcacagttcattattatgtatagtttggacggcaagaagtggcaaacttatagaggtaacagtactggaacactcatggtgttcttcggcaacgttgatagctctggcatcaaacacaacatctttaatcctcccataatagctcggtacatcagattgcatccgacccactacagcattaggagtacactccgaatggagcttatgggttgcgacttgaattcctgttcaatgccactcggaatggagtctaaagccatctctgatgcacagataaccgccagtagctactttacgaacatgtttgctacgtggtcaccctctaaggcaaggcttcatttgcaaggccggtctaatgcctggagacctcaggtgaacaacccgaaagaatggctccaggtggactttcagaagaccatgaaagtaacaggtgtcactactcagggagttaagtccttggataccagcatgtatgtgaaggagttccttatttcctcatcacaagatggccaccagtggaccctcttctttcagaatggtaaggtcaaagtgtttcagggcaatcaagacagcttcacacccgtggtgaacagtcttgatcctccactcttgacacgataccttcgaatccatccacagtcttgggagcaccagattgcattgcgcatggaagtacttggatgcgaggctcaggacctctac

SEQ ID NO: 754 - protein, 1457 aa, synthetic construct
  REGION 1..1457: note = Variant of human B-domain deleted Factor VIII
MQIELSTCFFLCLLRFCFSATRRYYLGAVELSWDYMQSDLGELPVDARFPPRVPKSFPFNTSVVYKKTLFVEFTDHLFNIAKPRPPWMGLLGPTIQAEVYDTVVITLKNMASHPVSLHAVGVSYWKASEGAEYDDQTSQREKEDDKVFPGGSHTYVWQVLKENGPMASDPLCLTYSYLSHVDLVKDLNSGLIGALLVCREGSLAKEKTQTLHKFILLFAVFDEGKSWHSETKNSLMQDRDAASARAWPKMHTVNGYVNRSLPGLIGCHRKSVYWHVIGMGTTPEVHSIFLEGHTFLVRNHRQASLEISPITFLTAQTLLMDLGQFLLFCHISSHQHDGMEAYVKVDSCPEEPQLRMKNNEEAEDYDDDLTDSEMDVVRFDDDNSPSFIQARSVAKKHPKTWVHYIAAEEEDWDYAPLVLAPDDRSYKSQYLNNGPQRIGRKYKKVRFMAYTDETFKTREAIQHESGILGPLLYGEVGDTLLIIFKNQASRPYNIYPHGITDVRPLYSRRLPKGVKHLKDFPILPGEIFKYKWTVTVEDGPTKSDPRCLTRYYSSFVNMERDLASGLIGPLLICYKESVDQRGNQIMSDKRNVILFSVFDENRSWYLTENIQRFLPNPAGVQLEDPEFQASNIMHSINGYVFDSLQLSVCLHEVAYWYILSIGAQTDFLSVFFSGYTFKHKMVYEDTLTLFPFSGETVFMSMENPGLWILGCHNSDFRNRGMTALLKVSSCDKNTGDYYEDSYEDISAYLLSKNNAIEPRSFSQNPPVLKRHQREITRTTLQSDQEEIDYDDTISVEMKKEDFDIYDEDENQSPRSFQKKTRHYFIAAVERLWDYGMSSSPHVLRNRAQSGSVPQFKKVVFQEFTDGSFTQPLYRGELNEHLGLLGPYIRAEVEDNIMVTFRNQASRPYSFYSSLISYEEDQRQGAEPRKNFVKPNETKTYFWKVQHHMAPTKDEFDCKAWAYFSDVDLEKDVHSGLIGPLLVCHTNTLNPAHGRQVTVQEFALFFTIFDETKSWYFTENMERNCRAPCNIQMEDPTFKENYRFHAINGYIMDTLPGLVMAQDQRIRWYLLSMGSNENIHSIHFSGHVFTVRKKEEYKMALYNLYPGVFETVEMLPSKAGIWRVECLIGEHLHAGMSTLFLVYSNKCQTPLGMASGHIRDFQITASGQYGQWAPKLARLHYSGSINAWSTKEPFSWIKVDLLAPMIIHGIKTQGARQKFSSLYISQFIIMYSLDGKKWQTYRGNSTGTLMVFFGNVDSSGIKHNIFNPPIIARYIRLHPTHYSIRSTLRMELMGCDLNSCSMPLGMESKAISDAQITASSYFTNMFATWSPSKARLHLQGRSNAWRPQVNNPKEWLQVDFQKTMKVTGVTTQGVKSLDTSMYVKEFLISSSQDGHQWTLFFQNGKVKVFQGNQDSFTPVVNSLDPPLLTRYLRIHPQSWEHQIALRMEVLGCEAQDLY

SEQ ID NO: 755 - DNA, 4371 bp, synthetic construct
  misc_feature 1..4371: note = Variant of human B-domain deleted Factor VIII
  source 1..4371: mol_type = other DNA
atgcagattgaactgtctacctgcttcttcctctgtttgctgaggttctgctttagcgccactagacggtactaccttggcgctgtggagctgtcctgggactatatgcagagtgatttgggagagcttcccgtcgacgcacgatttcctcctcgcgttccaaagtcatttcccttcaacacaagcgtggtgtacaagaagacgctcttcgtcgaattcaccgatcacctgttcaatatcgccaaacccagaccaccatggatgggtcttttggggcctaccatacaagcggaggtgtatgacacagttgttatcactctcaagaacatggcttctcatccggtaagtcttcacgcagtgggcgtgtcctactggaaagcttcagaaggagccgagtatgatgatcagacatcccagagggagaaagaagacgacaaggtatttccaggtgggtctcatacctatgtgtggcaagtgctcaaagagaatggccctatggcaagcgatccgctctgtttgacttacagctacctttcacacgttgacctcgtcaaggacctcaactccgggttgattggagccttgttggtatgcagggaaggatctcttgccaaagagaagacacagaccctccacaagtttatccttctctttgctgtgttcgatgagggcaaaagttggcatagcgaaacgaagaattccctcatgcaggatcgcgacgcagccagcgccagagcttggcccaagatgcacactgtgaacggatatgtcaataggtcacttcctggcttgattgggtgtcatcggaaaagtgtctactggcacgtgatcggaatggggacaacaccagaggtccactccatatttctcgaaggccataccttccttgttcgaaaccacagacaggcatccttggggatctctcccattacctttctcactgcccaaacgctccttatggacttgggtcagttccttctcttctgccatatcagctcacaccagcatgatggtatggaagcttatgtgaaagtcgacagttgtcctgaggagccacagttgcgcatgaagaataatgaagaagccgaggattacgacgacgatctcaccgattctgagatggacgtggtgaggtttgatgacgacaactctccctccttcattcaagcacggagcgtggcgaagaaacaccccaagacttgggtccactatatagcggcggaagaggaggattgggattacgctcctcttgtattggcaccagatgaccgctcatacaaaagccagtacctcaacaacggaccgcagagaattggccggaagtataagaaagtgcgatttatggcctatacagacgaaacctttaagacaagggaggccatccagcatgagagtgggattttgggacctcttctttacggcgaagttggtgataccctcctcatcatcttcaagaatcaagcttctcgcccctataacatttacccacacgggatcactgacgttaggcctttgtatagcagaagacttcccaaaggcgtgaagcatctcaaagacttccccattttgccaggcgagatctttaagtacaaatggaccgtcacagtggaagatggaccgactaaatcagaccctcgatgccttacgcggtactattcctccttcgtgaatatggagagagatttggcaagcggactcataggaccactcctcatctgttacaaggaatctgtagaccagaggggtaaccagattatgagtgataaacgcaatgtgatcctttttagcgtcttcgacgagaaccggtcctggtacttgaccgagaatatacaaaggttccttcccaaccccgcaggcgttcagttggaagaccctgagtttcaggccagcaatattatgcactcaatcaacggctatgtgtttgatagtctccagctttctgtttgcctccatgaagtagcctattggtacatcttgtcaattggtgctcaaacagacttcctctccgtcttcttctccggctacacctttaagcacaagatggtgtatgaggacactctcacactctttccattttctggagaaaccgtgttcatgagcatggagaatccaggcctttggatcttgggttgccacaacagtgattttcgcaatcggggaatgactgctctcctcaaagtcagcagctgtgataagaacacaggcgactattacgaagattcttacgaggacataagtgcctacttgttgtccaagaataacgccattgagcccagatcattctcccagaatcctcccgtgcttaaaaggcatcagcgcgaaatcaccagaactactcttcagtctgatcaagaggagattgactatgacgacaccataagcgtggaaatgaagaaggaggatttcgatatctatgacgaagatgagaaccagtctccgcggagctttcagaagaagacgcgacactacttcattgcagcagtcgaaaggctttgggactacggtatgtcatcatcccctcatgtgttgcgcaatagagctcagagtggaagtgttccacagttcaagaaagtcgtctttcaagagtttacagatggcagcttcacacagcctctctatcggggcgagcttaacgaacatttgggactccttggtccctatatccgagccgaagtggaggacaacattatggttacctttaggaatcaagcctctcgcccctacagcttctactcctccctcatcagttatgaggaggatcagagacaaggcgctgaaccacggaagaactttgtgaaaccgaatgagacgaagacctacttctggaaagtacagcaccacatggcccccacaaaagacgaattcgattgcaaagcatgggcgtatttttcagacgttgacttggagaaagatgtacattcaggacttattggtcctttgttggtgtgtcacactaacactctcaatccagcccatggcaggcaggtgacagtccaggaattcgctcttttctttaccatctttgatgagaccaagtcctggtacttcacggaaaacatggagcgcaattgcagagccccctgtaacatacagatggaggaccctaccaacaaggaaaattatcggttccacgcaatcaacggatacattatggatacactccctggccttgtgatggctcaggaccaacgaatcaggtggtacctcctcagcatgggttctaatgagaacatacactccattcacttttcaggacatgtgttcactgtccggaagaaagaagagtataagatggccctctacaatttgtatccaggcgtgtttgagaccgttgaaatgcttccctctaaagctggcatctggagagtagagtgcttgatcggagaacatcttcacgcaggtatgagcaccttgttcctcgtgtacagcaacaaatgtcagaccccacttggcatggccagtggacacattcgcgactttcagatcacagcatctggccagtatggacaatgggccccaaagttggctcgcctccattactccggtagcataaatgcgtggtccactaaagaacctttcagctggattaaggtcgatcttcttgcccccatgatcatccacggcattaagacacagggagcgaggcagaaattctcctcgctctacatctcacagttcattattatgtatagtttggacggcaagaagtggcaaacttatagaggtaacagtactggaacactcatggtgttcttcggcaacgttgatagctctggcatcaaacacaacatctttaatcctcccataatagctcggtacatcagattgcatccgacccactacagcattaggagtacactccgaatggagcttatgggttgcgacttgaattcctgttcaatgccactcggaatggagtctaaagccatctctgatgcacagataaccgccagtagctactttacgaacatgtttgctacgtggtcaccctctaaggcaaggcttcatttgcaaggccggtctaatgcctggagacctcaggtgaacaacccgaaagaatggctccaggtggactttcagaagaccatgaaagtaacaggtgtcactactcagggagttaagtccttggataccagcatgtatgtgaaggagttccttatttcctcatcacaagatggccaccagtggaccctcttctttcagaatggtaaggtcaaagtgtttcagggcaatcaagacagcttcacacccgtggtgaacagtcttgatcctccactcttgacacgataccttcgaatccatccacagtcttgggagcaccagattgcattgcgcatggaagtacttggatgcgaggctcaggacctctac

SEQ ID NO: 756 - protein, 1457 aa, synthetic construct
  REGION 1..1457: note = Variant of human B-domain deleted Factor VIII
MQIELSTCFFLCLLRFCFSATRRYYLGAVELSWDYMQSDLGELPVDARFPPRVPKSFPFNTSVVYKKTLFVEFTDHLFNIAKPRPPWMGLLGPTIQAEVYDTVVITLKNMASHPVSLHAVGVSYWKASEGAEYDDQTSQREKEDDKVFPGGSHTYVWQVLKENGPMASDPLCLTYSYLSHVDLVKDLNSGLIGALLVCREGSLAKEKTQTLHKFILLFAVFDEGKSWHSETKNSLMQDRDAASARAWPKMHTVNGYVNRSLPGLIGCHRKSVYWHVIGMGTTPEVHSIFLEGHTFLVRNHRQASLGISPITFLTAQTLLMDLGQFLLFCHISSHQHDGMEAYVKVDSCPEEPQLRMKNNEEAEDYDDDLTDSEMDVVRFDDDNSPSFIQARSVAKKHPKTWVHYIAAEEEDWDYAPLVLAPDDRSYKSQYLNNGPQRIGRKYKKVRFMAYTDETFKTREAIQHESGILGPLLYGEVGDTLLIIFKNQASRPYNIYPHGITDVRPLYSRRLPKGVKHLKDFPILPGEIFKYKWTVTVEDGPTKSDPRCLTRYYSSFVNMERDLASGLIGPLLICYKESVDQRGNQIMSDKRNVILFSVFDENRSWYLTENIQRFLPNPAGVQLEDPEFQASNIMHSINGYVFDSLQLSVCLHEVAYWYILSIGAQTDFLSVFFSGYTFKHKMVYEDTLTLFPFSGETVFMSMENPGLWILGCHNSDFRNRGMTALLKVSSCDKNTGDYYEDSYEDISAYLLSKNNAIEPRSFSQNPPVLKRHQREITRTTLQSDQEEIDYDDTISVEMKKEDFDIYDEDENQSPRSFQKKTRHYFIAAVERLWDYGMSSSPHVLRNRAQSGSVPQFKKVVFQEFTDGSFTQPLYRGELNEHLGLLGPYIRAEVEDNIMVTFRNQASRPYSFYSSLISYEEDQRQGAEPRKNFVKPNETKTYFWKVQHHMAPTKDEFDCKAWAYFSDVDLEKDVHSGLIGPLLVCHTNTLNPAHGRQVTVQEFALFFTIFDETKSWYFTENMERNCRAPCNIQMEDPTNKENYRFHAINGYIMDTLPGLVMAQDQRIRWYLLSMGSNENIHSIHFSGHVFTVRKKEEYKMALYNLYPGVFETVEMLPSKAGIWRVECLIGEHLHAGMSTLFLVYSNKCQTPLGMASGHIRDFQITASGQYGQWAPKLARLHYSGSINAWSTKEPFSWIKVDLLAPMIIHGIKTQGARQKFSSLYISQFIIMYSLDGKKWQTYRGNSTGTLMVFFGNVDSSGIKHNIFNPPIIARYIRLHPTHYSIRSTLRMELMGCDLNSCSMPLGMESKAISDAQITASSYFTNMFATWSPSKARLHLQGRSNAWRPQVNNPKEWLQVDFQKTMKVTGVTTQGVKSLDTSMYVKEFLISSSQDGHQWTLFFQNGKVKVFQGNQDSFTPVVNSLDPPLLTRYLRIHPQSWEHQIALRMEVLGCEAQDLY

SEQ ID NO: 757 - DNA, 4371 bp, synthetic construct
  misc_feature 1..4371: note = Variant of human B-domain deleted Factor VIII
  source 1..4371: mol_type = other DNA
atgcagattgaactgtctacctgcttcttcctctgtttgctgaggttctgctttagcgccactagacggtactaccttggcgctgtggagctgtcctgggactatatgcagagtgatttgggagagcttcccgtcgacgcacgatttcctcctcgcgttccaaagtcatttcccttcaacacaagcgtggtgtacaagaagacgctcttcgtcgaattcaccgatcacctgttcaatatcgccaaacccagaccaccatggatgggtcttttggggcctaccatacaagcggaggtgtatgacacagttgttatcactctcaagaacatggcttctcatccggtaagtcttcacgcagtgggcgtgtcctactggaaagcttcagaaggagccgagtatgatgatcagacatcccagagggagaaagaagacgacaaggtatttccaggtgggtctcatacctatgtgtggcaagtgctcaaagagaatggccctatggcaagcgatccgctctgtttgacttacagctacctttcacacgttgacctcgtcaaggacctcaactccgggttgattggagccttgttggtatgcagggaaggatctcttgccaaagagaagacacagaccctccacaagtttatccttctctttgctgtgttcgatgagggcaaaagttggcatagcgaaacgaagaattccctcatgcaggatcgcgacgcagccagcgccagagcttggcccaagatgcacactgtgaacggatatgtcaataggtcacttcctggcttgattgggtgtcatcggaaaagtgtctactggcacgtgatcggaatggggacaacaccagaggtccactccatatttctcgaaggccataccttccttgttcgaaaccacagacaggcatccttggggatctctcccattacctttctcactgcccaaacgctccttatggacttgggtcagttccttctcttctgccatatcagctcacaccagcatgatggtatggaagcttatgtgaaagtcgacagttgtcctgaggagccacagttgcgcatgaagaataatgaagaagccgaggattacgacgacgatctcaccgattctgagatggacgtggtgaggtttgatgacgacaactctccctccttcattcaaatccggagcgtggcgaagaaacaccccaagacttgggtccactatatagcggcggaagaggaggattgggattacgctcctcttgtattggcaccagatgaccgctcatacaaaagccagtacctcaacaacggaccgcagagaattggccggaagtataagaaagtgcgatttatggcctatacagacgaaacctttaagacaagggaggccatccagcatgagagtgggattttgggacctcttctttacggcgaagttggtgataccctcctcatcatcttcaagaatcaagcttctcgcccctataacatttacccacacgggatcactgacgttaggcctttgtatagcagaagacttcccaaaggcgtgaagcatctcaaagacttccccattttgccaggcgagatctttaagtacaaatggaccgtcacagtggaagatggaccgactaaatcagaccctcgatgccttacgcggtactattcctccttcgtgaatatggagagagatttggcaagcggactcataggaccactcctcatctgttacaaggaatctgtagaccagaggggtaaccagattatgagtgataaacgcaatgtgatcctttttagcgtcttcgacgagaaccggtcctggtacttgaccgagaatatacaaagtttccttcccaaccccgcaggcgttcagttggaagaccctgagtttcaggccagcaatattatgcactcaatcaacggctatgtgtttgatagtctccagctttctgtttgcctccatgaagtagcctattggtacatcttgtcaattggtgctcaaacagacttcctctccgtcttcttctccggctacacctttaagcacaagatggtgtatgaggacactctcacactctttccattttctggagaaaccgtgttcatgagcatggagaatccaggcctttggatcttgggttgccacaacagtgattttcgcaatcggggaatgactgctctcctcaaagtcagcagctgtgataagaacacaggcgactattacgaagattcttacgaggacataagtgcctactttttgtccaagaataacgccattgagcccagatcattctcccagaatcctcccgtgcttaaaaggcatcagcgcgaaatcaccagaactactcttcagtctgatcaagaggagattgactatgacgacaccataagcgtggaaatgaagaaggaggatttcgatatctatgacgaagatgagaaccagtctccgcggagctttcagaagaagacgcgacactacttcattgcagcagtcgaaaggctttgggactacggtatgtcatcatcccctcatgtgttgcgcaatagagctcagagtggaagtgttccacagttcaagaaagtcgtctttcaagagtttacagatggcagcttcacacagcctctctatcggggcgagcttaacgaacatttgggactccttggtccctatatccgagccgaagtggaggacaacattatggttacctttaggaatcaagcctctcgcccctacagcttctactcctccctcatcagttatgaggaggatcagagacaaggcgctgaaccacggaagaactttgtgaaaccgaatgagacgaagacctacttctggaaagtacagcaccacatggcccccacaaaagacgaattcgattgcaaagcatgggcgtatttttcagacgttgacttggagaaagatgtacattcaggacttattggtcctttgttggtgtgtcacactaacactctcaatccagcccatggcaggcaggtgacagtccaggaattcgctcttttctttaccatctttgatgagaccaagtcctggtacttcacggaaaacatggagcgcaattgcagagccccctgtaacatacagatggaggaccctacctttaaggaaaattatcggttccacgcaatcaacggatacattatggatacactccctggccttgtgatggctcaggaccaacgaatcaggtggtacctcctcagcatgggttctaatgagaacatacactccattcacttttcaggacatgtgttcactgtccggaagaaagaagagtataagatggccctctacaatttgtatccaggcgtgtttgagaccgttgaaatgcttccctctaaagctggcatctggagagtagagtgcttgatcggagaacatcttcacgcaggtatgagcaccttgttcctcgtgtacagcaacaaatgtcagaccccacttggcatggccagtggacacattcgcgactttcagatcacagcatctggccagtatggacaatgggccccaaagttggctcgcctccattactccggtagcataaatgcgtggtccactaaagaacctttcagctggattaaggtcgatcttcttgcccccatgatcatccacggcattaagacacagggagcgaggcagaaattctcctcgctctacatctcacagttcattattatgtatagtttggacggcaagaagtggcaaacttatagaggtaacagtactggaacactcatggtgttcttcggcaacgttgatagctctggcatcaaacacaacatctttaatcctcccataatagctcggtacatcagattgcatccgacccactacagcattaggagtacactccgaatggagcttatgggttgcgacttgaattcctgttcaatgccactcggaatggagtctaaagccatctctgatgcacagataaccgccagtagctactttacgaacatgtttgctacgtggtcaccctctaaggcaaggcttcatttgcaaggccggtctaatgcctggagacctcaggtgaacaacccgaaagaatggctccaggtggactttcagaagaccatgaaagtaacaggtgtcactactcagggagttaagtccttggataccagcatgtatgtgaaggagttccttatttcctcatcacaagatggccaccagtggaccctcttctttcagaatggtaaggtcaaagtgtttcagggcaatcaagacagcttcacacccgtggtgaacagtcttgatcctccactcttgacacgataccttcgaatccatccacagtcttgggagcaccagattgcattgcgcatggaagtacttggatgcgaggctcaggacctctac

SEQ ID NO: 758 - protein, 1457 aa, synthetic construct
  REGION 1..1457: note = Variant of human B-domain deleted Factor VIII
MQIELSTCFFLCLLRFCFSATRRYYLGAVELSWDYMQSDLGELPVDARFPPRVPKSFPFNTSVVYKKTLFVEFTDHLFNIAKPRPPWMGLLGPTIQAEVYDTVVITLKNMASHPVSLHAVGVSYWKASEGAEYDDQTSQREKEDDKVFPGGSHTYVWQVLKENGPMASDPLCLTYSYLSHVDLVKDLNSGLIGALLVCREGSLAKEKTQTLHKFILLFAVFDEGKSWHSETKNSLMQDRDAASARAWPKMHTVNGYVNRSLPGLIGCHRKSVYWHVIGMGTTPEVHSIFLEGHTFLVRNHRQASLGISPITFLTAQTLLMDLGQFLLFCHISSHQHDGMEAYVKVDSCPEEPQLRMKNNEEAEDYDDDLTDSEMDVVRFDDDNSPSFIQIRSVAKKHPKTWVHYIAAEEEDWDYAPLVLAPDDRSYKSQYLNNGPQRIGRKYKKVRFMAYTDETFKTREAIQHESGILGPLLYGEVGDTLLIIFKNQASRPYNIYPHGITDVRPLYSRRLPKGVKHLKDFPILPGEIFKYKWTVTVEDGPTKSDPRCLTRYYSSFVNMERDLASGLIGPLLICYKESVDQRGNQIMSDKRNVILFSVFDENRSWYLTENIQSFLPNPAGVQLEDPEFQASNIMHSINGYVFDSLQLSVCLHEVAYWYILSIGAQTDFLSVFFSGYTFKHKMVYEDTLTLFPFSGETVFMSMENPGLWILGCHNSDFRNRGMTALLKVSSCDKNTGDYYEDSYEDISAYFLSKNNAIEPRSFSQNPPVLKRHQREITRTTLQSDQEEIDYDDTISVEMKKEDFDIYDEDENQSPRSFQKKTRHYFIAAVERLWDYGMSSSPHVLRNRAQSGSVPQFKKVVFQEFTDGSFTQPLYRGELNEHLGLLGPYIRAEVEDNIMVTFRNQASRPYSFYSSLISYEEDQRQGAEPRKNFVKPNETKTYFWKVQHHMAPTKDEFDCKAWAYFSDVDLEKDVHSGLIGPLLVCHTNTLNPAHGRQVTVQEFALFFTIFDETKSWYFTENMERNCRAPCNIQMEDPTFKENYRFHAINGYIMDTLPGLVMAQDQRIRWYLLSMGSNENIHSIHFSGHVFTVRKKEEYKMALYNLYPGVFETVEMLPSKAGIWRVECLIGEHLHAGMSTLFLVYSNKCQTPLGMASGHIRDFQITASGQYGQWAPKLARLHYSGSINAWSTKEPFSWIKVDLLAPMIIHGIKTQGARQKFSSLYISQFIIMYSLDGKKWQTYRGNSTGTLMVFFGNVDSSGIKHNIFNPPIIARYIRLHPTHYSIRSTLRMELMGCDLNSCSMPLGMESKAISDAQITASSYFTNMFATWSPSKARLHLQGRSNAWRPQVNNPKEWLQVDFQKTMKVTGVTTQGVKSLDTSMYVKEFLISSSQDGHQWTLFFQNGKVKVFQGNQDSFTPVVNSLDPPLLTRYLRIHPQSWEHQIALRMEVLGCEAQDLY

SEQ ID NO: 759 - DNA, 4371 bp, synthetic construct
  misc_feature 1..4371: note = Variant of human B-domain deleted Factor VIII
  source 1..4371: mol_type = other DNA
atgcagattgaactgtctacctgcttcttcctctgtttgctgaggttctgctttagcgccactagacggtactaccttggcgctgtggagctgtcctgggactatatgcagagtgatttgggagagcttcccgtcgacgcacgatttcctcctcgcgttccaaagtcatttcccttcaacacaagcgtggtgtacaagaagacgctcttcgtcgaattcaccgatcacctgttcaatatcgccaaacccagaccaccatggatgggtcttttggggcctaccatacaagcggaggtgtatgacacagttgttatcactctcaagaacatggcttctcatccggtaagtcttcacgcagtgggcgtgtcctactggaaagcttcagaaggagccgagtatgatgatcagacatcccagagggagaaagaagacgacaaggtatttccaggtgggtctcatacctatgtgtggcaagtgctcaaagagaatggccctatggcaagcgatccgctctgtttgacttacagctacctttcacacgttgacctcgtcaaggacctcaactccgggttgattggagccttgttggtatgcagggaaggatctcttgccaaagagaagacacagaccctccacaagtttatccttctctttgctgtgttcgatgagggcaaaagttggcatagcgaaacgaagaattccctcatgcaggatcgcgacgcagccagcgccagagcttggcccaagatgcacactgtgaacggatatgtcaataggtcacttcctggcttgattgggtgtcatcggaaaagtgtctactggcacgtgatcggaatggggacaacaccagaggtccactccatatttctcgaaggccataccttccttgttcgaaaccacagacaggcatccttggagatctctcccattacctttctcactgcccaaacgctccttatggacttgggtcagttccttctcttctgccatatcagctcacaccagcatgatggtatggaagcttatgtgaaagtcgacagttgtcctgaggagccacagttgcgcatgaagaataatgaagaagccgaggattacgacgacgatctcaccgattctgagatggacgtggtgaggtttgatgacgacaactctccctccgtcattcaagcacggagcgtggcgaagaaacaccccaagacttgggtccactatatagcggcggaagaggaggattgggattacgctcctcttgtattggcaccagatgaccgctcatacaaaagccagtacctcaacaacggaccgcagagaattggccggaagtataagaaagtgcgatttatggcctatacagacgaaacctttaagacaagggaggccatccagcatgagagtgggattttgggacctcttctttacggcgaagttggtgataccctcctcatcatcttcaagaatcaagcttctcgcccctataacatttacccacacgggatcactgacgttaggcctttgtatagcagaagacttcccaaaggcgtgaagcatctcaaagacttccccattttgccaggcgagatctttaagtacaaatggaccgtcacagtggaagatggaccgactaaatcagaccctcgatgccttacgcggtactattcctccttcgtgaatatggagagagatttggcaagcggactcataggaccactcctcatctgttacaaggaatctgtagaccagaggggtaaccagattatgagtgataaacgcaatgtgatcctttttagcgtcttcgacgagaaccggtcctggtacttgaccgagaatatacaaaggttccttcccaaccccgcaggcgttcagttggaagaccctgagtttcaggccagcaatattatgcactcaatcaacggctatgtgtttgatagtctccagctttctgtttgcctccatgaagtagcctattggtacatcttgtcaattggtgctcaaacagacttcctctccgtcttcttctccggctacacctttaagcacaagatggtgtatgaggacactctcacactctttccattttctggagaaaccgtgttcatgagcatggagaatccaggcctttggatcttgggttgccacaacagtgattttcgcaatcggggaatgactgctctcctcaaagtcagcagctgtgataagaacacaggcgactattacgaagattcttacgaggacataagtgcctactttttgtccaagaataacgccattgagcccagatcattctcccagaatcctcccgtgcttaaaaggcatcagcgcgaaatcaccagaactactcttcagtctgatcaagaggagattgactatgacgacaccataagcgtggaaatgaagaaggaggatttcgatatctatgacgaagatgagaaccagtctccgcggagctttcagaagaagacgcgacactacttcattgcagcagtcgaaaggctttgggactacggtatgtcatcatcccctcatgtgttgcgcaatagagctcagagtggaagtgttccacagttcaagaaagtcgtctttcaagagtttacagatggcagcttcacacagcctctctatcggggcgagcttaacgaacatttgggactccttggtccctatatccgagccgaagtggaggacaacattatggttacctttaggaatcaagcctctcgcccctacagcttctactcctccctcatcagttatgaggaggatcagagacaaggcgctgaaccacggaagaactttgtgaaaccgaatgagacgaagacctacttctggaaagtacagcaccacatggcccccacaaaagacgaattcgattgcaaagcatgggcgtatttttcagacgttgacttggagaaagatgtacattcaggacttattggtcctttgttggtgtgtcacactaacactctcaatccagcccatggcaggcaggtgacagtccaggaattcgctcttttctttaccatctttgatgagaccaagtcctggtacttcacggaaaacatggagcgcaattgcagagccccctgtaacatacagatggaggaccctacctttaaggaaaattatcggttccacgcaatcaacggatatattatggatacactccctggccttgtgatggctcaggaccaacgaatcaggtggtacctcctcagcatgggttctaatgagaacatacactccattcacttttcaggacatgtgttcactgtccggaagaaagaagagtataagatggccctctacaatttgtatccaggcgtgtttgagaccgttgaaatgcttccctctaaagctggcatctggagagtagagtgcttgatcggagaacatcttcacgcaggtatgagcaccttgttcctcgtgtacagcaacaaatgtcagaccccacttggcatggccagtggacacattcgcgactttcagatcacagcatctggccagtatggacaatgggccccaaagttggctcgcctccattactccggtagcataaatgcgtggtccactaaagaacctttcagctggattaaggtcgatcttcttgcccccatgatcatccacggcattaagacacagggagcgaggcagaaattctcctcgctctacatctcacagttcattattatgtatagtttggacggcaagaagtggcaaacttatagaggtaacagtactggaacactcatggtgttcttcggcaacgttgatagctctggcatcaaacacaacatctttaatcctcccataatagctcggtacatcagattgcatccgacccactacagcattaggagtacactccgaatggagcttatgggttgcgacttgaattcctgttcaatgccactcggaatggagtctaaagccatctctgatgcacagataaccgccagtagctactttacgaacatgtttgctacgtggtcaccctctaaggcaaggcttcatttgcaaggccggtctaatgcctggagacctcaggtgaacaacccgaaagaatggctccaggtggactttcagaagaccatgaaagtaacaggtgtcactactcagggagttaagtccttggataccagcatgtatgtgaaggagttccttatttcctcatcacaagatggccaccagtggaccctcttctttcagaatggtaaggtcaaagtgtttcagggcaatcaagacagcttcacacccgtggtgaacagtcttgatcctccactcttgacacgataccttcgaatccatccacagtcttgggagcaccagattgcattgcgcatggaagtacttggatgcgaggctcaggacctctac

SEQ ID NO: 760 - protein, 1457 aa, synthetic construct
  REGION 1..1457: note = Variant of human B-domain deleted Factor VIII
MQIELSTCFFLCLLRFCFSATRRYYLGAVELSWDYMQSDLGELPVDARFPPRVPKSFPFNTSVVYKKTLFVEFTDHLFNIAKPRPPWMGLLGPTIQAEVYDTVVITLKNMASHPVSLHAVGVSYWKASEGAEYDDQTSQREKEDDKVFPGGSHTYVWQVLKENGPMASDPLCLTYSYLSHVDLVKDLNSGLIGALLVCREGSLAKEKTQTLHKFILLFAVFDEGKSWHSETKNSLMQDRDAASARAWPKMHTVNGYVNRSLPGLIGCHRKSVYWHVIGMGTTPEVHSIFLEGHTFLVRNHRQASLEISPITFLTAQTLLMDLGQFLLFCHISSHQHDGMEAYVKVDSCPEEPQLRMKNNEEAEDYDDDLTDSEMDVVRFDDDNSPSVIQARSVAKKHPKTWVHYIAAEEEDWDYAPLVLAPDDRSYKSQYLNNGPQRIGRKYKKVRFMAYTDETFKTREAIQHESGILGPLLYGEVGDTLLIIFKNQASRPYNIYPHGITDVRPLYSRRLPKGVKHLKDFPILPGEIFKYKWTVTVEDGPTKSDPRCLTRYYSSFVNMERDLASGLIGPLLICYKESVDQRGNQIMSDKRNVILFSVFDENRSWYLTENIQRFLPNPAGVQLEDPEFQASNIMHSINGYVFDSLQLSVCLHEVAYWYILSIGAQTDFLSVFFSGYTFKHKMVYEDTLTLFPFSGETVFMSMENPGLWILGCHNSDFRNRGMTALLKVSSCDKNTGDYYEDSYEDISAYFLSKNNAIEPRSFSQNPPVLKRHQREITRTTLQSDQEEIDYDDTISVEMKKEDFDIYDEDENQSPRSFQKKTRHYFIAAVERLWDYGMSSSPHVLRNRAQSGSVPQFKKVVFQEFTDGSFTQPLYRGELNEHLGLLGPYIRAEVEDNIMVTFRNQASRPYSFYSSLISYEEDQRQGAEPRKNFVKPNETKTYFWKVQHHMAPTKDEFDCKAWAYFSDVDLEKDVHSGLIGPLLVCHTNTLNPAHGRQVTVQEFALFFTIFDETKSWYFTENMERNCRAPCNIQMEDPTFKENYRFHAINGYIMDTLPGLVMAQDQRIRWYLLSMGSNENIHSIHFSGHVFTVRKKEEYKMALYNLYPGVFETVEMLPSKAGIWRVECLIGEHLHAGMSTLFLVYSNKCQTPLGMASGHIRDFQITASGQYGQWAPKLARLHYSGSINAWSTKEPFSWIKVDLLAPMIIHGIKTQGARQKFSSLYISQFIIMYSLDGKKWQTYRGNSTGTLMVFFGNVDSSGIKHNIFNPPIIARYIRLHPTHYSIRSTLRMELMGCDLNSCSMPLGMESKAISDAQITASSYFTNMFATWSPSKARLHLQGRSNAWRPQVNNPKEWLQVDFQKTMKVTGVTTQGVKSLDTSMYVKEFLISSSQDGHQWTLFFQNGKVKVFQGNQDSFTPVVNSLDPPLLTRYLRIHPQSWEHQIALRMEVLGCEAQDLY

SEQ ID NO: 761 - DNA, 4371 bp, synthetic construct
  misc_feature 1..4371: note = Variant of human B-domain deleted Factor VIII
  source 1..4371: mol_type = other DNA
atgcagattgaactgtctacctgcttcttcctctgtttgctgaggttctgctttagcgccactagacggtactaccttggcgctgtggagctgtcctgggactatatgcagagtgatttgggagagcttcccgtcgacgcacgatttcctcctcgcgttccaaagtcatttcccttcaacacaagctcggtgtacaagaagacgctcttcgtcgaattcaccgatcacctgttcaatatcgccaaacccagaccaccatggatgggtcttttggggcctaccatacaagcggaggtgtatgacacagttgttatcactctcaagaacatggcttctcatccggtaagtcttcacgcagtgggcgtgtcctactggaaagcttcagaaggagccgagtatgatgatcagacatcccagagggagaaagaagacgacaaggtatttccaggtgggtctcatacctatgtgtggcaagtgctcaaagagaatggccctatggcaagcgatccgctctgtttgacttacagctacctttcacacgttgacctcgtcaaggacctcaactccgggttgattggagccttgttggtatgcagggaaggatctcttgccaaagagaagacacagaccctccacaagtttatccttctctttgctgtgttcgatgagggcaaaagttggcatagcgaaacgaagaattccctcatgcaggatcgcgacgcagccagcgccagagcttggcccaagatgcacactgtgaacggatatgtcaataggtcacttcctggcttgattgggtgtcatcggaaaagtgtctactggcacgtgatcggaatggggacaacaccagaggtccactccatatttctcgaaggccataccttccttgttcgaaaccacagacaggcatccttggagatctctcccattacctttctcactgcccaaacgctccttatggacttgggtcagttccttctcttctgccatatcagctcacaccagcatgatggtatggaagcttatgtgaaagtcgacagttgtcctgaggagccacagttgcgcatgaagaataatgaagaagccgaggattacgacgacgatctcaccgattctgagatggacgtggtgaggtttgatgacgacaactctccctccttcattcaagcacggagcgtggcgaagaaacaccccaagacttgggtccactatatagcggcggaagaggaggattgggattacgctcctcttgtattggcaccagatgaccgctcatacaaaagccagtacctcaacaacggaccgcagagaattggccggaagtataagaaagtgcgatttatggcctatacagacgaaacctttaagacaagggaggccatccagcatgagagtgggattttgggacctcttctttacggcgaagttggtgataccctcctcatcatcttcaagaatcaagcttctcgcccctataacatttacccacacgggatcactgacgttagtcctttgtatagcagaagacttcccaaaggcgtgaagcatctcaaagacttccccattttgccaggcgagatctttaagtacaaatggaccgtcacagtggaagatggaccgactaaatcagaccctcgatgccttacgcggtactattcctccttcgtgaatatggagagagatttggcaagcggactcataggaccactcctcatctgttacaaggaatctgtagaccagaggggtaaccagattatgagtgataaacgcaatgtgatcctttttagcgtcttcgacgagaaccggtcctggtacttgaccgagaatatacaaaggttccttcccaaccccgcaggcgttcagttggaagaccctgagtttcaggccagcaatattatgcactcaatcaacggctatgtgtttgatagtctccagctttctgtttgcctccatgaagtagcctattggtacatcttgtcaattggtgctcaaacagacttcctctccgtcttcttctccggctacacctttaagcacaagatggtgtatgaggacactctcacactctttccattttctggagaaaccgtgttcatgagcatggagaatccaggcctttggatcttgggttgccacaacagtgattttcgcaatcggggaatgactgctctcctcaaagtcagcagctgtgataagaacacaggcgactattacgaagattcttacgaggacataagtgcctactttttgtccaagaataacgccattgagcccagatcattctcccagaatcctcccgtgcttaaaaggcatcagcgcgaaatcaccagaactactcttcagtctgatcaagaggagattgactatgacgacaccataagcgtggaaatgaagaaggaggatttcgatatctatgacgaagatgagaaccagtctccgcggagctttcagaagaagacgcgacactacttcattgcagcagtcgaaaggctttgggactacggtatgtcatcatcccctcatgtgttgcgcaatagagctcagagtggaagtgttccacagttcaagaaagtcgtctttcaagagtttacagatggcagcttcacacagcctctctatcggggcgagcttaacgaacatttgggactccttggtccctatatccgagccgaagtggaggacaacattatggttacctttaggaatcaagcctctcgcccctacagcttctactcctccctcatcagttatgaggaggatcagagacaaggcgctgaaccacggaagaactttgtgaaaccgaatgagacgaagacctacttctggaaagtacagcaccacatggcccccacaaaagacgaattcgattgcaaagcatgggcgtatttttcagacgttgacttggagaaagatgtacattcaggacttattggtcctttgttggtgtgtcacactaacactctcaatccagcccatggcaggcaggtgacagtccaggaattcgctcttttctttaccatctttgatgagaccaagtcctggtacttcacggaaaacatggagcgcaattgcagagccccctgtaacatacagatggaggaccctaccttcaaggaaaattatcggttccacgcaatcaacggatatattatggatacactccctggccttgtgatggctcaggaccaacgaatcaggtggtacctcctcagcatgggttctaatgagaacatacactccattcacttttcaggacatgtgttcactgtccggaagaaagaagagtataagatggccctctacaatttgtatccaggcgtgtttgagaccgttgaaatgcttccctctaaagctggcatctggagagtagagtgcttgatcggagaacatcttcacgcaggtatgagcaccttgttcctcgtgtacagcaacaaatgtcagaccccacttggcatggccagtggacacattcgcgactttcagatcacagcatctggccagtatggacaatgggccccaaagttggctcgcctccattactccggtagcataaatgcgtggtccactaaagaacctttcagctggattaaggtcgatcttcttgcccccatgatcatccacggcattaagacacagggagcgaggcagaaattctcctcgctctacatctcacagttcattattatgtatagtttggacggcaagaagtggcaaacttatagaggtaacagtactggaacactcatggtgttcttcggcaacgttgatagctctggcatcaaacacaacatctttaatcctcccataatagctcggtacatcagattgcatccgacccactacagcattaggagtacactccgaatggagcttatgggttgcgacttgaattcctgttcaatgccactcggaatggagtctaaagccatctctgatgcacagataaccgccagtagctactttacgaacatgtttgctacgtggtcaccctctaaggcaaggcttcatttgcaaggccggtctaatgcctggagacctcaggtgaacaacccgaaagaatggctccaggtggactttcagaagaccatgaaagtaacaggtgtcactactcagggagttaagtccttggataccagcatgtatgtgaaggagttccttatttcctcatcacaagatggccaccagtggaccctcttctttcagaatggtaaggtcaaagtgtttcagggcaatcaagacagcttcacacccgtggtgaacagtcttgatcctccactcttgacacgataccttcgaatccatccacagtcttgggagcaccagattgcattgcgcatggaagtacttggatgcgaggctcaggacctctac

SEQ ID NO: 762 - protein, 1457 aa, synthetic construct
  REGION 1..1457: note = Variant of human B-domain deleted Factor VIII
MQIELSTCFFLCLLRFCFSATRRYYLGAVELSWDYMQSDLGELPVDARFPPRVPKSFPFNTSSVYKKTLFVEFTDHLFNIAKPRPPWMGLLGPTIQAEVYDTVVITLKNMASHPVSLHAVGVSYWKASEGAEYDDQTSQREKEDDKVFPGGSHTYVWQVLKENGPMASDPLCLTYSYLSHVDLVKDLNSGLIGALLVCREGSLAKEKTQTLHKFILLFAVFDEGKSWHSETKNSLMQDRDAASARAWPKMHTVNGYVNRSLPGLIGCHRKSVYWHVIGMGTTPEVHSIFLEGHTFLVRNHRQASLEISPITFLTAQTLLMDLGQFLLFCHISSHQHDGMEAYVKVDSCPEEPQLRMKNNEEAEDYDDDLTDSEMDVVRFDDDNSPSFIQARSVAKKHPKTWVHYIAAEEEDWDYAPLVLAPDDRSYKSQYLNNGPQRIGRKYKKVRFMAYTDETFKTREAIQHESGILGPLLYGEVGDTLLIIFKNQASRPYNIYPHGITDVSPLYSRRLPKGVKHLKDFPILPGEIFKYKWTVTVEDGPTKSDPRCLTRYYSSFVNMERDLASGLIGPLLICYKESVDQRGNQIMSDKRNVILFSVFDENRSWYLTENIQRFLPNPAGVQLEDPEFQASNIMHSINGYVFDSLQLSVCLHEVAYWYILSIGAQTDFLSVFFSGYTFKHKMVYEDTLTLFPFSGETVFMSMENPGLWILGCHNSDFRNRGMTALLKVSSCDKNTGDYYEDSYEDISAYFLSKNNAIEPRSFSQNPPVLKRHQREITRTTLQSDQEEIDYDDTISVEMKKEDFDIYDEDENQSPRSFQKKTRHYFIAAVERLWDYGMSSSPHVLRNRAQSGSVPQFKKVVFQEFTDGSFTQPLYRGELNEHLGLLGPYIRAEVEDNIMVTFRNQASRPYSFYSSLISYEEDQRQGAEPRKNFVKPNETKTYFWKVQHHMAPTKDEFDCKAWAYFSDVDLEKDVHSGLIGPLLVCHTNTLNPAHGRQVTVQEFALFFTIFDETKSWYFTENMERNCRAPCNIQMEDPTFKENYRFHAINGYIMDTLPGLVMAQDQRIRWYLLSMGSNENIHSIHFSGHVFTVRKKEEYKMALYNLYPGVFETVEMLPSKAGIWRVECLIGEHLHAGMSTLFLVYSNKCQTPLGMASGHIRDFQITASGQYGQWAPKLARLHYSGSINAWSTKEPFSWIKVDLLAPMIIHGIKTQGARQKFSSLYISQFIIMYSLDGKKWQTYRGNSTGTLMVFFGNVDSSGIKHNIFNPPIIARYIRLHPTHYSIRSTLRMELMGCDLNSCSMPLGMESKAISDAQITASSYFTNMFATWSPSKARLHLQGRSNAWRPQVNNPKEWLQVDFQKTMKVTGVTTQGVKSLDTSMYVKEFLISSSQDGHQWTLFFQNGKVKVFQGNQDSFTPVVNSLDPPLLTRYLRIHPQSWEHQIALRMEVLGCEAQDLY

SEQ ID NO: 763 - DNA, 4371 bp, synthetic construct
  misc_feature 1..4371: note = Variant of human B-domain deleted Factor VIII
  source 1..4371: mol_type = other DNA
atgcagattgaactgtctacctgcttcttcctctgtttgctgaggttctgctttagcgccactagacggtactaccttggcgctgtggagctgtcctgggactatatgcagagtgatttgggagagcttcccgtcgacgcacgatttcctcctcgcgttccaaagtcatttcccttcaacacaagcgtggtgtacaagaagacgctcttcgtcgaattcaccgatcacctgttcaatatcgccaaacccagaccaccatggatgggtcttttggggcctaccatacaagcggaggtgtatgacacagttgttatcactctcaagaacatggcttctcatccggtaagtcttcacgcagtgggcgtgtcctactggaaagcttcagaaggagccgagtatgatgatcagacatcccagagggagaaagaagacgacaaggtatttccaggtgggtctcatacctatgtgtggcaagtgctcaaagagaatggccctatggcaagcgatccgctctgtttgacttacagctacctttcacacgttgacctcgtcaaggacctcaactccgggttgattggagccttgttggtatgcagggaaggatctcttgccaaagagaagacacagaccctccacaagtttatccttctctttgctgtgttcgatgagggcaaaagttggcatagcgaaacgaagaattccctcatgcaggatcgcgacgcagccagcgccagagcttggcccaagatgcacactgtgaacggatatgtcaataggtcacttcctggcttgattgggtgtcatcggaaaagtgtctactggcacgtgatcggaatggggacaacaccagaggtccactccatatttctcgaaggccataccttccttgttcgaaaccacagacaggcatccttggagatctctcccattacctttctcactgcccaaacgctccttatggacttgggtcagttccttctcttctgccatatcagctcacaccagcatgatggtatggaagcttatgtgaaagtcgacagttgtcctgaggagccacagttgcgcatgaagaataatgaagaagccgaggattacgacgacgatctcaccgattctgagatggacgtggtgaggtttgatgacgacaactctccctcccgcattcaagcacggagcgtggcgaagaaacaccccaagacttgggtccactatatagcggcggaagaggaggattgggattacgctcctcttgtattggcaccagatgaccgctcatacaaaagccagtacctcaacaacggaccgcagagaattggccggaagtataagaaagtgcgatttatggcctatacagacgaaacctttaagacaagggaggccatccagcatgagagtgggattttgggacctcttctttacggcgaagttggtgataccctcctcatcatcttcaagaatcaagcttctcgcccctataacatttacccacacgggatcactgacgttaggcctttgtatagcagaagacttcccaaaggcgtgaagcatctcaaagacttccccattttgccaggcgagatctttaagtacaaatggaccgtcacagtggaagatggaccgactaaatcagaccctcgatgccttacgcggtactattcctccttcgtgaatatggagagagatttggcaagcggactcataggaccactcctcatctgttacaaggaatctgtagaccagaggggtaaccagattatgagtgataaacgcaatgtgatcctttttagcgtcttcgacgagaaccggtcctggtacttgaccgagaatatacaaaggttccttcccaaccccgcaggcgttcagttggaagaccctgagtttcaggccagcaatattatgcactcaatcaacggctatgtgtttgatagtctccagctttctgtttgcctccatgaagtagcctattggtacatcttgtcaattggtgctcaaacagacttcctctccgtcttcttctccggctacacctttaagcacaagatggtgtatgaggacactctcacactctttccattttctggagaaaccgtgttcatgagcatggagaatccaggcctttggatcttgggttgccacaacagtgattttcgcaatcggggaatgactgctctcctcaaagtcagcagctgtgataagaacacaggcgactattacgaagattcttacgaggacataagtgcctaccgtttgtccaagaataacgccattgagcccagatcattctcccagaatcctcccgtgcttaaaaggcatcagcgcgaaatcaccagaactactcttcagtctgatcaagaggagattgactatgacgacaccataagcgtggaaatgaagaaggaggatttcgatatctatgacgaagatgagaaccagtctccgcggagctttcagaagaagacgcgacactacttcattgcagcagtcgaaaggctttgggactacggtatgtcatcatcccctcatgtgttgcgcaatagagctcagagtggaagtgttccacagttcaagaaagtcgtctttcaagagtttacagatggcagcttcacacagcctctctatcggggcgagcttaacgaacatttgggactccttggtccctatatccgagccgaagtggaggacaacattatggttacctttaggaatcaagcctctcgcccctacagcttctactcctccctcatcagttatgaggaggatcagagacaaggcgctgaaccacggaagaactttgtgaaaccgaatgagacgaagacctacttctggaaagtacagcaccacatggcccccacaaaagacgaattcgattgcaaagcatgggcgtatttttcagacgttgacttggagaaagatgtacattcaggacttattggtcctttgttggtgtgtcacactaacactctcaatccagcccatggcaggcaggtgacagtccaggaattcgctcttttctttaccatctttgatgagaccaagtcctggtacttcacggaaaacatggagcgcaattgcagagccccctgtaacatacagatggaggaccctaccttcaaggaaaattatcggttccacgcaatcaacggatatattatggatacactccctggccttgtgatggctcaggaccaacgaatcaggtggtacctcctcagcatgggttctaatgagaacatacactccattcacttttcaggacatgtgttcactgtccggaagaaagaagagtataagatggccctctacaatttgtatccaggcgtgtttgagaccgttgaaatgcttccctctaaagctggcatctggagagtagagtgcttgatcggagaacatcttcacgcaggtatgagcaccttgttcctcgtgtacagcaacaaatgtcagaccccacttggcatggccagtggacacattcgcgactttcagatcacagcatctggccagtatggacaatgggccccaaagttggctcgcctccattactccggtagcataaatgcgtggtccactaaagaacctttcagctggattaaggtcgatcttcttgcccccatgatcatccacggcattaagacacagggagcgaggcagaaattctcctccctctacatctcacagttcattattatgtatagtttggacggcaagaagtggcaaacttatagaggtaacagtactggaacactcatggtgttcttcggcaacgttgatagctctggcatcaaacacaacatctttaatcctcccataatagctcggtacatcagattgcatccgacccactacagcattaggagtacactccgaatggagcttatgggttgcgacttgaattcctgttcaatgccactcggaatggagtctaaagccatctctgatgcacagataaccgccagtagctactttacgaacatgtttgctacgtggtcaccctctaaggcaaggcttcatttgcaaggccggtctaatgcctggagacctcaggtgaacaacccgaaagaatggctccaggtggactttcagaagaccatgaaagtaacaggtgtcactactcagggagttaagtccttggataccagcatgtatgtgaaggagttccttatttcctcatcacaagatggccaccagtggaccctcttctttcagaatggtaaggtcaaagtgtttcagggcaatcaagacagcttcacacccgtggtgaacagtcttgatcctccactcttgacacgataccttcgaatccatccacagtcttgggagcaccagattgcattgcgcatggaagtacttggatgcgaggctcaggacctctac

SEQ ID NO: 764 - protein, 1457 aa, synthetic construct
  REGION 1..1457: note = Variant of human B-domain deleted Factor VIII
MQIELSTCFFLCLLRFCFSATRRYYLGAVELSWDYMQSDLGELPVDARFPPRVPKSFPFNTSVVYKKTLFVEFTDHLFNIAKPRPPWMGLLGPTIQAEVYDTVVITLKNMASHPVSLHAVGVSYWKASEGAEYDDQTSQREKEDDKVFPGGSHTYVWQVLKENGPMASDPLCLTYSYLSHVDLVKDLNSGLIGALLVCREGSLAKEKTQTLHKFILLFAVFDEGKSWHSETKNSLMQDRDAASARAWPKMHTVNGYVNRSLPGLIGCHRKSVYWHVIGMGTTPEVHSIFLEGHTFLVRNHRQASLEISPITFLTAQTLLMDLGQFLLFCHISSHQHDGMEAYVKVDSCPEEPQLRMKNNEEAEDYDDDLTDSEMDVVRFDDDNSPSRIQARSVAKKHPKTWVHYIAAEEEDWDYAPLVLAPDDRSYKSQYLNNGPQRIGRKYKKVRFMAYTDETFKTREAIQHESGILGPLLYGEVGDTLLIIFKNQASRPYNIYPHGITDVRPLYSRRLPKGVKHLKDFPILPGEIFKYKWTVTVEDGPTKSDPRCLTRYYSSFVNMERDLASGLIGPLLICYKESVDQRGNQIMSDKRNVILFSVFDENRSWYLTENIQRFLPNPAGVQLEDPEFQASNIMHSINGYVFDSLQLSVCLHEVAYWYILSIGAQTDFLSVFFSGYTFKHKMVYEDTLTLFPFSGETVFMSMENPGLWILGCHNSDFRNRGMTALLKVSSCDKNTGDYYEDSYEDISAYRLSKNNAIEPRSFSQNPPVLKRHQREITRTTLQSDQEEIDYDDTISVEMKKEDFDIYDEDENQSPRSFQKKTRHYFIAAVERLWDYGMSSSPHVLRNRAQSGSVPQFKKVVFQEFTDGSFTQPLYRGELNEHLGLLGPYIRAEVEDNIMVTFRNQASRPYSFYSSLISYEEDQRQGAEPRKNFVKPNETKTYFWKVQHHMAPTKDEFDCKAWAYFSDVDLEKDVHSGLIGPLLVCHTNTLNPAHGRQVTVQEFALFFTIFDETKSWYFTENMERNCRAPCNIQMEDPTFKENYRFHAINGYIMDTLPGLVMAQDQRIRWYLLSMGSNENIHSIHFSGHVFTVRKKEEYKMALYNLYPGVFETVEMLPSKAGIWRVECLIGEHLHAGMSTLFLVYSNKCQTPLGMASGHIRDFQITASGQYGQWAPKLARLHYSGSINAWSTKEPFSWIKVDLLAPMIIHGIKTQGARQKFSSLYISQFIIMYSLDGKKWQTYRGNSTGTLMVFFGNVDSSGIKHNIFNPPIIARYIRLHPTHYSIRSTLRMELMGCDLNSCSMPLGMESKAISDAQITASSYFTNMFATWSPSKARLHLQGRSNAWRPQVNNPKEWLQVDFQKTMKVTGVTTQGVKSLDTSMYVKEFLISSSQDGHQWTLFFQNGKVKVFQGNQDSFTPVVNSLDPPLLTRYLRIHPQSWEHQIALRMEVLGCEAQDLY

SEQ ID NO: 765 - DNA, 4371 bp, synthetic construct
  misc_feature 1..4371: note = Variant of human B-domain deleted Factor VIII
  source 1..4371: mol_type = other DNA
atgcagattgaactgtctacctgcttcttcctctgtttgctgaggttctgctttagcgccactagacggtactaccttggcgctgtggagctgtcctgggactatatgcagagtgatttgggagagcttcccgtcgacgcacgatttcctcctcgcgttccaaagtcatttcccttcaacacaagcgttgtgtacaagaagacgctcttcgtcgaattcaccgatcacctgttcaatatcgccaaacccagaccaccatggatgggtcttttggggcctaccatacaagcggaggtgtatgacacagttgttatcactctcaagaacatggcttctcatccggtaagtcttcacgcagtgggcgtgtcctactggaaagcttcagaaggagccgagtatgatgatcagacatcccagagggagaaagaagacgacaaggtatttccaggtgggtctcatacctatgtgtggcaagtgctcaaagagaatggccctatggcaagcgatccgctctgtttgacttacagctacctttcacacgttgacctcgtcaaggacctcaactccgggttgattggagccttgttggtatgcagggaaggatctcttgccaaagagaagacacagaccctccacaagtttatccttctctttgctgtgttcgatgagggcaaaagttggcatagcgaaacgaagaattccctcatgcaggatcgcgacgcagccagcgccagagcttggcccaagatgcacactgtgaacggatatgtcaataggtcacttcctggcttgattgggtgtcatcggaaaagtgtctactggcacgtgatcggaatggggacaacaccagaggtccactccatatttctcgaaggccataccttccttgttcgaaaccacagacaggcatccttggagatctctcccattacctttctcactgcccaaacgctccttatggacttgggtcagttccttctcttctgccatatcagctcacaccagcatgatggtatggaagcttatgtgaaagtcgacagttgtcctgaggagccacagttgcgcatgaagaataatgaagaagccgaggattacgacgacgatctcaccgattctgagatggacgtggtgaggtttgatgacgacaactctccctccttcattcaaatccggagcgtggcgaagaaacaccccaagacttgggtccactatatagcggcggaagaggaggattgggattacgctcctcttgtattggcaccagatgaccgctcatacaaaagccagtacctcaacaacggaccgcagagaattggccggaagtataagaaagtgcgatttatggcctatacagacgaaacctttaagacaagggaggccatccagcatgagagtgggattttgggacctcttctttacggcgaagttggtgataccctcctcatcatcttcaagaatcaagcttctcgcccctataacatttacccacacgggatcactgacgttaggcctttgtatagcagaagacttcccaaaggcgtgaagcatctcaaagacttccccattttgccaggcgagatctttaagtacaaatggaccgtcacagtggaagatggaccgactaaatcagaccctcgatgccttacgcggtactattcctccttcgtgaatatggagagagatttggcaagcggactcataggaccactcctcatctgttacaaggaatctgtagaccagaggggtaaccagattatgagtgataaacgcaatgtgatcctttttagcgtcttcgacgagaaccggtcctggtacttgaccgagaatatacaaaggttccttcccaaccccgcaggcgttcagttggaagaccctgagtttcaggccagcaatattatgcactcaatcaacggctatgtgtttgatagtctccagctttctgtttgcctccatgaagtagcctattggtacatcttgtcaattggtgctcaaacagacttcctctccgtcttcttctccggctacacctttaagcacaagatggtgtatgaggacactctcacactctttccattttctggagaaaccgtgttcatgagcatggagaatccaggcctttggatcttgggttgccacaacagtgattttcgcaatcggggaatgactgctctcctcaaagtcagcagctgtgataagaacacaggcgactattacgaagattcttacgaggacataagtgcctacttgttgtccaagaataacgccattgagcccagatcattctcccagaatcctcccgtgcttaaaaggcatcagcgcgaaatcaccagaactactcttcagtctgatcaagaggagattgactatgacgacaccataagcgtggaaatgaagaaggaggatttcgatatctatgacgaagatgagaaccagtctccgcggagctttcagaagaagacgcgacactacttcattgcagcagtcgaaaggctttgggactacggtatgtcatcatcccctcatgtgttgcgcaatagagctcagagtggaagtgttccacagttcaagaaagtcgtctttcaagagtttacagatggcagcttcacacagcctctctatcggggcgagcttaacgaacatttgggactccttggtccctatatccgagccgaagtggaggacaacattatggttacctttaggaatcaagcctctcgcccctacagcttctactcctccctcatcagttatgaggaggatcagagacaaggcgctgaaccacggaagaactttgtgaaaccgaatgagacgaagacctacttctggaaagtacagcaccacatggcccccacaaaagacgaattcgattgcaaagcatgggcgtatttttcagacgttgacttggagaaagatgtacattcaggacttattggtcctttgttggtgtgtcacactaacactctcaatccagcccatggcaggcaggtgacagtccaggaattcgctcttttctttaccatctttgatgagaccaagtcctggtacttcacggaaaacatggagcgcaattgcagagccccctgtaacatacagatggaggaccctacctttaaggaaaattatcggttccacgcaatcaacggatacattatggatacactccctggccttgtgatggctcaggaccaacgaatcaggtggtacctcctcagcatgggttctaatgagaacatacactccattcacttttcaggacatgtgttcactgtccggaagaaagaagagtataagatggccctctacaatttgtatccaggcgtgtttgagaccgttgaaatgcttccctctaaagctggcatctggagagtagagtgcttgatcggagaacatcttcacgcaggtatgagcaccttgttcctcgtgtacagcaacaaatgtcagaccccacttggcatggccagtggacacattcgcgactttcagatcacagcatctggccagtatggacaatgggccccaaagttggctcgcctccattactccggtagcataaatgcgtggtccactaaagaacctttcagctggattaaggtcgatcttcttgcccccatgatcatccacggcattaagacacagggagcgaggcagaaattctccgatctctacatctcacagttcattattatgtatagtttggacggcaagaagtggcaaacttatagaggtaacagtactggaacactcatggtgttcttcggcaacgttgatagctctggcatcaaacacaacatctttaatcctcccataatagctcggtacatcagattgcatccgacccactacagcattaggagtacactccgaatggagcttatgggttgcgacttgaattcctgttcaatgccactcggaatggagtctaaagccatctctgatgcacagataaccgccagtagctactttacgaacatgtttgctacgtggtcaccctctaaggcaaggcttcatttgcaaggccggtctaatgcctggagacctcaggtgaacaacccgaaagaatggctccaggtggactttcagaagaccatgaaagtaacaggtgtcactactcagggagttaagtccttggataccagcatgtatgtgaaggagttccttatttcctcatcacaagatggccaccagtggaccctcttctttcagaatggtaaggtcaaagtgtttcagggcaatcaagacagcttcacacccgtggtgaacagtcttgatcctccactcttgacacgataccttcgaatccatccacagtcttgggagcaccagattgcattgcgcatggaagtacttggatgcgaggctcaggacctctac

SEQ ID NO: 766 - protein, 1457 aa, synthetic construct
  REGION 1..1457: note = Variant of human B-domain deleted Factor VIII
MQIELSTCFFLCLLRFCFSATRRYYLGAVELSWDYMQSDLGELPVDARFPPRVPKSFPFNTSVVYKKTLFVEFTDHLFNIAKPRPPWMGLLGPTIQAEVYDTVVITLKNMASHPVSLHAVGVSYWKASEGAEYDDQTSQREKEDDKVFPGGSHTYVWQVLKENGPMASDPLCLTYSYLSHVDLVKDLNSGLIGALLVCREGSLAKEKTQTLHKFILLFAVFDEGKSWHSETKNSLMQDRDAASARAWPKMHTVNGYVNRSLPGLIGCHRKSVYWHVIGMGTTPEVHSIFLEGHTFLVRNHRQASLEISPITFLTAQTLLMDLGQFLLFCHISSHQHDGMEAYVKVDSCPEEPQLRMKNNEEAEDYDDDLTDSEMDVVRFDDDNSPSFIQIRSVAKKHPKTWVHYIAAEEEDWDYAPLVLAPDDRSYKSQYLNNGPQRIGRKYKKVRFMAYTDETFKTREAIQHESGILGPLLYGEVGDTLLIIFKNQASRPYNIYPHGITDVRPLYSRRLPKGVKHLKDFPILPGEIFKYKWTVTVEDGPTKSDPRCLTRYYSSFVNMERDLASGLIGPLLICYKESVDQRGNQIMSDKRNVILFSVFDENRSWYLTENIQRFLPNPAGVQLEDPEFQASNIMHSINGYVFDSLQLSVCLHEVAYWYILSIGAQTDFLSVFFSGYTFKHKMVYEDTLTLFPFSGETVFMSMENPGLWILGCHNSDFRNRGMTALLKVSSCDKNTGDYYEDSYEDISAYLLSKNNAIEPRSFSQNPPVLKRHQREITRTTLQSDQEEIDYDDTISVEMKKEDFDIYDEDENQSPRSFQKKTRHYFIAAVERLWDYGMSSSPHVLRNRAQSGSVPQFKKVVFQEFTDGSFTQPLYRGELNEHLGLLGPYIRAEVEDNIMVTFRNQASRPYSFYSSLISYEEDQRQGAEPRKNFVKPNETKTYFWKVQHHMAPTKDEFDCKAWAYFSDVDLEKDVHSGLIGPLLVCHTNTLNPAHGRQVTVQEFALFFTIFDETKSWYFTENMERNCRAPCNIQMEDPTFKENYRFHAINGYIMDTLPGLVMAQDQRIRWYLLSMGSNENIHSIHFSGHVFTVRKKEEYKMALYNLYPGVFETVEMLPSKAGIWRVECLIGEHLHAGMSTLFLVYSNKCQTPLGMASGHIRDFQITASGQYGQWAPKLARLHYSGSINAWSTKEPFSWIKVDLLAPMIIHGIKTQGARQKFSDLYISQFIIMYSLDGKKWQTYRGNSTGTLMVFFGNVDSSGIKHNIFNPPIIARYIRLHPTHYSIRSTLRMELMGCDLNSCSMPLGMESKAISDAQITASSYFTNMFATWSPSKARLHLQGRSNAWRPQVNNPKEWLQVDFQKTMKVTGVTTQGVKSLDTSMYVKEFLISSSQDGHQWTLFFQNGKVKVFQGNQDSFTPVVNSLDPPLLTRYLRIHPQSWEHQIALRMEVLGCEAQDLY

SEQ ID NO: 767 - DNA, 4371 bp, synthetic construct
  misc_feature 1..4371: note = Variant of human B-domain deleted Factor VIII
  source 1..4371: mol_type = other DNA
atgcagattgaactgtctacctgcttcttcctctgtttgctgaggttctgctttagcgccactagacggtactaccttggcgctgtggagctgtcctgggactatatgcagagtgatttgggagagcttcccgtcgacgcacgatttcctcctcgcgttccaaagtcatttcccttcaacacaagctcggtgtacaagaagacgctcttcgtcgaattcaccgatcacctgttcaatatcgccaaacccagaccaccatggatgggtcttttggggcctaccatacaagcggaggtgtatgacacagttgttatcactctcaagaacatggcttctcatccggtaagtcttcacgcagtgggcgtgtcctactggaaagcttcagaaggagccgagtatgatgatcagacatcccagagggagaaagaagacgacaaggtatttccaggtgggtctcatacctatgtgtggcaagtgctcaaagagaatggccctatggcaagcgatccgctctgtttgacttacagctacctttcacacgttgacctcgtcaaggacctcaactccgggttgattggagccttgttggtatgcagggaaggatctcttgccaaagagaagacacagaccctccacaagtttatccttctctttgctgtgttcgatgagggcaaaagttggcatagcgaaacgaagaattccctcatgcaggatcgcgacgcagccagcgccagagcttggcccaagatgcacactgtgaacggatatgtcaataggtcacttcctggcttgattgggtgtcatcggaaaagtgtctactggcacgtgatcggaatggggacaacaccagaggtccactccatatttctcgaaggccataccttccttgttcgaaaccacagacaggcatccttggggatctctcccattacctttctcactgcccaaacgctccttatggacttgggtcagttccttctcttctgccatatcagctcacaccagcatgatggtatggaagcttatgtgaaagtcgacagttgtcctgaggagccacagttgcgcatgaagaataatgaagaagccgaggattacgacgacgatctcaccgattctgagatggacgtggtgaggtttgatgacgacaactctccctccttcattcaaatccggagcgtggcgaagaaacaccccaagacttgggtccactatatagcggcggaagaggaggattgggattacgctcctcttgtattggcaccagatgaccgctcatacaaaagccagtacctcaacaacggaccgcagagaattggccggaagtataagaaagtgcgatttatggcctatacagacgaaacctttaagacaagggaggccatccagcatgagagtgggattttgggacctcttctttacggcgaagttggtgataccctcctcatcatcttcaagaatcaagcttctcgcccctataacatttacccacacgggatcactgacgttaggcctttgtatagcagaagacttcccaaaggcgtgaagcatctcaaagacttccccattttgccaggcgagatctttaagtacaaatggaccgtcacagtggaagatggaccgactaaatcagaccctcgatgccttacgcggtactattcctccttcgtgaatatggagagagatttggcaagcggactcataggaccactcctcatctgttacaaggaatctgtagaccagaggggtaaccagattatgagtgataaacgcaatgtgatcctttttagcgtcttcgacgagaaccggtcctggtacttgaccgagaatatacaaaggttccttcccaaccccgcaggcgttcagttggaagaccctgagtttcaggccagcaatattatgcactcaatcaacggctatgtgtttgatagtctccagctttctgtttgcctccatgaagtagcctattggtacatcttgtcaattggtgctcaaacagacttcctctccgtcttcttctccggctacacctttaagcacaagatggtgtatgaggacactctcacactctttccattttctggagaaaccgtgttcatgagcatggagaatccaggcctttggatcttgggttgccacaacagtgattttcgcaatcggggaatgactgctctcctcaaagtcagcagctgtgataagaacacaggcgactattacgaagattcttacgaggacataagtgcctacttgttgtccaagaataacgccattgagcccagatcattctcccagaatcctcccgtgcttaaaaggcatcagcgcgaaatcaccagaactactcttcagtctgatcaagaggagattgactatgacgacaccataagcgtggaaatgaagaaggaggatttcgatatctatgacgaagatgagaaccagtctccgcggagctttcagaagaagacgcgacactacttcattgcagcagtcgaaaggctttgggactacggtatgtcatcatcccctcatgtgttgcgcaatagagctcagagtggaagtgttccacagttcaagaaagtcgtctttcaagagtttacagatggcagcttcacacagcctctctatcggggcgagcttaacgaacatttgggactccttggtccctatatccgagccgaagtggaggacaacattatggttacctttaggaatcaagcctctcgcccctacagcttctactcctccctcatcagttatgaggaggatcagagacaaggcgctgaaccacggaagaactttgtgaaaccgaatgagacgaagacctacttctggaaagtacagcaccacatggcccccacaaaagacgaattcgattgcaaagcatgggcgtatttttcagacgttgacttggagaaagatgtacattcaggacttattggtcctttgttggtgtgtcacactaacactctcaatccagcccatggcaggcaggtgacagtccaggaattcgctcttttctttaccatctttgatgagaccaagtcctggtacttcacggaaaacatggagcgcaattgcagagccccctgtaacatacagatggaggaccctaccttcaaggaaaattatcggttccacgcaatcaacggatacattatggatacactccctggccttgtgatggctcaggaccaacgaatcaggtggtacctcctcagcatgggttctaatgagaacatacactccattcacttttcaggacatgtgttcactgtccggaagaaagaagagtataagatggccctctacaatttgtatccaggcgtgtttgagaccgttgaaatgcttccctctaaagctggcatctggagagtagagtgcttgatcggagaacatcttcacgcaggtatgagcaccttgttcctcgtgtacagcaacaaatgtcagaccccacttggcatggccagtggacacattcgcgactttcagatcacagcatctggccagtatggacaatgggccccaaagttggctcgcctccattactccggtagcataaatgcgtggtccactaaagaacctttcagctggattaaggtcgatcttcttgcccccatgatcatccacggcattaagacacagggagcgaggcagaaattctcctccctctacatctcacagttcattattatgtatagtttggacggcaagaagtggcaaacttatagaggtaacagtactggaacactcatggtgttcttcggcaacgttgatagctctggcatcaaacacaacatctttaatcctcccataatagctcggtacatcagattgcatccgacccactacagcattaggagtacactccgaatggagcttatgggttgcgacttgaattcctgttcaatgccactcggaatggagtctaaagccatctctgatgcacagataaccgccagtagctactttacgaacatgtttgctacgtggtcaccctctaaggcaaggcttcatttgcaaggccggtctaatgcctggagacctcaggtgaacaacccgaaagaatggctccaggtggactttcagaagaccatgaaagtaacaggtgtcactactcagggagttaagtccttggataccagcatgtatgtgaaggagttccttatttcctcatcacaagatggccaccagtggaccctcttctttcagaatggtaaggtcaaagtgtttcagggcaatcaagacagcttcacacccgtggtgaacagtcttgatcctccactcttgacacgataccttcgaatccatccacagtcttgggagcaccagattgcattgcgcatggaagtacttggatgcgaggctcaggacctctac

SEQ ID NO: 768 - protein, 1457 aa, synthetic construct
  REGION 1..1457: note = Variant of human B-domain deleted Factor VIII
MQIELSTCFFLCLLRFCFSATRRYYLGAVELSWDYMQSDLGELPVDARFPPRVPKSFPFNTSSVYKKTLFVEFTDHLFNIAKPRPPWMGLLGPTIQAEVYDTVVITLKNMASHPVSLHAVGVSYWKASEGAEYDDQTSQREKEDDKVFPGGSHTYVWQVLKENGPMASDPLCLTYSYLSHVDLVKDLNSGLIGALLVCREGSLAKEKTQTLHKFILLFAVFDEGKSWHSETKNSLMQDRDAASARAWPKMHTVNGYVNRSLPGLIGCHRKSVYWHVIGMGTTPEVHSIFLEGHTFLVRNHRQASLGISPITFLTAQTLLMDLGQFLLFCHISSHQHDGMEAYVKVDSCPEEPQLRMKNNEEAEDYDDDLTDSEMDVVRFDDDNSPSFIQIRSVAKKHPKTWVHYIAAEEEDWDYAPLVLAPDDRSYKSQYLNNGPQRIGRKYKKVRFMAYTDETFKTREAIQHESGILGPLLYGEVGDTLLIIFKNQASRPYNIYPHGITDVRPLYSRRLPKGVKHLKDFPILPGEIFKYKWTVTVEDGPTKSDPRCLTRYYSSFVNMERDLASGLIGPLLICYKESVDQRGNQIMSDKRNVILFSVFDENRSWYLTENIQRFLPNPAGVQLEDPEFQASNIMHSINGYVFDSLQLSVCLHEVAYWYILSIGAQTDFLSVFFSGYTFKHKMVYEDTLTLFPFSGETVFMSMENPGLWILGCHNSDFRNRGMTALLKVSSCDKNTGDYYEDSYEDISAYLLSKNNAIEPRSFSQNPPVLKRHQREITRTTLQSDQEEIDYDDTISVEMKKEDFDIYDEDENQSPRSFQKKTRHYFIAAVERLWDYGMSSSPHVLRNRAQSGSVPQFKKVVFQEFTDGSFTQPLYRGELNEHLGLLGPYIRAEVEDNIMVTFRNQASRPYSFYSSLISYEEDQRQGAEPRKNFVKPNETKTYFWKVQHHMAPTKDEFDCKAWAYFSDVDLEKDVHSGLIGPLLVCHTNTLNPAHGRQVTVQEFALFFTIFDETKSWYFTENMERNCRAPCNIQMEDPTFKENYRFHAINGYIMDTLPGLVMAQDQRIRWYLLSMGSNENIHSIHFSGHVFTVRKKEEYKMALYNLYPGVFETVEMLPSKAGIWRVECLIGEHLHAGMSTLFLVYSNKCQTPLGMASGHIRDFQITASGQYGQWAPKLARLHYSGSINAWSTKEPFSWIKVDLLAPMIIHGIKTQGARQKFSSLYISQFIIMYSLDGKKWQTYRGNSTGTLMVFFGNVDSSGIKHNIFNPPIIARYIRLHPTHYSIRSTLRMELMGCDLNSCSMPLGMESKAISDAQITASSYFTNMFATWSPSKARLHLQGRSNAWRPQVNNPKEWLQVDFQKTMKVTGVTTQGVKSLDTSMYVKEFLISSSQDGHQWTLFFQNGKVKVFQGNQDSFTPVVNSLDPPLLTRYLRIHPQSWEHQIALRMEVLGCEAQDLY

SEQ ID NO: 769 - DNA, 4371 bp, synthetic construct
  misc_feature 1..4371: note = Variant of human B-domain deleted Factor VIII
  source 1..4371: mol_type = other DNA
atgcagattgaactgtctacctgcttcttcctctgtttgctgaggttctgctttagcgccactagacggtactaccttggcgctgtggagctgtcctgggactatatgcagagtgatttgggagagcttcccgtcgacgcacgatttcctcctcgcgttccaaagtcatttcccttcaacacaagcgtggtgtacaagaagacgctcttcgtcgaattcaccgatcacctgttcaatatcgccaaacccagaccaccatggatgggtcttttggggcctaccatacaagcggaggtgtatgacacagttgttatcactctcaagaacatggcttctcatccggtaagtcttcacgcagtgggcgtgtcctactggaaagcttcagaaggagccgagtatgatgatcagacatcccagagggagaaagaagacgacaaggtatttccaggtgggtctcatacctatgtgtggcaagtgctcaaagagaatggccctatggcaagcgatccgctctgtttgacttacagctacctttcacacgttgacctcgtcaaggacctcaactccgggttgattggagccttgttggtatgcagggaaggatctcttgccaaagagaagacacagaccctccacaagtttatccttctctttgctgtgttcgatgagggcaaaagttggcatagcgaaacgaagaattccctcatgcaggatcgcgacgcagccagcgccagagcttggcccaagatgcacactgtgaacggatatgtcaataggtcacttcctggcttgattgggtgtcatcggaaaagtgtctactggcacgtgatcggaatggggacaacaccagaggtccactccatatttctcgaaggccataccttccttgttcgaaaccacagacaggcatccttggagatctctcccattacctttctcactgcccaaacgctccttatggacttgggtcagttccttctcttctgccatatcagctcacaccagcatgatggtatggaagcttatgtgaaagtcgacagttgtcctgaggagccacagttgcgcatgaagaataatgaagaagccgaggattacgacgacgatctcaccgattctgagatggacgtggtgaggtttgatgacgacaactctccctccttcattcaaatccggagcgtggcgaagaaacaccccaagacttgggtccactatatagcggcggaagaggaggattgggattacgctcctcttgtattggcaccagatgaccgctcatacaaaagccagtacctcaacaacggaccgcagagaattggccggaagtataagaaagtgcgatttatggcctatacagacgaaacctttaagacaagggaggccatccagcatgagagtgggattttgggacctcttctttacggcgaagttggtgataccctcctcatcatcttcaagaatcaagcttctcgcccctataacatttacccacacgggatcactgacgttaggcctttgtatagcagaagacttcccaaaggcgtgaagcatctcaaagacttccccattttgccaggcgagatctttaagtacaaatggaccgtcacagtggaagatggaccgactaaatcagaccctcgatgccttacgcggtactattcctccttcgtgaatatggagagagatttggcaagcggactcataggaccactcctcatctgttacaaggaatctgtagaccagaggggtaaccagattatgagtgataaacgcaatgtgatcctttttagcgtcttcgacgagaaccggtcctggtacttgaccgagaatatacaaaggttccttcccaaccccgcaggcgttcagttggaagaccctgagtttcaggccagcaatattatgcactcaatcaacggctatgtgtttgatagtctccagctttctgtttgcctccatgaagtagcctattggtacatcttgtcaattggtgctcaaacagacttcctctccgtcttcttctccggctacacctttaagcacaagatggtgtatgaggacactctcacactctttccattttctggagaaaccgtgttcatgagcatggagaatccaggcctttggatcttgggttgccacaacagtgattttcgcaatcggggaatgactgctctcctcaaagtcagcagctgtgataagaacacaggcgactattacgaagattcttacgaggacataagtgcctactttttgtccaagaataacgccattgagcccagatcattctcccagaatcctcccgtgcttaaaaggcatcagcgcgaaatcaccagaactactcttcagtctgatcaagaggagattgactatgacgacaccataagcgtggaaatgaagaaggaggatttcgatatctatgacgaagatgagaaccagtctccgcggagctttcagaagaagacgcgacactacttcattgcagcagtcgaaaggctttgggactacggtatgtcatcatcccctcatgtgttgcgcaatagagctcagagtggaagtgttccacagttcaagaaagtcgtctttcaagagtttacagatggcagcttcacacagcctctctatcggggcgagcttaacgaacatttgggactccttggtccctatatccgagccgaagtggaggacaacattatggttacctttaggaatcaagcctctcgcccctacagcttctactcctccctcatcagttatgaggaggatcagagacaaggcgctgaaccacggaagaactttgtgaaaccgaatgagacgaagacctacttctggaaagtacagcaccacatggcccccacaaaagacgaattcgattgcaaagcatgggcgtatttttcagacgttgacttggagaaagatgtacattcaggacttattggtcctttgttggtgtgtcacactaacactctcaatccagcccatggcaggcaggtgacagtccaggaattcgctcttttctttaccatctttgatgagaccaagtcctggtacttcacggaaaacatggagcgcaattgcagagccccctgtaacatacagatggaggaccctaccttcaaggaaaattatcggttccacgcaatcaacggatacattatggatacactccctggccttgtgatggctcaggaccaacgaatcaggtggtacctcctcagcatgggttctaatgagaacatacactccattcacttttcaggacatgtgttcactgtccggaagaaagaagagtataagatggccctctacaatttgtatccaggcgtgtttgagaccgttgaaatgcttccctctaaagctggcatctggagagtagagtgcttgatcggagaacatcttcacgcaggtatgagcaccttgttcctcgtgtacagcaacaaatgtcagaccccacttggcatggccagtggacacattcgcgactttcagatcacagcatctggccagtatggacaatgggccccaaagttggctcgcctccattactccggtagcataaatgcgtggtccactaaagaacctttcagctggattaaggtcgatcttcttgcccccatgatcatccacggcattaagacacagggagcgaggcagaaattctcctcgctctacatctcacagttcattattatgtatagtttggacggcaagaagtggcaaacttatagaggtaacagtactggaacactcatggtgttcttcggcaacgttgatagctctggcatcaaacacaacatctttaatcctcccataatagctcggtacatcagattgcatccgacccactacagcattaggagtacactccgaatggagcttatgggttgcgacttgaattcctgttcaatgccactcggaatggagtctaaagccatctctgatgcacagataaccgccagtagctactttacgaacatgtttgctacgtggtcaccctctaaggcaaggcttcatttgcaaggccggtctaatgcctggagacctcaggtgaacaacccgaaagaatggctccaggtggactttcagaagaccatgaaagtaacaggtgtcactactcagggagttaagtccttggataccagcatgtatgtgaaggagttccttatttcctcatcacaagatggccaccagtggaccctcttctttcagaatggtaaggtcaaagtgtttcagggcaatcaagacagcttcacacccgtggtgaacagtcttgatcctccactcttgacacgataccttcgaatccatccacagtcttgggagcaccagattgcattgcgcatggaagtacttggatgcgaggctcaggacctctac

SEQ ID NO: 770 - protein, 1457 aa, synthetic construct
  REGION 1..1457: note = Variant of human B-domain deleted Factor VIII
MQIELSTCFFLCLLRFCFSATRRYYLGAVELSWDYMQSDLGELPVDARFPPRVPKSFPFNTSVVYKKTLFVEFTDHLFNIAKPRPPWMGLLGPTIQAEVYDTVVITLKNMASHPVSLHAVGVSYWKASEGAEYDDQTSQREKEDDKVFPGGSHTYVWQVLKENGPMASDPLCLTYSYLSHVDLVKDLNSGLIGALLVCREGSLAKEKTQTLHKFILLFAVFDEGKSWHSETKNSLMQDRDAASARAWPKMHTVNGYVNRSLPGLIGCHRKSVYWHVIGMGTTPEVHSIFLEGHTFLVRNHRQASLEISPITFLTAQTLLMDLGQFLLFCHISSHQHDGMEAYVKVDSCPEEPQLRMKNNEEAEDYDDDLTDSEMDVVRFDDDNSPSFIQIRSVAKKHPKTWVHYIAAEEEDWDYAPLVLAPDDRSYKSQYLNNGPQRIGRKYKKVRFMAYTDETFKTREAIQHESGILGPLLYGEVGDTLLIIFKNQASRPYNIYPHGITDVRPLYSRRLPKGVKHLKDFPILPGEIFKYKWTVTVEDGPTKSDPRCLTRYYSSFVNMERDLASGLIGPLLICYKESVDQRGNQIMSDKRNVILFSVFDENRSWYLTENIQRFLPNPAGVQLEDPEFQASNIMHSINGYVFDSLQLSVCLHEVAYWYILSIGAQTDFLSVFFSGYTFKHKMVYEDTLTLFPFSGETVFMSMENPGLWILGCHNSDFRNRGMTALLKVSSCDKNTGDYYEDSYEDISAYFLSKNNAIEPRSFSQNPPVLKRHQREITRTTLQSDQEEIDYDDTISVEMKKEDFDIYDEDENQSPRSFQKKTRHYFIAAVERLWDYGMSSSPHVLRNRAQSGSVPQFKKVVFQEFTDGSFTQPLYRGELNEHLGLLGPYIRAEVEDNIMVTFRNQASRPYSFYSSLISYEEDQRQGAEPRKNFVKPNETKTYFWKVQHHMAPTKDEFDCKAWAYFSDVDLEKDVHSGLIGPLLVCHTNTLNPAHGRQVTVQEFALFFTIFDETKSWYFTENMERNCRAPCNIQMEDPTFKENYRFHAINGYIMDTLPGLVMAQDQRIRWYLLSMGSNENIHSIHFSGHVFTVRKKEEYKMALYNLYPGVFETVEMLPSKAGIWRVECLIGEHLHAGMSTLFLVYSNKCQTPLGMASGHIRDFQITASGQYGQWAPKLARLHYSGSINAWSTKEPFSWIKVDLLAPMIIHGIKTQGARQKFSSLYISQFIIMYSLDGKKWQTYRGNSTGTLMVFFGNVDSSGIKHNIFNPPIIARYIRLHPTHYSIRSTLRMELMGCDLNSCSMPLGMESKAISDAQITASSYFTNMFATWSPSKARLHLQGRSNAWRPQVNNPKEWLQVDFQKTMKVTGVTTQGVKSLDTSMYVKEFLISSSQDGHQWTLFFQNGKVKVFQGNQDSFTPVVNSLDPPLLTRYLRIHPQSWEHQIALRMEVLGCEAQDLY

SEQ ID NO: 771 - DNA, 4371 bp, synthetic construct
  misc_feature 1..4371: note = Variant of human B-domain deleted Factor VIII
  source 1..4371: mol_type = other DNA
atgcagattgaactgtctacctgcttcttcctctgtttgctgaggttctgctttagcgccactagacggtactaccttggcgctgtggagctgtcctgggactatatgcagagtgatttgggagagcttcccgtcgacgcacgatttcctcctcgcgttccaaagtcatttcccttcaacacaagcgtggtgtacaagaagacgctcttcgtcgaattcaccgatcacctgttcaatatcgccaaacccagaccaccatggatgggtcttttggggcctaccatacaagcggaggtgtatgacacagttgttatcactctcaagaacatggcttctcatccggtaagtcttcacgcagtgggcgtgtcctactggaaagcttcagaaggagccgagtatgatgatcagacatcccagagggagaaagaagacgacaaggtatttccaggtgggtctcatacctatgtgtggcaagtgctcaaagagaatggccctatggcaagcgatccgctctgtttgacttacagctacctttcacacgttgacctcgtcaaggacctcaactccgggttgattggagccttgttggtatgcagggaaggatctcttgccaaagagaagacacagaccctccacaagtttatccttctctttgctgtgttcgatgagggcaaaagttggcatagcgaaacgaagaattccctcatgcaggatcgcgacgcagccagcgccagagcttggcccaagatgcacactgtgaacggatatgtcaataggtcacttcctggcttgattgggtgtcatcggaaaagtgtctactggcacgtgatcggaatggggacaacaccagaggtccactccatatttctcgaaggccataccttccttgttcgaaaccacagacaggcatccttggggatctctcccattacctttctcactgcccaaacgctccttatggacttgggtcagttccttctcttctgccatatcagctcacaccagcatgatggtatggaagcttatgtgaaagtcgacagttgtcctgaggagccacagttgcgcatgaagaataatgaagaagccgaggattacgacgacgatctcaccgattctgagatggacgtggtgaggtttgatgacgacaactctccctccttcattcaagcacggagcgtggcgaagaaacaccccaagacttgggtccactatatagcggcggaagaggaggattgggattacgctcctcttgtattggcaccagatgaccgctcatacaaaagccagtacctcaacaacggaccgcagagaattggccggaagtataagaaagtgcgatttatggcctatacagacgaaacctttaagacaagggaggccatccagcatgagagtgggattttgggacctcttctttacggcgaagttggtgataccctcctcatcatcttcaagaatcaagcttctcgcccctataacatttacccacacgggatcactgacgttaggcctttgtatagcagaagacttcccaaaggcgtgaagcatctcaaagacttccccattttgccaggcgagatctttaagtacaaatggaccgtcacagtggaagatggaccgactaaatcagaccctcgatgccttacgcggtactattcctccttcgtgaatatggagagagatttggcaagcggactcataggaccactcctcatctgttacaaggaatctgtagaccagaggggtaaccagattatgagtgataaacgcaatgtgatcctttttagcgtcttcgacgagaaccggtcctggtacttgaccgagaatatacaaaggttccttcccaaccccgcaggcgttcagttggaagaccctgagtttcaggccagcaatattatgcactcaatcaacggctatgtgtttgatagtctccagctttctgtttgcctccatgaagtagcctattggtacatcttgtcaattggtgctcaaacagacttcctctccgtcttcttctccggctacacctttaagcacaagatggtgtatgaggacactctcacactctttccattttctggagaaaccgtgttcatgagcatggagaatccaggcctttggatcttgggttgccacaacagtgattttcgcaatcggggaatgactgctctcctcaaagtcagcagctgtgataagaacacaggcgactattacgaagattcttacgaggacataagtgcctactttttgtccaagaataacgccattgagcccagatcattctcccagaatcctcccgtgcttaaaaggcatcagcgcgaaatcaccagaactactcttcagtctgatcaagaggagattgactatgacgacaccataagcgtggaaatgaagaaggaggatttcgatatctatgacgaagatgagaaccagtctccgcggagctttcagaagaagacgcgacactacttcattgcagcagtcgaaaggctttgggactacggtatgtcatcatcccctcatgtgttgcgcaatagagctcagagtggaagtgttccacagttcaagaaagtcgtctttcaagagtttacagatggcagcttcacacagcctctctatcggggcgagcttaacgaacatttgggactccttggtccctatatccgagccgaagtggaggacaacattatggttacctttaggaatcaagcctctcgcccctacagcttctactcctccctcatcagttatgaggaggatcagagacaaggcgctgaaccacggaagaactttgtgaaaccgaatgagacgaagacctacttctggaaagtacagcaccacatggcccccacaaaagacgaattcgattgcaaagcatgggcgtatttttcagacgttgacttggagaaagatgtacattcaggacttattggtcctttgttggtgtgtcacactaacactctcaatccagcccatggcaggcaggtgacagtccaggaattcgctcttttctttaccatctttgatgagaccaagtcctggtacttcacggaaaacatggagcgcaattgcagagccccctgtaacatacagatggaggaccctaccaacaaggaaaattatcggttccacgcaatcaacggatatattatggatacactccctggccttgtgatggctcaggaccaacgaatcaggtggtacctcctcagcatgggttctaatgagaacatacactccattcacttttcaggacatgtgttcactgtccggaagaaagaagagtataagatggccctctacaatttgtatccaggcgtgtttgagaccgttgaaatgcttccctctaaagctggcatctggagagtagagtgcttgatcggagaacatcttcacgcaggtatgagcaccttgttcctcgtgtacagcaacaaatgtcagaccccacttggcatggccagtggacacattcgcgactttcagatcacagcatctggccagtatggacaatgggccccaaagttggctcgcctccattactccggtagcataaatgcgtggtccactaaagaacctttcagctggattaaggtcgatcttcttgcccccatgatcatccacggcattaagacacagggagcgaggcagaaattctcctccctctacatctcacagttcattattatgtatagtttggacggcaagaagtggcaaacttatagaggtaacagtactggaacactcatggtgttcttcggcaacgttgatagctctggcatcaaacacaacatctttaatcctcccataatagctcggtacatcagattgcatccgacccactacagcattaggagtacactccgaatggagcttatgggttgcgacttgaattcctgttcaatgccactcggaatggagtctaaagccatctctgatgcacagataaccgccagtagctactttacgaacatgtttgctacgtggtcaccctctaaggcaaggcttcatttgcaaggccggtctaatgcctggagacctcaggtgaacaacccgaaagaatggctccaggtggactttcagaagaccatgaaagtaacaggtgtcactactcagggagttaagtccttggataccagcatgtatgtgaaggagttccttatttcctcatcacaagatggccaccagtggaccctcttctttcagaatggtaaggtcaaagtgtttcagggcaatcaagacagcttcacacccgtggtgaacagtcttgatcctccactcttgacacgataccttcgaatccatccacagtcttgggagcaccagattgcattgcgcatggaagtacttggatgcgaggctcaggacctctac

SEQ ID NO: 772 - protein, 1457 aa, synthetic construct
  REGION 1..1457: note = Variant of human B-domain deleted Factor VIII
MQIELSTCFFLCLLRFCFSATRRYYLGAVELSWDYMQSDLGELPVDARFPPRVPKSFPFNTSVVYKKTLFVEFTDHLFNIAKPRPPWMGLLGPTIQAEVYDTVVITLKNMASHPVSLHAVGVSYWKASEGAEYDDQTSQREKEDDKVFPGGSHTYVWQVLKENGPMASDPLCLTYSYLSHVDLVKDLNSGLIGALLVCREGSLAKEKTQTLHKFILLFAVFDEGKSWHSETKNSLMQDRDAASARAWPKMHTVNGYVNRSLPGLIGCHRKSVYWHVIGMGTTPEVHSIFLEGHTFLVRNHRQASLGISPITFLTAQTLLMDLGQFLLFCHISSHQHDGMEAYVKVDSCPEEPQLRMKNNEEAEDYDDDLTDSEMDVVRFDDDNSPSFIQARSVAKKHPKTWVHYIAAEEEDWDYAPLVLAPDDRSYKSQYLNNGPQRIGRKYKKVRFMAYTDETFKTREAIQHESGILGPLLYGEVGDTLLIIFKNQASRPYNIYPHGITDVRPLYSRRLPKGVKHLKDFPILPGEIFKYKWTVTVEDGPTKSDPRCLTRYYSSFVNMERDLASGLIGPLLICYKESVDQRGNQIMSDKRNVILFSVFDENRSWYLTENIQRFLPNPAGVQLEDPEFQASNIMHSINGYVFDSLQLSVCLHEVAYWYILSIGAQTDFLSVFFSGYTFKHKMVYEDTLTLFPFSGETVFMSMENPGLWILGCHNSDFRNRGMTALLKVSSCDKNTGDYYEDSYEDISAYFLSKNNAIEPRSFSQNPPVLKRHQREITRTTLQSDQEEIDYDDTISVEMKKEDFDIYDEDENQSPRSFQKKTRHYFIAAVERLWDYGMSSSPHVLRNRAQSGSVPQFKKVVFQEFTDGSFTQPLYRGELNEHLGLLGPYIRAEVEDNIMVTFRNQASRPYSFYSSLISYEEDQRQGAEPRKNFVKPNETKTYFWKVQHHMAPTKDEFDCKAWAYFSDVDLEKDVHSGLIGPLLVCHTNTLNPAHGRQVTVQEFALFFTIFDETKSWYFTENMERNCRAPCNIQMEDPTNKENYRFHAINGYIMDTLPGLVMAQDQRIRWYLLSMGSNENIHSIHFSGHVFTVRKKEEYKMALYNLYPGVFETVEMLPSKAGIWRVECLIGEHLHAGMSTLFLVYSNKCQTPLGMASGHIRDFQITASGQYGQWAPKLARLHYSGSINAWSTKEPFSWIKVDLLAPMIIHGIKTQGARQKFSSLYISQFIIMYSLDGKKWQTYRGNSTGTLMVFFGNVDSSGIKHNIFNPPIIARYIRLHPTHYSIRSTLRMELMGCDLNSCSMPLGMESKAISDAQITASSYFTNMFATWSPSKARLHLQGRSNAWRPQVNNPKEWLQVDFQKTMKVTGVTTQGVKSLDTSMYVKEFLISSSQDGHQWTLFFQNGKVKVFQGNQDSFTPVVNSLDPPLLTRYLRIHPQSWEHQIALRMEVLGCEAQDLY

SEQ ID NO: 773 - DNA, 4371 bp, synthetic construct
  misc_feature 1..4371: note = Variant of human B-domain deleted Factor VIII
  source 1..4371: mol_type = other DNA
atgcagattgaactgtctacctgcttcttcctctgtttgctgaggttctgctttagcgccactagacggtactaccttggcgctgtggagctgtcctgggactatatgcagagtgatttgggagagcttcccgtcgacgcacgatttcctcctcgcgttccaaagtcatttcccttcaacacaagcgtggtgtacaagaagacgctcttcgtcgaattcaccgatcacctgttcaatatcgccaaacccagaccaccatggatgggtcttttggggcctaccatacaagcggaggtgtatgacacagttgttatcactctcaagaacatggcttctcatccggtaagtcttcacgcagtgggcgtgtcctactggaaagcttcagaaggagccgagtatgatgatcagacatcccagagggagaaagaagacgacaaggtatttccaggtgggtctcatacctatgtgtggcaagtgctcaaagagaatggccctatggcaagcgatccgctctgtttgacttacagctacctttcacacgttgacctcgtcaaggacctcaactccgggttgattggagccttgttggtatgcagggaaggatctcttgccaaagagaagacacagaccctccacaagtttatccttctctttgctgtgttcgatgagggcaaaagttggcatagcgaaacgaagaattccctcatgcaggatcgcgacgcagccagcgccagagcttggcccaagatgcacactgtgaacggatatgtcaataggtcacttcctggcttgattgggtgtcatcggaaaagtgtctactggcacgtgatcggaatggggacaacaccagaggtccactccatatttctcgaaggccataccttccttgttcgaaaccacagacaggcatccttggagatctctcccattacctttctcactgcccaaacgctccttatggacttgggtcagttccttctcttctgccatatcagctcacaccagcatgatggtatggaagcttatgtgaaagtcgacagttgtcctgaggagccacagttgcgcatgaagaataatgaagaagccgaggattacgacgacgatctcaccgattctgagatggacgtggtgaggtttgatgacgacaactctccctccgtcattcaaatccggagcgtggcgaagaaacaccccaagacttgggtccactatatagcggcggaagaggaggattgggattacgctcctcttgtattggcaccagatgaccgctcatacaaaagccagtacctcaacaacggaccgcagagaattggccggaagtataagaaagtgcgatttatggcctatacagacgaaacctttaagacaagggaggccatccagcatgagagtgggattttgggacctcttctttacggcgaagttggtgataccctcctcatcatcttcaagaatcaagcttctcgcccctataacatttacccacacgggatcactgacgttaggcctttgtatagcagaagacttcccaaaggcgtgaagcatctcaaagacttccccattttgccaggcgagatctttaagtacaaatggaccgtcacagtggaagatggaccgactaaatcagaccctcgatgccttacgcggtactattcctccttcgtgaatatggagagagatttggcaagcggactcataggaccactcctcatctgttacaaggaatctgtagaccagaggggtaaccagattatgagtgataaacgcaatgtgatcctttttagcgtcttcgacgagaaccggtcctggtacttgaccgagaatatacaaaggttccttcccaaccccgcaggcgttcagttggaagaccctgagtttcaggccagcaatattatgcactcaatcaacggctatgtgtttgatagtctccagctttctgtttgcctccatgaagtagcctattggtacatcttgtcaattggtgctcaaacagacttcctctccgtcttcttctccggctacacctttaagcacaagatggtgtatgaggacactctcacactctttccattttctggagaaaccgtgttcatgagcatggagaatccaggcctttggatcttgggttgccacaacagtgattttcgcaatcggggaatgactgctctcctcaaagtcagcagctgtgataagaacacaggcgactattacgaagattcttacgaggacataagtgcctacttgttgtccaagaataacgccattgagcccagatcattctcccagaatcctcccgtgcttaaaaggcatcagcgcgaaatcaccagaactactcttcagtctgatcaagaggagattgactatgacgacaccataagcgtggaaatgaagaaggaggatttcgatatctatgacgaagatgagaaccagtctccgcggagctttcagaagaagacgcgacactacttcattgcagcagtcgaaaggctttgggactacggtatgtcatcatcccctcatgtgttgcgcaatagagctcagagtggaagtgttccacagttcaagaaagtcgtctttcaagagtttacagatggcagcttcacacagcctctctatcggggcgagcttaacgaacatttgggactccttggtccctatatccgagccgaagtggaggacaacattatggttacctttaggaatcaagcctctcgcccctacagcttctactcctccctcatcagttatgaggaggatcagagacaaggcgctgaaccacggaagaactttgtgaaaccgaatgagacgaagacctacttctggaaagtacagcaccacatggcccccacaaaagacgaattcgattgcaaagcatgggcgtatttttcagacgttgacttggagaaagatgtacattcaggacttattggtcctttgttggtgtgtcacactaacactctcaatccagcccatggcaggcaggtgacagtccaggaattcgctcttttctttaccatctttgatgagaccaagtcctggtacttcacggaaaacatggagcgcaattgcagagccccctgtaacatacagatggaggaccctacctttaaggaaaattatcggttccacgcaatcaacggatatattatggatacactccctggccttgtgatggctcaggaccaacgaatcaggtggtacctcctcagcatgggttctaatgagaacatacactccattcacttttcaggacatgtgttcactgtccggaagaaagaagagtataagatggccctctacaatttgtatccaggcgtgtttgagaccgttgaaatgcttccctctaaagctggcatctggagagtagagtgcttgatcggagaacatcttcacgcaggtatgagcaccttgttcctcgtgtacagcaacaaatgtcagaccccacttggcatggccagtggacacattcgcgactttcagatcacagcatctggccagtatggacaatgggccccaaagttggctcgcctccattactccggtagcataaatgcgtggtccactaaagaacctttcagctggattaaggtcgatcttcttgcccccatgatcatccacggcattaagacacagggagcgaggcagaaattctcctccctctacatctcacagttcattattatgtatagtttggacggcaagaagtggcaaacttatagaggtaacagtactggaacactcatggtgttcttcggcaacgttgatagctctggcatcaaacacaacatctttaatcctcccataatagctcggtacatcagattgcatccgacccactacagcattaggagtacactccgaatggagcttatgggttgcgacttgaattcctgttcaatgccactcggaatggagtctaaagccatctctgatgcacagataaccgccagtagctactttacgaacatgtttgctacgtggtcaccctctaaggcaaggcttcatttgcaaggccggtctaatgcctggagacctcaggtgaacaacccgaaagaatggctccaggtggactttcagaagaccatgaaagtaacaggtgtcactactcagggagttaagtccttggataccagcatgtatgtgaaggagttccttatttcctcatcacaagatggccaccagtggaccctcttctttcagaatggtaaggtcaaagtgtttcagggcaatcaagacagcttcacacccgtggtgaacagtcttgatcctccactcttgacacgataccttcgaatccatccacagtcttgggagcaccagattgcattgcgcatggaagtacttggatgcgaggctcaggacctctac

SEQ ID NO: 774 - protein, 1457 aa, synthetic construct
  REGION 1..1457: note = Variant of human B-domain deleted Factor VIII
MQIELSTCFFLCLLRFCFSATRRYYLGAVELSWDYMQSDLGELPVDARFPPRVPKSFPFNTSVVYKKTLFVEFTDHLFNIAKPRPPWMGLLGPTIQAEVYDTVVITLKNMASHPVSLHAVGVSYWKASEGAEYDDQTSQREKEDDKVFPGGSHTYVWQVLKENGPMASDPLCLTYSYLSHVDLVKDLNSGLIGALLVCREGSLAKEKTQTLHKFILLFAVFDEGKSWHSETKNSLMQDRDAASARAWPKMHTVNGYVNRSLPGLIGCHRKSVYWHVIGMGTTPEVHSIFLEGHTFLVRNHRQASLEISPITFLTAQTLLMDLGQFLLFCHISSHQHDGMEAYVKVDSCPEEPQLRMKNNEEAEDYDDDLTDSEMDVVRFDDDNSPSVIQIRSVAKKHPKTWVHYIAAEEEDWDYAPLVLAPDDRSYKSQYLNNGPQRIGRKYKKVRFMAYTDETFKTREAIQHESGILGPLLYGEVGDTLLIIFKNQASRPYNIYPHGITDVRPLYSRRLPKGVKHLKDFPILPGEIFKYKWTVTVEDGPTKSDPRCLTRYYSSFVNMERDLASGLIGPLLICYKESVDQRGNQIMSDKRNVILFSVFDENRSWYLTENIQRFLPNPAGVQLEDPEFQASNIMHSINGYVFDSLQLSVCLHEVAYWYILSIGAQTDFLSVFFSGYTFKHKMVYEDTLTLFPFSGETVFMSMENPGLWILGCHNSDFRNRGMTALLKVSSCDKNTGDYYEDSYEDISAYLLSKNNAIEPRSFSQNPPVLKRHQREITRTTLQSDQEEIDYDDTISVEMKKEDFDIYDEDENQSPRSFQKKTRHYFIAAVERLWDYGMSSSPHVLRNRAQSGSVPQFKKVVFQEFTDGSFTQPLYRGELNEHLGLLGPYIRAEVEDNIMVTFRNQASRPYSFYSSLISYEEDQRQGAEPRKNFVKPNETKTYFWKVQHHMAPTKDEFDCKAWAYFSDVDLEKDVHSGLIGPLLVCHTNTLNPAHGRQVTVQEFALFFTIFDETKSWYFTENMERNCRAPCNIQMEDPTFKENYRFHAINGYIMDTLPGLVMAQDQRIRWYLLSMGSNENIHSIHFSGHVFTVRKKEEYKMALYNLYPGVFETVEMLPSKAGIWRVECLIGEHLHAGMSTLFLVYSNKCQTPLGMASGHIRDFQITASGQYGQWAPKLARLHYSGSINAWSTKEPFSWIKVDLLAPMIIHGIKTQGARQKFSSLYISQFIIMYSLDGKKWQTYRGNSTGTLMVFFGNVDSSGIKHNIFNPPIIARYIRLHPTHYSIRSTLRMELMGCDLNSCSMPLGMESKAISDAQITASSYFTNMFATWSPSKARLHLQGRSNAWRPQVNNPKEWLQVDFQKTMKVTGVTTQGVKSLDTSMYVKEFLISSSQDGHQWTLFFQNGKVKVFQGNQDSFTPVVNSLDPPLLTRYLRIHPQSWEHQIALRMEVLGCEAQDLY

SEQ ID NO: 775 - DNA, 4371 bp, synthetic construct
  misc_feature 1..4371: note = Variant of human B-domain deleted Factor VIII
  source 1..4371: mol_type = other DNA
atgcagattgaactgtctacctgcttcttcctctgtttgctgaggttctgctttagcgccactagacggtactaccttggcgctgtggagctgtcctgggactatatgcagagtgatttgggagagcttcccgtcgacgcacgatttcctcctcgcgttccaaagtcatttcccttcaacacaagcgtggtgtacaagaagacgctcttcgtcgaattcaccgatcacctgttcaatatcgccaaacccagaccaccatggatgggtcttttggggcctaccatacaagcggaggtgtatgacacagttgttatcactctcaagaacatggcttctcatccggtaagtcttcacgcagtgggcgtgtcctactggaaagcttcagaaggagccgagtatgatgatcagacatcccagagggagaaagaagacgacaaggtatttccaggtgggtctcatacctatgtgtggcaagtgctcaaagagaatggccctatggcaagcgatccgctctgtttgacttacagctacctttcacacgttgacctcgtcaaggacctcaactccgggttgattggagccttgttggtatgcagggaaggatctcttgccaaagagaagacacagaccctccacaagtttatccttctctttgctgtgttcgatgagggcaaaagttggcatagcgaaacgaagaattccctcatgcaggatcgcgacgcagccagcgccagagcttggcccaagatgcacactgtgaacggatatgtcaataggtcacttcctggcttgattgggtgtcatcggaaaagtgtctactggcacgtgatcggaatggggacaacaccagaggtccactccatatttctcgaaggccataccttccttgttcgaaaccacagacaggcatccttggggatctctcccattacctttctcactgcccaaacgctccttatggacttgggtcagttccttctcttctgccatatcagctcacaccagcatgatggtatggaagcttatgtgaaagtcgacagttgtcctgaggagccacagttgcgcatgaagaataatgaagaagccgaggattacgacgacgatctcaccgattctgagatggacgtggtgaggtttgatgacgacaactctccctccttcattcaaatccggagcgtggcgaagaaacaccccaagacttgggtccactatatagcggcggaagaggaggattgggattacgctcctcttgtattggcaccagatgaccgctcatacaaaagccagtacctcaacaacggaccgcagagaattggccggaagtataagaaagtgcgatttatggcctatacagacgaaacctttaagacaagggaggccatccagcatgagagtgggattttgggacctcttctttacggcgaagttggtgataccctcctcatcatcttcaagaatcaagcttctcgcccctataacatttacccacacgggatcactgacgttaggcctttgtatagcagaagacttcccaaaggcgtgaagcatctcaaagacttccccattttgccaggcgagatctttaagtacaaatggaccgtcacagtggaagatggaccgactaaatcagaccctcgatgccttacgcggtactattcctccttcgtgaatatggagagagatttggcaagcggactcataggaccactcctcatctgttacaaggaatctgtagaccagaggggtaaccagattatgagtgataaacgcaatgtgatcctttttagcgtcttcgacgagaaccggtcctggtacttgaccgagaatatacaaaggttccttcccaaccccgcaggcgttcagttggaagaccctgagtttcaggccagcaatattatgcactcaatcaacggctatgtgtttgatagtctccagctttctgtttgcctccatgaagtagcctattggtacatcttgtcaattggtgctcaaacagacttcctctccgtcttcttctccggctacacctttaagcacaagatggtgtatgaggacactctcacactctttccattttctggagaaaccgtgttcatgagcatggagaatccaggcctttggatcttgggttgccacaacagtgattttcgcaatcggggaatgactgctctcctcaaagtcagcagctgtgataagaacacaggcgactattacgaagattcttacgaggacataagtgcctactttttgtccaagaataacgccattgagcccagatcattctcccagaatcctcccgtgcttaaaaggcatcagcgcgaaatcaccagaactactcttcagtctgatcaagaggagattgactatgacgacaccataagcgtggaaatgaagaaggaggatttcgatatctatgacgaagatgagaaccagtctccgcggagctttcagaagaagacgcgacactacttcattgcagcagtcgaaaggctttgggactacggtatgtcatcatcccctcatgtgttgcgcaatagagctcagagtggaagtgttccacagttcaagaaagtcgtctttcaagagtttacagatggcagcttcacacagcctctctatcggggcgagcttaacgaacatttgggactccttggtccctatatccgagccgaagtggaggacaacattatggttacctttaggaatcaagcctctcgcccctacagcttctactcctccctcatcagttatgaggaggatcagagacaaggcgctgaaccacggaagaactttgtgaaaccgaatgagacgaagacctacttctggaaagtacagcaccacatggcccccacaaaagacgaattcgattgcaaagcatgggcgtatttttcagacgttgacttggagaaagatgtacattcaggacttattggtcctttgttggtgtgtcacactaacactctcaatccagcccatggcaggcaggtgacagtccaggaattcgctcttttctttaccatctttgatgagaccaagtcctggtacttcacggaaaacatggagcgcaattgcagagccccctgtaacatacagatggaggaccctaccttcaaggaaaattatcggttccacgcaatcaacggatacattatggatacactccctggccttgtgatggctcaggaccaacgaatcaggtggtacctcctcagcatgggttctaatgagaacatacactccattcacttttcaggacatgtgttcactgtccggaagaaagaagagtataagatggccctctacaatttgtatccaggcgtgtttgagaccgttgaaatgcttccctctaaagctggcatctggagagtagagtgcttgatcggagaacatcttcacgcaggtatgagcaccttgttcctcgtgtacagcaacaaatgtcagaccccacttggcatggccagtggacacattcgcgactttcagatcacagcatctggccagtatggacaatgggccccaaagttggctcgcctccattactccggtagcataaatgcgtggtccactaaagaacctttcagctggattaaggtcgatcttcttgcccccatgatcatccacggcattaagacacagggagcgaggcagaaattctccgatctctacatctcacagttcattattatgtatagtttggacggcaagaagtggcaaacttatagaggtaacagtactggaacactcatggtgttcttcggcaacgttgatagctctggcatcaaacacaacatctttaatcctcccataatagctcggtacatcagattgcatccgacccactacagcattaggagtacactccgaatggagcttatgggttgcgacttgaattcctgttcaatgccactcggaatggagtctaaagccatctctgatgcacagataaccgccagtagctactttacgaacatgtttgctacgtggtcaccctctaaggcaaggcttcatttgcaaggccggtctaatgcctggagacctcaggtgaacaacccgaaagaatggctccaggtggactttcagaagaccatgaaagtaacaggtgtcactactcagggagttaagtccttggataccagcatgtatgtgaaggagttccttatttcctcatcacaagatggccaccagtggaccctcttctttcagaatggtaaggtcaaagtgtttcagggcaatcaagacagcttcacacccgtggtgaacagtcttgatcctccactcttgacacgataccttcgaatccatccacagtcttgggagcaccagattgcattgcgcatggaagtacttggatgcgaggctcaggacctctac

SEQ ID NO: 776 - protein, 1457 aa, synthetic construct
  REGION 1..1457: note = Variant of human B-domain deleted Factor VIII
MQIELSTCFFLCLLRFCFSATRRYYLGAVELSWDYMQSDLGELPVDARFPPRVPKSFPFNTSVVYKKTLFVEFTDHLFNIAKPRPPWMGLLGPTIQAEVYDTVVITLKNMASHPVSLHAVGVSYWKASEGAEYDDQTSQREKEDDKVFPGGSHTYVWQVLKENGPMASDPLCLTYSYLSHVDLVKDLNSGLIGALLVCREGSLAKEKTQTLHKFILLFAVFDEGKSWHSETKNSLMQDRDAASARAWPKMHTVNGYVNRSLPGLIGCHRKSVYWHVIGMGTTPEVHSIFLEGHTFLVRNHRQASLGISPITFLTAQTLLMDLGQFLLFCHISSHQHDGMEAYVKVDSCPEEPQLRMKNNEEAEDYDDDLTDSEMDVVRFDDDNSPSFIQIRSVAKKHPKTWVHYIAAEEEDWDYAPLVLAPDDRSYKSQYLNNGPQRIGRKYKKVRFMAYTDETFKTREAIQHESGILGPLLYGEVGDTLLIIFKNQASRPYNIYPHGITDVRPLYSRRLPKGVKHLKDFPILPGEIFKYKWTVTVEDGPTKSDPRCLTRYYSSFVNMERDLASGLIGPLLICYKESVDQRGNQIMSDKRNVILFSVFDENRSWYLTENIQRFLPNPAGVQLEDPEFQASNIMHSINGYVFDSLQLSVCLHEVAYWYILSIGAQTDFLSVFFSGYTFKHKMVYEDTLTLFPFSGETVFMSMENPGLWILGCHNSDFRNRGMTALLKVSSCDKNTGDYYEDSYEDISAYFLSKNNAIEPRSFSQNPPVLKRHQREITRTTLQSDQEEIDYDDTISVEMKKEDFDIYDEDENQSPRSFQKKTRHYFIAAVERLWDYGMSSSPHVLRNRAQSGSVPQFKKVVFQEFTDGSFTQPLYRGELNEHLGLLGPYIRAEVEDNIMVTFRNQASRPYSFYSSLISYEEDQRQGAEPRKNFVKPNETKTYFWKVQHHMAPTKDEFDCKAWAYFSDVDLEKDVHSGLIGPLLVCHTNTLNPAHGRQVTVQEFALFFTIFDETKSWYFTENMERNCRAPCNIQMEDPTFKENYRFHAINGYIMDTLPGLVMAQDQRIRWYLLSMGSNENIHSIHFSGHVFTVRKKEEYKMALYNLYPGVFETVEMLPSKAGIWRVECLIGEHLHAGMSTLFLVYSNKCQTPLGMASGHIRDFQITASGQYGQWAPKLARLHYSGSINAWSTKEPFSWIKVDLLAPMIIHGIKTQGARQKFSDLYISQFIIMYSLDGKKWQTYRGNSTGTLMVFFGNVDSSGIKHNIFNPPIIARYIRLHPTHYSIRSTLRMELMGCDLNSCSMPLGMESKAISDAQITASSYFTNMFATWSPSKARLHLQGRSNAWRPQVNNPKEWLQVDFQKTMKVTGVTTQGVKSLDTSMYVKEFLISSSQDGHQWTLFFQNGKVKVFQGNQDSFTPVVNSLDPPLLTRYLRIHPQSWEHQIALRMEVLGCEAQDLY

SEQ ID NO: 777 - DNA, 4371 bp, synthetic construct
  misc_feature 1..4371: note = Variant of human B-domain deleted Factor VIII
  source 1..4371: mol_type = other DNA
atgcagattgaactgtctacctgcttcttcctctgtttgctgaggttctgctttagcgccactagacggtactaccttggcgctgtggagctgtcctgggactatatgcagagtgatttgggagagcttcccgtcgacgcacgatttcctcctcgcgttccaaagtcatttcccttcaacacaagcgtggtgtacaagaagacgctcttcgtcgaattcaccgatcacctgttcaatatcgccaaacccagaccaccatggatgggtcttttggggcctaccatacaagcggaggtgtatgacacagttgttatcactctcaagaacatggcttctcatccggtaagtcttcacgcagtgggcgtgtcctactggaaagcttcagaaggagccgagtatgatgatcagacatcccagagggagaaagaagacgacaaggtatttccaggtgggtctcatacctatgtgtggcaagtgctcaaagagaatggccctatggcaagcgatccgctctgtttgacttacagctacctttcacacgttgacctcgtcaaggacctcaactccgggttgattggagccttgttggtatgcagggaaggatctcttgccaaagagaagacacagaccctccacaagtttatccttctctttgctgtgttcgatgagggcaaaagttggcatagcgaaacgaagaattccctcatgcaggatcgcgacgcagccagcgccagagcttggcccaagatgcacactgtgaacggatatgtcaataggtcacttcctggcttgattgggtgtcatcggaaaagtgtctactggcacgtgatcggaatggggacaacaccagaggtccactccatatttctcgaaggccataccttccttgttcgaaaccacagacaggcatccttggggatctctcccattacctttctcactgcccaaacgctccttatggacttgggtcagttccttctcttctgccatatcagctcacaccagcatgatggtatggaagcttatgtgaaagtcgacagttgtcctgaggagccacagttgcgcatgaagaataatgaagaagccgaggattacgacgacgatctcaccgattctgagatggacgtggtgaggtttgatgacgacaactctccctccgtcattcaagcacggagcgtggcgaagaaacaccccaagacttgggtccactatatagcggcggaagaggaggattgggattacgctcctcttgtattggcaccagatgaccgctcatacaaaagccagtacctcaacaacggaccgcagagaattggccggaagtataagaaagtgcgatttatggcctatacagacgaaacctttaagacaagggaggccatccagcatgagagtgggattttgggacctcttctttacggcgaagttggtgataccctcctcatcatcttcaagaatcaagcttctcgcccctataacatttacccacacgggatcactgacgttaggcctttgtatagcagaagacttcccaaaggcgtgaagcatctcaaagacttccccattttgccaggcgagatctttaagtacaaatggaccgtcacagtggaagatggaccgactaaatcagaccctcgatgccttacgcggtactattcctccttcgtgaatatggagagagatttggcaagcggactcataggaccactcctcatctgttacaaggaatctgtagaccagaggggtaaccagattatgagtgataaacgcaatgtgatcctttttagcgtcttcgacgagaaccggtcctggtacttgaccgagaatatacaaagtttccttcccaaccccgcaggcgttcagttggaagaccctgagtttcaggccagcaatattatgcactcaatcaacggctatgtgtttgatagtctccagctttctgtttgcctccatgaagtagcctattggtacatcttgtcaattggtgctcaaacagacttcctctccgtcttcttctccggctacacctttaagcacaagatggtgtatgaggacactctcacactctttccattttctggagaaaccgtgttcatgagcatggagaatccaggcctttggatcttgggttgccacaacagtgattttcgcaatcggggaatgactgctctcctcaaagtcagcagctgtgataagaacacaggcgactattacgaagattcttacgaggacataagtgcctactttttgtccaagaataacgccattgagcccagatcattctcccagaatcctcccgtgcttaaaaggcatcagcgcgaaatcaccagaactactcttcagtctgatcaagaggagattgactatgacgacaccataagcgtggaaatgaagaaggaggatttcgatatctatgacgaagatgagaaccagtctccgcggagctttcagaagaagacgcgacactacttcattgcagcagtcgaaaggctttgggactacggtatgtcatcatcccctcatgtgttgcgcaatagagctcagagtggaagtgttccacagttcaagaaagtcgtctttcaagagtttacagatggcagcttcacacagcctctctatcggggcgagcttaacgaacatttgggactccttggtccctatatccgagccgaagtggaggacaacattatggttacctttaggaatcaagcctctcgcccctacagcttctactcctccctcatcagttatgaggaggatcagagacaaggcgctgaaccacggaagaactttgtgaaaccgaatgagacgaagacctacttctggaaagtacagcaccacatggcccccacaaaagacgaattcgattgcaaagcatgggcgtatttttcagacgttgacttggagaaagatgtacattcaggacttattggtcctttgttggtgtgtcacactaacactctcaatccagcccatggcaggcaggtgacagtccaggaattcgctcttttctttaccatctttgatgagaccaagtcctggtacttcacggaaaacatggagcgcaattgcagagccccctgtaacatacagatggaggaccctaccaacaaggaaaattatcggttccacgcaatcaacggatacattatggatacactccctggccttgtgatggctcaggaccaacgaatcaggtggtacctcctcagcatgggttctaatgagaacatacactccattcacttttcaggacatgtgttcactgtccggaagaaagaagagtataagatggccctctacaatttgtatccaggcgtgtttgagaccgttgaaatgcttccctctaaagctggcatctggagagtagagtgcttgatcggagaacatcttcacgcaggtatgagcaccttgttcctcgtgtacagcaacaaatgtcagaccccacttggcatggccagtggacacattcgcgactttcagatcacagcatctggccagtatggacaatgggccccaaagttggctcgcctccattactccggtagcataaatgcgtggtccactaaagaacctttcagctggattaaggtcgatcttcttgcccccatgatcatccacggcattaagacacagggagcgaggcagaaattctcctcgctctacatctcacagttcattattatgtatagtttggacggcaagaagtggcaaacttatagaggtaacagtactggaacactcatggtgttcttcggcaacgttgatagctctggcatcaaacacaacatctttaatcctcccataatagctcggtacatcagattgcatccgacccactacagcattaggagtacactccgaatggagcttatgggttgcgacttgaattcctgttcaatgccactcggaatggagtctaaagccatctctgatgcacagataaccgccagtagctactttacgaacatgtttgctacgtggtcaccctctaaggcaaggcttcatttgcaaggccggtctaatgcctggagacctcaggtgaacaacccgaaagaatggctccaggtggactttcagaagaccatgaaagtaacaggtgtcactactcagggagttaagtccttggataccagcatgtatgtgaaggagttccttatttcctcatcacaagatggccaccagtggaccctcttctttcagaatggtaaggtcaaagtgtttcagggcaatcaagacagcttcacacccgtggtgaacagtcttgatcctccactcttgacacgataccttcgaatccatccacagtcttgggagcaccagattgcattgcgcatggaagtacttggatgcgaggctcaggacctctac

SEQ ID NO: 778 - protein, 1457 aa, synthetic construct
  REGION 1..1457: note = Variant of human B-domain deleted Factor VIII
MQIELSTCFFLCLLRFCFSATRRYYLGAVELSWDYMQSDLGELPVDARFPPRVPKSFPFNTSVVYKKTLFVEFTDHLFNIAKPRPPWMGLLGPTIQAEVYDTVVITLKNMASHPVSLHAVGVSYWKASEGAEYDDQTSQREKEDDKVFPGGSHTYVWQVLKENGPMASDPLCLTYSYLSHVDLVKDLNSGLIGALLVCREGSLAKEKTQTLHKFILLFAVFDEGKSWHSETKNSLMQDRDAASARAWPKMHTVNGYVNRSLPGLIGCHRKSVYWHVIGMGTTPEVHSIFLEGHTFLVRNHRQASLGISPITFLTAQTLLMDLGQFLLFCHISSHQHDGMEAYVKVDSCPEEPQLRMKNNEEAEDYDDDLTDSEMDVVRFDDDNSPSVIQARSVAKKHPKTWVHYIAAEEEDWDYAPLVLAPDDRSYKSQYLNNGPQRIGRKYKKVRFMAYTDETFKTREAIQHESGILGPLLYGEVGDTLLIIFKNQASRPYNIYPHGITDVRPLYSRRLPKGVKHLKDFPILPGEIFKYKWTVTVEDGPTKSDPRCLTRYYSSFVNMERDLASGLIGPLLICYKESVDQRGNQIMSDKRNVILFSVFDENRSWYLTENIQSFLPNPAGVQLEDPEFQASNIMHSINGYVFDSLQLSVCLHEVAYWYILSIGAQTDFLSVFFSGYTFKHKMVYEDTLTLFPFSGETVFMSMENPGLWILGCHNSDFRNRGMTALLKVSSCDKNTGDYYEDSYEDISAYFLSKNNAIEPRSFSQNPPVLKRHQREITRTTLQSDQEEIDYDDTISVEMKKEDFDIYDEDENQSPRSFQKKTRHYFIAAVERLWDYGMSSSPHVLRNRAQSGSVPQFKKVVFQEFTDGSFTQPLYRGELNEHLGLLGPYIRAEVEDNIMVTFRNQASRPYSFYSSLISYEEDQRQGAEPRKNFVKPNETKTYFWKVQHHMAPTKDEFDCKAWAYFSDVDLEKDVHSGLIGPLLVCHTNTLNPAHGRQVTVQEFALFFTIFDETKSWYFTENMERNCRAPCNIQMEDPTNKENYRFHAINGYIMDTLPGLVMAQDQRIRWYLLSMGSNENIHSIHFSGHVFTVRKKEEYKMALYNLYPGVFETVEMLPSKAGIWRVECLIGEHLHAGMSTLFLVYSNKCQTPLGMASGHIRDFQITASGQYGQWAPKLARLHYSGSINAWSTKEPFSWIKVDLLAPMIIHGIKTQGARQKFSSLYISQFIIMYSLDGKKWQTYRGNSTGTLMVFFGNVDSSGIKHNIFNPPIIARYIRLHPTHYSIRSTLRMELMGCDLNSCSMPLGMESKAISDAQITASSYFTNMFATWSPSKARLHLQGRSNAWRPQVNNPKEWLQVDFQKTMKVTGVTTQGVKSLDTSMYVKEFLISSSQDGHQWTLFFQNGKVKVFQGNQDSFTPVVNSLDPPLLTRYLRIHPQSWEHQIALRMEVLGCEAQDLY

SEQ ID NO: 779 - DNA, 4371 bp, synthetic construct
  misc_feature 1..4371: note = Variant of human B-domain deleted Factor VIII
  source 1..4371: mol_type = other DNA
atgcagattgaactgtctacctgcttcttcctctgtttgctgaggttctgctttagcgccactagacggtactaccttggcgctgtggagctgtcctgggactatatgcagagtgatttgggagagcttcccgtcgacgcacgatttcctcctcgcgttccaaagtcatttcccttcaacacaagcgtggtgtacaagaagacgctcttcgtcgaattcaccgatcacctgttcaatatcgccaaacccagaccaccatggatgggtcttttggggcctaccatacaagcggaggtgtatgacacagttgttatcactctcaagaacatggcttctcatccggtaagtcttcacgcagtgggcgtgtcctactggaaagcttcagaaggagccgagtatgatgatcagacatcccagagggagaaagaagacgacaaggtatttccaggtgggtctcatacctatgtgtggcaagtgctcaaagagaatggccctatggcaagcgatccgctctgtttgacttacagctacctttcacacgttgacctcgtcaaggacctcaactccgggttgattggagccttgttggtatgcagggaaggatctcttgccaaagagaagacacagaccctccacaagtttatccttctctttgctgtgttcgatgagggcaaaagttggcatagcgaaacgaagaattccctcatgcaggatcgcgacgcagccagcgccagagcttggcccaagatgcacactgtgaacggatatgtcaataggtcacttcctggcttgattgggtgtcatcggaaaagtgtctactggcacgtgatcggaatggggacaacaccagaggtccactccatatttctcgaaggccataccttccttgttcgaaaccacagacaggcatccttggagatctctcccattacctttctcactgcccaaacgctccttatggacttgggtcagttccttctcagttgccatatcagctcacaccagcatgatggtatggaagcttatgtgaaagtcgacagttgtcctgaggagccacagttgcgcatgaagaataatgaagaagccgaggattacgacgacgatctcaccgattctgagatggacgtggtgaggtttgatgacgacaactctccctccttcattcaaatccggagcgtggcgaagaaacaccccaagacttgggtccactatatagcggcggaagaggaggattgggattacgctcctcttgtattggcaccagatgaccgctcatacaaaagccagtacctcaacaacggaccgcagagaattggccggaagtataagaaagtgcgatttatggcctatacagacgaaacctttaagacaagggaggccatccagcatgagagtgggattttgggacctcttctttacggcgaagttggtgataccctcctcatcatcttcaagaatcaagcttctcgcccctataacatttacccacacgggatcactgacgttaggcctttgtatagcagaagacttcccaaaggcgtgaagcatctcaaagacttccccattttgccaggcgagatctttaagtacaaatggaccgtcacagtggaagatggaccgactaaatcagaccctcgatgccttacgcggtactattcctccttcgtgaatatggagagagatttggcaagcggactcataggaccactcctcatctgttacaaggaatctgtagaccagaggggtaaccagattatgagtgataaacgcaatgtgatcctttttagcgtcttcgacgagaaccggtcctggtacttgaccgagaatatacaaaggttccttcccaaccccgcaggcgttcagttggaagaccctgagtttcaggccagcaatattatgcactcaatcaacggctatgtgtttgatagtctccagctttctgtttgcctccatgaagtagcctattggtacatcttgtcaattggtgctcaaacagacttcctctccgtcttcttctccggctacacctttaagcacaagatggtgtatgaggacactctcacactctttccattttctggagaaaccgtgttcatgagcatggagaatccaggcctttggatcttgggttgccacaacagtgattttcgcaatcggggaatgactgctctcctcaaagtcagcagctgtgataagaacacaggcgactattacgaagattcttacgaggacataagtgcctacttgttgtccaagaataacgccattgagcccagatcattctcccagaatcctcccgtgcttaaaaggcatcagcgcgaaatcaccagaactactcttcagtctgatcaagaggagattgactatgacgacaccataagcgtggaaatgaagaaggaggatttcgatatctatgacgaagatgagaaccagtctccgcggagctttcagaagaagacgcgacactacttcattgcagcagtcgaaaggctttgggactacggtatgtcatcatcccctcatgtgttgcgcaatagagctcagagtggaagtgttccacagttcaagaaagtcgtctttcaagagtttacagatggcagcttcacacagcctctctatcggggcgagcttaacgaacatttgggactccttggtccctatatccgagccgaagtggaggacaacattatggttacctttaggaatcaagcctctcgcccctacagcttctactcctccctcatcagttatgaggaggatcagagacaaggcgctgaaccacggaagaactttgtgaaaccgaatgagacgaagacctacttctggaaagtacagcaccacatggcccccacaaaagacgaattcgattgcaaagcatgggcgtatttttcagacgttgacttggagaaagatgtacattcaggacttattggtcctttgttggtgtgtcacactaacactctcaatccagcccatggcaggcaggtgacagtccaggaattcgctcttttctttaccatctttgatgagaccaagtcctggtacttcacggaaaacatggagcgcaattgcagagccccctgtaacatacagatggaggaccctacctttaaggaaaattatcggttccacgcaatcaacggatacattatggatacactccctggccttgtgatggctcaggaccaacgaatcaggtggtacctcctcagcatgggttctaatgagaacatacactccattcacttttcaggacatgtgttcactgtccggaagaaagaagagtataagatggccctctacaatttgtatccaggcgtgtttgagaccgttgaaatgcttccctctaaagctggcatctggagagtagagtgcttgatcggagaacatcttcacgcaggtatgagcaccttgttcctcgtgtacagcaacaaatgtcagaccccacttggcatggccagtggacacattcgcgactttcagatcacagcatctggccagtatggacaatgggccccaaagttggctcgcctccattactccggtagcataaatgcgtggtccactaaagaacctttcagctggattaaggtcgatcttcttgcccccatgatcatccacggcattaagacacagggagcgaggcagaaattctcctccctctacatctcacagttcattattatgtatagtttggacggcaagaagtggcaaacttatagaggtaacagtactggaacactcatggtgttcttcggcaacgttgatagctctggcatcaaacacaacatctttaatcctcccataatagctcggtacatcagattgcatccgacccactacagcattaggagtacactccgaatggagcttatgggttgcgacttgaattcctgttcaatgccactcggaatggagtctaaagccatctctgatgcacagataaccgccagtagctactttacgaacatgtttgctacgtggtcaccctctaaggcaaggcttcatttgcaaggccggtctaatgcctggagacctcaggtgaacaacccgaaagaatggctccaggtggactttcagaagaccatgaaagtaacaggtgtcactactcagggagttaagtccttggataccagcatgtatgtgaaggagttccttatttcctcatcacaagatggccaccagtggaccctcttctttcagaatggtaaggtcaaagtgtttcagggcaatcaagacagcttcacacccgtggtgaacagtcttgatcctccactcttgacacgataccttcgaatccatccacagtcttgggagcaccagattgcattgcgcatggaagtacttggatgcgaggctcaggacctctac

SEQ ID NO: 780 - protein, 1457 aa, synthetic construct
  REGION 1..1457: note = Variant of human B-domain deleted Factor VIII
MQIELSTCFFLCLLRFCFSATRRYYLGAVELSWDYMQSDLGELPVDARFPPRVPKSFPFNTSVVYKKTLFVEFTDHLFNIAKPRPPWMGLLGPTIQAEVYDTVVITLKNMASHPVSLHAVGVSYWKASEGAEYDDQTSQREKEDDKVFPGGSHTYVWQVLKENGPMASDPLCLTYSYLSHVDLVKDLNSGLIGALLVCREGSLAKEKTQTLHKFILLFAVFDEGKSWHSETKNSLMQDRDAASARAWPKMHTVNGYVNRSLPGLIGCHRKSVYWHVIGMGTTPEVHSIFLEGHTFLVRNHRQASLEISPITFLTAQTLLMDLGQFLLSCHISSHQHDGMEAYVKVDSCPEEPQLRMKNNEEAEDYDDDLTDSEMDVVRFDDDNSPSFIQIRSVAKKHPKTWVHYIAAEEEDWDYAPLVLAPDDRSYKSQYLNNGPQRIGRKYKKVRFMAYTDETFKTREAIQHESGILGPLLYGEVGDTLLIIFKNQASRPYNIYPHGITDVRPLYSRRLPKGVKHLKDFPILPGEIFKYKWTVTVEDGPTKSDPRCLTRYYSSFVNMERDLASGLIGPLLICYKESVDQRGNQIMSDKRNVILFSVFDENRSWYLTENIQRFLPNPAGVQLEDPEFQASNIMHSINGYVFDSLQLSVCLHEVAYWYILSIGAQTDFLSVFFSGYTFKHKMVYEDTLTLFPFSGETVFMSMENPGLWILGCHNSDFRNRGMTALLKVSSCDKNTGDYYEDSYEDISAYLLSKNNAIEPRSFSQNPPVLKRHQREITRTTLQSDQEEIDYDDTISVEMKKEDFDIYDEDENQSPRSFQKKTRHYFIAAVERLWDYGMSSSPHVLRNRAQSGSVPQFKKVVFQEFTDGSFTQPLYRGELNEHLGLLGPYIRAEVEDNIMVTFRNQASRPYSFYSSLISYEEDQRQGAEPRKNFVKPNETKTYFWKVQHHMAPTKDEFDCKAWAYFSDVDLEKDVHSGLIGPLLVCHTNTLNPAHGRQVTVQEFALFFTIFDETKSWYFTENMERNCRAPCNIQMEDPTFKENYRFHAINGYIMDTLPGLVMAQDQRIRWYLLSMGSNENIHSIHFSGHVFTVRKKEEYKMALYNLYPGVFETVEMLPSKAGIWRVECLIGEHLHAGMSTLFLVYSNKCQTPLGMASGHIRDFQITASGQYGQWAPKLARLHYSGSINAWSTKEPFSWIKVDLLAPMIIHGIKTQGARQKFSSLYISQFIIMYSLDGKKWQTYRGNSTGTLMVFFGNVDSSGIKHNIFNPPIIARYIRLHPTHYSIRSTLRMELMGCDLNSCSMPLGMESKAISDAQITASSYFTNMFATWSPSKARLHLQGRSNAWRPQVNNPKEWLQVDFQKTMKVTGVTTQGVKSLDTSMYVKEFLISSSQDGHQWTLFFQNGKVKVFQGNQDSFTPVVNSLDPPLLTRYLRIHPQSWEHQIALRMEVLGCEAQDLY

SEQ ID NO: 781 - DNA, 4371 bp, synthetic construct
  misc_feature 1..4371: note = Variant of human B-domain deleted Factor VIII
  source 1..4371: mol_type = other DNA
atgcagattgaactgtctacctgcttcttcctctgtttgctgaggttctgctttagcgccactagacggtactaccttggcgctgtggagctgtcctgggactatatgcagagtgatttgggagagcttcccgtcgacgcacgatttcctcctcgcgttccaaagtcatttccctttaacacaagcgtggtgtacaagaagacgctcttcgtcgaattcaccgatcacctgttcaatatcgccaaacccagaccaccatggatgggtcttttggggcctaccatacaagcggaggtgtatgacacagttgttatcactctcaagaacatggcttctcatccggtaagtcttcacgcagtgggcgtgtcctactggaaagcttcagaaggagccgagtatgatgatcagacatcccagagggagaaagaagacgacaaggtatttccaggtgggtctcatacctatgtgtggcaagtgctcaaagagaatggccctatggcaagcgatccgccgtgtttgacttacagctacctttcacacgttgacctcgtcaaggacctcaactccgggttgattggagccttgttggtatgcagggaaggatctcttgccaaagagaagacacagaccctccacaagtttatccttctctttgctgtgttcgatgagggcaaaagttggcatagcgaaacgaagaattccctcatgcaggatcgcgacgcagccagcgccagagcttggcccaagatgcacactgtgaacggatatgtcaataggacgcttcctggcttgattgggtgtcatcggaaaagtgtctactggcacgtgatcggaatggggacaacaccagaggtccactccatatttctcgaaggccataccttccttgttcgaaaccacagacaggcatccttggagatctctcccattacctttctcactgcccaaacgctccttatggacttgggtcagttccttctcttctgccatatcagctcacaccagcatgatggtatggaagcttatgtgaaagtcgacagttgtcctgaggagccacagttgcgcatgaagaataatgaagaagccgaggattacgacgacgatctcaccgattctgagatggacgtggtgaggtttgatgacgacaactctccctccatcattcaaatccggagcgtggcgaagaaacaccccaagacttgggtccactatatagcggcggaagaggaggattgggattacgctcctcttgtattggcaccagatgaccgctcatacaaaagccagtacctcaacaacggaccgcagagaattggccggaagtataagaaagtgcgatttatggcctatacagacgaaacctttaagacaagggaggccatccagcatgagagtgggattttgggacctcttctttacggcgaagttggtgataccctcctcatcatcttcaagaatcaagcttctcgcccctataacatttacccacacgggatcactgacgttaggcctttgtatagcagaagacttcccaaaggcgtgaagcatctcaaagacttccccattttgccaggcgagatctttaagtacaaatggaccgtcacagtggaagatggaccgactaaatcagaccctcgatgccttacgcggtactattcctccttcgtgaatatggagagagatttggcaagcggactcataggaccactcctcatctgttacaaggaatctgtagaccagaggggtaaccagattatgagtgataaacgcaatgtgatcctttttagcgtcttcgacgagaaccggtcctggtacttgaccgagaatatacaaaggttccttcccaaccccgcaggcgttcagttggaagaccctgagtttcaggccagcaatattatgcactcaatcaacggctatgtgtttgatagtctccagctttctgtttgcctccatgaagtagcctattggtacatcttgtcaattggtgctcaaacagacttcctctccgtcttcttctccggctacacctttaagcacaagatggtgtatgaggacactctcacactctttccattttctggagaaaccgtgttcatgagcatggagaatccaggcctttggatcttgggttgccacaacagtgattttcgcaatcggggaatgactgctctcctcaaagtcagcagctgtgataagaacacaggcgactattacgaagattcttacgaggacataagtgcctacttggactccaagaataacgccattgagcccagatcattctcccagaatcctcccgtgcttaaaaggcatcagcgcgaaatcaccagaactactcttcagtctgatcaagaggagattgactatgacgacaccataagcgtggaaatgaagaaggaggatttcgatatctatgacgaagatgagaaccagtctccgcggagctttcagaagaagacgcgacactacttcattgcagcagtcgaaaggctttgggactacggtatgtcatcatcccctcatgtgttgcgcaatagagctcagagtggaagtgttccacagttcaagaaagtcgtctttcaagagtttacagatggcagcttcacacagcctctctatcggggcgagcttaacgaacatttgggactccttggtccctatatccgagccgaagtggaggacaacattatggttacctttaggaatcaagcctctcgcccctacagcttctactcctccctcatcagttatgaggaggatcagagacaaggcgctgaaccacggaagaactttgtgaaaccgaatgagacgaagacctacttctggaaagtacagcaccacatggcccccacaaaagacgaattcgattgcaaagcatgggcgtatttttcagacgttgacttggagaaagatgtacattcaggacttattggtcctttgttggtgtgtcacactaacactctcaatccagcccatggcaggcaggtgacagtccaggaattcgctcttttctttaccatctttgatgagaccaagtcctggtacttcacggaaaacatggagcgcaattgcagagccccctgtaacatacagatggaggaccctacctttaaggaaaattatcggttccacgcaatcaacggatacattaaggatacactccctggccttgtgatggctcaggaccaacgaatcaggtggtacctcctcagcatgggttctaatgagaacatacactccattcacttttcaggacatgtgttcactgtccggaagaaagaagagtataagatggccctctacaatttgtatccaggcgtgtttgagaccgttgaaatgcttccctctaaagctggcatctggagagtagagtgcttgatcggagaacatcttcacgcaggtatgagcaccttgttcctcgtgtacagcaacaaatgtcagaccccacttggcatggccagtggacacattcgcgactttcagatcacagcatctggccagtatggacaatgggccccaaagttggctcgcctccattactccggtagcataaatgcgtggtccactaaagaacctttcagctggattaaggtcgatcttcttgcccccatgatcatccacggcattaagacacagggagcgaggcagaaattctcctccctgtacatctcacagttcattattatgtatagtttggacggcaagaagtggcaaacttatagaggtaacagtactggaacagacatggtgttcttcggcaacgttgatagctctggcatcaaacacaacatctttaatcctcccataatagctcggtacatcagattgcatccgacccactacagcattaggagtacactccgaatggagcttatgggttgcgacttgaattcctgttcaatgccactcggaatggagtctaaagccatctctgatgcacagataaccgccagtagctactttacgaacatgtttgctacgtggtcaccctctaaggcaaggcttcatttgcaaggccggtctaatgcctggagacctcaggtgaacaacccgaaagaatggctccaggtggactttcagaagaccatgaaagtaacaggtgtcactactcagggagttaagtccttggatactagcatgtatgtgaaggagttccttatttcctcatcacaagatggccaccagtggaccctcttctttcagaatggtaaggtcaaagtgtttcagggcaatcaagacagcttcacacccgtggtgaacagtcttgatcctccactcttgacacgataccttcgaatccatccacagtcttgggagcaccagattgcattgcgcatggaagtacttggatgcgaggctcaggacctctac

SEQ ID NO: 782 - protein, 1457 aa, synthetic construct
  REGION 1..1457: note = Variant of human B-domain deleted Factor VIII
MQIELSTCFFLCLLRFCFSATRRYYLGAVELSWDYMQSDLGELPVDARFPPRVPKSFPFNTSVVYKKTLFVEFTDHLFNIAKPRPPWMGLLGPTIQAEVYDTVVITLKNMASHPVSLHAVGVSYWKASEGAEYDDQTSQREKEDDKVFPGGSHTYVWQVLKENGPMASDPPCLTYSYLSHVDLVKDLNSGLIGALLVCREGSLAKEKTQTLHKFILLFAVFDEGKSWHSETKNSLMQDRDAASARAWPKMHTVNGYVNRTLPGLIGCHRKSVYWHVIGMGTTPEVHSIFLEGHTFLVRNHRQASLEISPITFLTAQTLLMDLGQFLLFCHISSHQHDGMEAYVKVDSCPEEPQLRMKNNEEAEDYDDDLTDSEMDVVRFDDDNSPSIIQIRSVAKKHPKTWVHYIAAEEEDWDYAPLVLAPDDRSYKSQYLNNGPQRIGRKYKKVRFMAYTDETFKTREAIQHESGILGPLLYGEVGDTLLIIFKNQASRPYNIYPHGITDVRPLYSRRLPKGVKHLKDFPILPGEIFKYKWTVTVEDGPTKSDPRCLTRYYSSFVNMERDLASGLIGPLLICYKESVDQRGNQIMSDKRNVILFSVFDENRSWYLTENIQRFLPNPAGVQLEDPEFQASNIMHSINGYVFDSLQLSVCLHEVAYWYILSIGAQTDFLSVFFSGYTFKHKMVYEDTLTLFPFSGETVFMSMENPGLWILGCHNSDFRNRGMTALLKVSSCDKNTGDYYEDSYEDISAYLDSKNNAIEPRSFSQNPPVLKRHQREITRTTLQSDQEEIDYDDTISVEMKKEDFDIYDEDENQSPRSFQKKTRHYFIAAVERLWDYGMSSSPHVLRNRAQSGSVPQFKKVVFQEFTDGSFTQPLYRGELNEHLGLLGPYIRAEVEDNIMVTFRNQASRPYSFYSSLISYEEDQRQGAEPRKNFVKPNETKTYFWKVQHHMAPTKDEFDCKAWAYFSDVDLEKDVHSGLIGPLLVCHTNTLNPAHGRQVTVQEFALFFTIFDETKSWYFTENMERNCRAPCNIQMEDPTFKENYRFHAINGYIKDTLPGLVMAQDQRIRWYLLSMGSNENIHSIHFSGHVFTVRKKEEYKMALYNLYPGVFETVEMLPSKAGIWRVECLIGEHLHAGMSTLFLVYSNKCQTPLGMASGHIRDFQITASGQYGQWAPKLARLHYSGSINAWSTKEPFSWIKVDLLAPMIIHGIKTQGARQKFSSLYISQFIIMYSLDGKKWQTYRGNSTGTDMVFFGNVDSSGIKHNIFNPPIIARYIRLHPTHYSIRSTLRMELMGCDLNSCSMPLGMESKAISDAQITASSYFTNMFATWSPSKARLHLQGRSNAWRPQVNNPKEWLQVDFQKTMKVTGVTTQGVKSLDTSMYVKEFLISSSQDGHQWTLFFQNGKVKVFQGNQDSFTPVVNSLDPPLLTRYLRIHPQSWEHQIALRMEVLGCEAQDLY

SEQ ID NO: 783 - DNA, 4371 bp, synthetic construct
  misc_feature 1..4371: note = Variant of human B-domain deleted Factor VIII
  source 1..4371: mol_type = other DNA
atgcagattgaactgtctacctgcttcttcctctgtttgctgaggttctgctttagcgccactagacggtactaccttggcgctgtggagctgtcctgggactatatgcagagtgatttgggagagcttcccgtcgacgcacgatttcctcctcgcgttccaaagtcatttccctttaacacaagcgtggtgtacaagaagacgctcttcgtcgaattcaccgatcacctgttcaatatcgccaaacccagaccaccatggatgggtcttttggggcctaccatacaagcggaggtgtatgacacagttgttatcactctcaagaacatggcttctcatccggtaagtcttcacgcagtgggcgtgtcctactggaaagcttcagaaggagccgagtatgatgatcagacatcccagagggagaaagaagacgacaaggtatttccaggtgggtctcatacctatgtgtggcaagtgctcaaagagaatggccctatggcaagcgatccgccgtgtttgacttacagctacctttcacacgttgacctcgtcaaggacctcaactccgggttgattggagccttgttggtatgcagggaaggatctcttgccaaagagaagacacagaccctccacaagtttatccttctctttgctgtgttcgatgagggcaaaagttggcatagcgaaacgaagaattccctcatgcaggatcgcgacgcagccagcgccagagcttggcccaagatgcacactgtgaacggatatgtcaataggacgcttcctggcttgattgggtgtcatcggaaaagtgtctactggcacgtgatcggaatggggacaacaccagaggtccactccatatttctcgaaggccataccttccttgttcgaaaccacagacaggcatccttggagatctctcccattacctttctcactgcccaaacgctccttatggacttgggtcagttccttctcttctgccatatcagctcacaccagcatgatggtatggaagcttatgtgaaagtcgacagttgtcctgaggagccacagttgcgcatgaagaataatgaagaagccgaggattacgacgacgatctcaccgattctgagatggacgtggtgaggtttgatgacgacaactctccctccatcattcaaattcggagcgtggcgaagaaacaccccaagacttgggtccactatatagcggcggaagaggaggattgggattacgctcctcttgtattggcaccagatgaccgctcatacaaaagccagtacctcaacaacggaccgcagagaattggccggaagtataagaaagtgcgatttatggcctatacagacgaaacctttaagacaagggaggccatccagcatgagagtgggattttgggacctcttctttacggcgaagttggtgataccctcctcatcatcttcaagaatcaagcttctcgcccctataacatttacccacacgggatcactgacgttaggcctttgtatagcagaagacttcccaaaggcgtgaagcatctcaaagacttccccattttgccaggcgagatctttaagtacaaatggaccgtcacagtggaagatggaccgactaaatcagaccctcgatgccttacgcggtactattcctccttcgtgaatatggagagagatttggcaagcggactcataggaccactcctcatctgttacaaggaatctgtagaccagaggggtaaccagattatgagtgataaacgcaatgtgatcctttttagcgtcttcgacgagaaccggtcctggtacttgaccgagaatatacaaaggttccttcccaaccccgcaggcgttcagttggaagaccctgagtttcaggccagcaatattatgcactcaatcaacggctatgtgtttgatagtctccagctttctgtttgcctccatgaagtagcctattggtacatcttgtcaattggtgctcaaacagacttcctctccgtcttcttctccggctacacctttaagcacaagatggtgtatgaggacactctcacactctttccattttctggagaaaccgtgttcatgagcatggagaatccaggcctttggatcttgggttgccacaacagtgattttcgcaatcggggaatgactgctctcctcaaagtcagcagctgtgataagaacacaggcgactattacgaagattcttacgaggacataagtgcctacctggactccaagaataacgccattgagcccagatcattctcccagaatcctcccgtgcttaaaaggcatcagcgcgaaatcaccagaactactcttcagtctgatcaagaggagattgactatgacgacaccataagcgtggaaatgaagaaggaggatttcgatatctatgacgaagatgagaaccagtctccgcggagctttcagaagaagacgcgacactacttcattgcagcagtcgaaaggctttgggactacggtatgtcatcatcccctcatgtgttgcgcaatagagctcagagtggaagtgttccacagttcaagaaagtcgtctttcaagagtttacagatggcagcttcacacagcctctctatcggggcgagcttaacgaacatttgggactccttggtccctatatccgagccgaagtggaggacaacattatggttacctttaggaatcaagcctctcgcccctacagcttctactcctccctcatcagttatgaggaggatcagagacaaggcgctgaaccacggaagaactttgtgaaaccgaatgagacgaagacctacttctggaaagtacagcaccacatggcccccacaaaagacgaattcgattgcaaagcatgggcgtatttttcagacgttgacttggagaaagatgtacattcaggacttattggtcctttgttggtgtgtcacactaacactctcaatccagcccatggcaggcaggtgacagtccaggaattcgctcttttctttaccatctttgatgagaccaagtcctggtacttcacggaaaacatggagcgcaattgcagagccccctgtaacatacagatggaggaccctacctttaaggaaaattatcggttccacgcaatcaacggatacattatggatacactccctggccttgtgatggctcaggaccaacgaatcaggtggtacctcctcagcatgggttctaatgagaacatacactccattcacttttcaggacatgtgttcactgtccggaagaaagaagagtataagatggccctctacaatttgtatccaggcgtgtttgagaccgttgaaatgcttccctctaaagctggcatctggagagtagagtgcttgatcggagaacatcttcacgcaggtatgagcaccttgttcctcgtgtacagcaacaaatgtcagaccccacttggcatggccagtggacacattcgcgactttcagatcacagcatctggccagtatggacaatgggccccaaagttggctcgcctccattactccggtagcataaatgcgtggtccactaaagaacctttcagctggattaaggtcgatcttcttgcccccatgatcatccacggcattaagacacagggagcgaggcagaaattctcctccggttacatctcacagttcattattatgtatagtttggacggcaagaagtggcaaacttatagaggtaacagtactggaacagacatggtgttcttcggcaacgttgatagctctggcatcaaacacaacatctttaatcctcccataatagctcggtacatcagattgcatccgacccactacagcattaggagtacactccgaatggagcttatgggttgcgacttgaattcctgttcaatgccactcggaatggagtctaaagccatctctgatgcacagataaccgccagtagctactttacgaacatgtttgctacgtggtcaccctctaaggcaaggcttcatttgcaaggccggtctaatgcctggagacctcaggtgaacaacccgaaagaatggctccaggtggactttcagaagaccatgaaagtaacaggtgtcactactcagggagttaagtccttggatactagcatgtatgtgaaggagttccttatttcctcatcacaagatggccaccagtggaccctcttctttcagaatggtaaggtcaaagtgtttcagggcaatcaagacagcttcacacccgtggtgaacagtcttgatcctccactcttgacacgataccttcgaatccatccacagtcttgggagcaccagattgcattgcgcatggaagtacttggatgcgaggctcaggacctctac

SEQ ID NO: 784 - protein, 1457 aa, synthetic construct
  REGION 1..1457: note = Variant of human B-domain deleted Factor VIII
MQIELSTCFFLCLLRFCFSATRRYYLGAVELSWDYMQSDLGELPVDARFPPRVPKSFPFNTSVVYKKTLFVEFTDHLFNIAKPRPPWMGLLGPTIQAEVYDTVVITLKNMASHPVSLHAVGVSYWKASEGAEYDDQTSQREKEDDKVFPGGSHTYVWQVLKENGPMASDPPCLTYSYLSHVDLVKDLNSGLIGALLVCREGSLAKEKTQTLHKFILLFAVFDEGKSWHSETKNSLMQDRDAASARAWPKMHTVNGYVNRTLPGLIGCHRKSVYWHVIGMGTTPEVHSIFLEGHTFLVRNHRQASLEISPITFLTAQTLLMDLGQFLLFCHISSHQHDGMEAYVKVDSCPEEPQLRMKNNEEAEDYDDDLTDSEMDVVRFDDDNSPSIIQIRSVAKKHPKTWVHYIAAEEEDWDYAPLVLAPDDRSYKSQYLNNGPQRIGRKYKKVRFMAYTDETFKTREAIQHESGILGPLLYGEVGDTLLIIFKNQASRPYNIYPHGITDVRPLYSRRLPKGVKHLKDFPILPGEIFKYKWTVTVEDGPTKSDPRCLTRYYSSFVNMERDLASGLIGPLLICYKESVDQRGNQIMSDKRNVILFSVFDENRSWYLTENIQRFLPNPAGVQLEDPEFQASNIMHSINGYVFDSLQLSVCLHEVAYWYILSIGAQTDFLSVFFSGYTFKHKMVYEDTLTLFPFSGETVFMSMENPGLWILGCHNSDFRNRGMTALLKVSSCDKNTGDYYEDSYEDISAYLDSKNNAIEPRSFSQNPPVLKRHQREITRTTLQSDQEEIDYDDTISVEMKKEDFDIYDEDENQSPRSFQKKTRHYFIAAVERLWDYGMSSSPHVLRNRAQSGSVPQFKKVVFQEFTDGSFTQPLYRGELNEHLGLLGPYIRAEVEDNIMVTFRNQASRPYSFYSSLISYEEDQRQGAEPRKNFVKPNETKTYFWKVQHHMAPTKDEFDCKAWAYFSDVDLEKDVHSGLIGPLLVCHTNTLNPAHGRQVTVQEFALFFTIFDETKSWYFTENMERNCRAPCNIQMEDPTFKENYRFHAINGYIMDTLPGLVMAQDQRIRWYLLSMGSNENIHSIHFSGHVFTVRKKEEYKMALYNLYPGVFETVEMLPSKAGIWRVECLIGEHLHAGMSTLFLVYSNKCQTPLGMASGHIRDFQITASGQYGQWAPKLARLHYSGSINAWSTKEPFSWIKVDLLAPMIIHGIKTQGARQKFSSGYISQFIIMYSLDGKKWQTYRGNSTGTDMVFFGNVDSSGIKHNIFNPPIIARYIRLHPTHYSIRSTLRMELMGCDLNSCSMPLGMESKAISDAQITASSYFTNMFATWSPSKARLHLQGRSNAWRPQVNNPKEWLQVDFQKTMKVTGVTTQGVKSLDTSMYVKEFLISSSQDGHQWTLFFQNGKVKVFQGNQDSFTPVVNSLDPPLLTRYLRIHPQSWEHQIALRMEVLGCEAQDLY

SEQ ID NO: 785 - DNA, 4371 bp, synthetic construct
  misc_feature 1..4371: note = Variant of human B-domain deleted Factor VIII
  source 1..4371: mol_type = other DNA
atgcagattgaactgtctacctgcttcttcctctgtttgctgaggttctgctttagcgccactagacggtactaccttggcgctgtggagctgtcctgggactatatgcagagtgatttgggagagcttcccgtcgacgcacgatttcctcctcgcgttccaaagtcatttccctttaacacaagcgtggtgtacaagaagacgctcttcgtcgaattcaccgatcacctgttcaatatcgccaaacccagaccaccatggatgggtcttttggggcctaccatacaagcggaggtgtatgacacagttgttatcactctcaagaacatggcttctcatccggtaagtcttcacgcagtgggcgtgtcctactggaaagcttcagaaggagccgagtatgatgatcagacatcccagagggagaaagaagacgacaaggtatttccaggtgggtctcatacctatgtgtggcaagtgctcaaagagaatggccctatggcaagcgatccgccgtgtttgacttacagctacctttcacacgttgacctcgtcaaggacctcaactccgggttgattggagccttgttggtatgcagggaaggatctcttgccaaagagaagacacagaccctccacaagtttatccttctctttgctgtgttcgatgagggcaaaagttggcatagcgaaacgaagaattccctcatgcaggatcgcgacgcagccagcgccagagcttggcccaagatgcacactgtgaacggatatgtcaataggacgcttcctggcttgattgggtgtcatcggaaaagtgtctactggcacgtgatcggaatggggacaacaccagaggtccactccatatttctcgaaggccataccttccttgttcgaaaccacagacaggcatccttggagatctctcccattacctttctcactgcccaaacgctccttatggacttgggtcagttccttctcttctgccatatcagctcacaccagcatgatggtatggaagcttatgtgaaagtcgacagttgtcctgaggagccacagttgcgcatgaagaataatgaagaagccgaggattacgacgacgatctcaccgattctgagatggacgtggtgaggtttgatgacgacaactctccctccatcattcaaatccggagcgtggcgaagaaacaccccaagacttgggtccactatatagcggcggaagaggaggattgggattacgctcctcttgtattggcaccagatgaccgctcatacaaaagccagtacctcaacaacggaccgcagagaattggccggaagtataagaaagtgcgatttatggcctatacagacgaaacctttaagacaagggaggccatccagcatgagagtgggattttgggacctcttctttacggcgaagttggtgataccctcctcatcatcttcaagaatcaagcttctcgcccctataacatttacccacacgggatcactgacgttaggcctttgtatagcagaagacttcccaaaggcgtgaagcatctcaaagacttccccattttgccaggcgagatctttaagtacaaatggaccgtcacagtggaagatggaccgactaaatcagaccctcgatgccttacgcggtactattcctccttcgtgaatatggagagagatttggcaagcggactcataggaccactcctcatctgttacaaggaatctgtagaccagaggggtaaccagattatgagtgataaacgcaatgtgatcctttttagcgtcttcgacgagaaccggtcctggtacttgaccgagaatatacaaaggttccttcccaaccccgcaggcgttcagttggaagaccctgagtttcaggccagcaatattatgcactcaatcaacggctatgtgtttgatagtctccagctttctgtttgcctccatgaagtagcctattggtacatcttgtcaattggtgctcaaacagacttcctctccgtcttcttctccggctacacctttaagcacaagatggtgtatgaggacactctcacactctttccattttctggagaaaccgtgttcatgagcatggagaatccaggcctttggatcttgggttgccacaacagtgattttcgcaatcggggaatgactgctctcctcaaagtcagcagctgtgataagaacacaggcgactattacgaagattcttacgaggacataagtgcctacctggactccaagaataacgccattgagcccagatcattctcccagaatcctcccgtgcttaaaaggcatcagcgcgaaatcaccagaactactcttcagtctgatcaagaggagattgactatgacgacaccataagcgtggaaatgaagaaggaggatttcgatatctatgacgaagatgagaaccagtctccgcggagctttcagaagaagacgcgacactacttcattgcagcagtcgaaaggctttgggactacggtatgtcatcatcccctcatgtgttgcgcaatagagctcagagtggaagtgttccacagttcaagaaagtcgtctttcaagagtttacagatggcagcttcacacagcctctctatcggggcgagcttaacgaacatttgggactccttggtccctatatccgagccgaagtggaggacaacattatggttacctttaggaatcaagcctctcgcccctacagcttctactcctccctcatcagttatgaggaggatcagagacaaggcgctgaaccacggaagaactttgtgaaaccgaatgagacgaagacctacttctggaaagtacagcaccacatggcccccacaaaagacgaattcgattgcaaagcatgggcgtatttttcagacgttgacttggagaaagatgtacattcaggacttattggtcctttgttggtgtgtcacactaacactctcaatccagcccatggcaggcaggtgacagtccaggaattcgctcttttctttaccatctttgatgagaccaagtcctggtacttcacggaaaacatggagcgcaattgcagagccccctgtaacatacagatggaggaccctacctttaaggaaaattatcggttccacgcaatcaacggatacattatggatacactccctggccttgtgatggctcaggaccaacgaatcaggtggtacctcctcagcatgggttctaatgagaacatacactccattcacttttcaggacatgtgttcactgtccggaagaaagaagagtataagatggccctctacaatttgtatccaggcgtgtttgagaccgttgaaatgcttccctctaaagctggcatctggagagtagagtgcttgatcggagaacatcttcacgcaggtatgagcaccttgttcctcgtgtacagcaacaaatgtcagaccccacttggcatggccagtggacacattcgcgactttcagatcacagcatctggccagtatggacaatgggccccaaagttggctcgcctccattactccggtagcataaatgcgtggtccactaaagaacctttcagctggattaaggtcgatcttcttgcccccatgatcatccacggcattaagacacagggagcgaggcagaaaggttcctccctgtacatctcacagttcattattatgtatagtttggacggcaagaagtggcaaacttatagaggtaacagtactggaacagacatggtgttcttcggcaacgttgatagctctggcatcaaacacaacatctttaatcctcccataatagctcggtacatcagattgcatccgacccactacagcattaggagtacactccgaatggagcttatgggttgcgacttgaattcctgttcaatgccactcggaatggagtctaaagccatctctgatgcacagataaccgccagtagctactttacgaacatgtttgctacgtggtcaccctctaaggcaaggcttcatttgcaaggccggtctaatgcctggagacctcaggtgaacaacccgaaagaatggctccaggtggactttcagaagaccatgaaagtaacaggtgtcactactcagggagttaagtccttggatactagcatgtatgtgaaggagttccttatttcctcatcacaagatggccaccagtggaccctcttctttcagaatggtaaggtcaaagtgtttcagggcaatcaagacagcttcacacccgtggtgaacagtcttgatcctccactcttgacacgataccttcgaatccatccacagtcttgggagcaccagattgcattgcgcatggaagtacttggatgcgaggctcaggacctctac

SEQ ID NO: 786 - protein, 1457 aa, synthetic construct
  REGION 1..1457: note = Variant of human B-domain deleted Factor VIII
MQIELSTCFFLCLLRFCFSATRRYYLGAVELSWDYMQSDLGELPVDARFPPRVPKSFPFNTSVVYKKTLFVEFTDHLFNIAKPRPPWMGLLGPTIQAEVYDTVVITLKNMASHPVSLHAVGVSYWKASEGAEYDDQTSQREKEDDKVFPGGSHTYVWQVLKENGPMASDPPCLTYSYLSHVDLVKDLNSGLIGALLVCREGSLAKEKTQTLHKFILLFAVFDEGKSWHSETKNSLMQDRDAASARAWPKMHTVNGYVNRTLPGLIGCHRKSVYWHVIGMGTTPEVHSIFLEGHTFLVRNHRQASLEISPITFLTAQTLLMDLGQFLLFCHISSHQHDGMEAYVKVDSCPEEPQLRMKNNEEAEDYDDDLTDSEMDVVRFDDDNSPSIIQIRSVAKKHPKTWVHYIAAEEEDWDYAPLVLAPDDRSYKSQYLNNGPQRIGRKYKKVRFMAYTDETFKTREAIQHESGILGPLLYGEVGDTLLIIFKNQASRPYNIYPHGITDVRPLYSRRLPKGVKHLKDFPILPGEIFKYKWTVTVEDGPTKSDPRCLTRYYSSFVNMERDLASGLIGPLLICYKESVDQRGNQIMSDKRNVILFSVFDENRSWYLTENIQRFLPNPAGVQLEDPEFQASNIMHSINGYVFDSLQLSVCLHEVAYWYILSIGAQTDFLSVFFSGYTFKHKMVYEDTLTLFPFSGETVFMSMENPGLWILGCHNSDFRNRGMTALLKVSSCDKNTGDYYEDSYEDISAYLDSKNNAIEPRSFSQNPPVLKRHQREITRTTLQSDQEEIDYDDTISVEMKKEDFDIYDEDENQSPRSFQKKTRHYFIAAVERLWDYGMSSSPHVLRNRAQSGSVPQFKKVVFQEFTDGSFTQPLYRGELNEHLGLLGPYIRAEVEDNIMVTFRNQASRPYSFYSSLISYEEDQRQGAEPRKNFVKPNETKTYFWKVQHHMAPTKDEFDCKAWAYFSDVDLEKDVHSGLIGPLLVCHTNTLNPAHGRQVTVQEFALFFTIFDETKSWYFTENMERNCRAPCNIQMEDPTFKENYRFHAINGYIMDTLPGLVMAQDQRIRWYLLSMGSNENIHSIHFSGHVFTVRKKEEYKMALYNLYPGVFETVEMLPSKAGIWRVECLIGEHLHAGMSTLFLVYSNKCQTPLGMASGHIRDFQITASGQYGQWAPKLARLHYSGSINAWSTKEPFSWIKVDLLAPMIIHGIKTQGARQKGSSLYISQFIIMYSLDGKKWQTYRGNSTGTDMVFFGNVDSSGIKHNIFNPPIIARYIRLHPTHYSIRSTLRMELMGCDLNSCSMPLGMESKAISDAQITASSYFTNMFATWSPSKARLHLQGRSNAWRPQVNNPKEWLQVDFQKTMKVTGVTTQGVKSLDTSMYVKEFLISSSQDGHQWTLFFQNGKVKVFQGNQDSFTPVVNSLDPPLLTRYLRIHPQSWEHQIALRMEVLGCEAQDLY

SEQ ID NO: 787 - DNA, 4371 bp, synthetic construct
  misc_feature 1..4371: note = Variant of human B-domain deleted Factor VIII
  source 1..4371: mol_type = other DNA
atgcagattgaactgtctacctgcttcttcctctgtttgctgaggttctgctttagcgccactagacggtactaccttggcgctgtggagctgtcctgggactatatgcagagtgatttgggagagcttcccgtcgacgcacgatttcctcctcgcgttccaaagtcatttccctttaacacaagcgtggtgtacaagaagacgctcttcgtcgaattcaccgatcacctgttcaatatcgccaaacccagaccaccatggatgggtcttttggggcctaccatacaagcggaggtgtatgacacagttgttatcactctcaagaacatggcttctcatccggtaagtcttcacgcagtgggcgtgtcctactggaaagcttcagaaggagccgagtatgatgatcagacatcccagagggagaaagaagacgacaaggtatttccaggtgggtctcatacctatgtgtggcaagtgctcaaagagaatggccctatggcaagcgatccgccgtgtttgacttacagctacctttcacacgttgacctcgtcaaggacctcaactccgggttgattggagccttgttggtatgcagggaaggatctcttgccaaagagaagacacagaccctccacaagtttatccttctctttgctgtgttcgatgagggcaaaagttggcatagcgaaacgaagaattccctcatgcaggatcgcgacgcagccagcgccagagcttggcccaagatgcacactgtgaacggatatgtcaataggacgcttcctggcttgattgggtgtcatcggaaaagtgtctactggcacgtgatcggaatggggacaacaccagaggtccactccatatttctcgaaggccataccttccttgttcgaaaccacagacaggcatccttggagatctctcccattacctttctcactgcccaaacgctccttatggacttgggtcagttccttctcttctgccatatcagctcacaccagcatgatggtatggaagcttatgtgaaagtcgacagttgtcctgaggagccacagttgcgcatgaagaataatgaagaagccgaggattacgacgacgatctcaccgattctgagatggacgtggtgaggtttgatgacgacaactctccctcccgcattcaaattcggagcgtggcgaagaaacaccccaagacttgggtccactatatagcggcggaagaggaggattgggattacgctcctcttgtattggcaccagatgaccgctcatacaaaagccagtacctcaacaacggaccgcagagaattggccggaagtataagaaagtgcgatttatggcctatacagacgaaacctttaagacaagggaggccatccagcatgagagtgggattttgggacctcttctttacggcgaagttggtgataccctcctcatcatcttcaagaatcaagcttctcgcccctataacatttacccacacgggatcactgacgttaggcctttgtatagcagaagacttcccaaaggcgtgaagcatctcaaagacttccccattttgccaggcgagatctttaagtacaaatggaccgtcacagtggaagatggaccgactaaatcagaccctcgatgccttacgcggtactattcctccttcgtgaatatggagagagatttggcaagcggactcataggaccactcctcatctgttacaaggaatctgtagaccagaggggtaaccagattatgagtgataaacgcaatgtgatcctttttagcgtcttcgacgagaaccggtcctggtacttgaccgagaatatacaaaggttccttcccaaccccgcaggcgttcagttggaagaccctgagtttcaggccagcaatattatgcactcaatcaacggctatgtgtttgatagtctccagctttctgtttgcctccatgaagtagcctattggtacatcttgtcaattggtgctcaaacagacttcctctccgtcttcttctccggctacacctttaagcacaagatggtgtatgaggacactctcacactctttccattttctggagaaaccgtgttcatgagcatggagaatccaggcctttggatcttgggttgccacaacagtgattttcgcaatcggggaatgactgctctcctcaaagtcagcagctgtgataagaacacaggcgactattacgaagattcttacgaggacataagtgcctacctggactccaagaataacgccattgagcccagatcattctcccagaatcctcccgtgcttaaaaggcatcagcgcgaaatcaccagaactactcttcagtctgatcaagaggagattgactatgacgacaccataagcgtggaaatgaagaaggaggatttcgatatctatgacgaagatgagaaccagtctccgcggagctttcagaagaagacgcgacactacttcattgcagcagtcgaaaggctttgggactacggtatgtcatcatcccctcatgtgttgcgcaatagagctcagagtggaagtgttccacagttcaagaaagtcgtctttcaagagtttacagatggcagcttcacacagcctctctatcggggcgagcttaacgaacatttgggactccttggtccctatatccgagccgaagtggaggacaacattatggttacctttaggaatcaagcctctcgcccctacagcttctactcctccctcatcagttatgaggaggatcagagacaaggcgctgaaccacggaagaactttgtgaaaccgaatgagacgaagacctacttctggaaagtacagcaccacatggcccccacaaaagacgaattcgattgcaaagcatgggcgtatttttcagacgttgacttggagaaagatgtacattcaggacttattggtcctttgttggtgtgtcacactaacactctcaatccagcccatggcaggcaggtgacagtccaggaattcgctcttttctttaccatctttgatgagaccaagtcctggtacttcacggaaaacatggagcgcaattgcagagccccctgtaacatacagatggaggaccctacctttaaggaaaattatcggttccacgcaatcaacggatacattatggatacactccctggccttgtgatggctcaggaccaacgaatcaggtggtacctcctcagcatgggttctaatgagaacatacactccattcacttttcaggacatgtgttcactgtccggaagaaagaagagtataagatggccctctacaatttgtatccaggcgtgtttgagaccgttgaaatgcttccctctaaagctggcatctggagagtagagtgcttgatcggagaacatcttcacgcaggtatgagcaccttgttcctcgtgtacagcaacaaatgtcagaccccacttggcatggccagtggacacattcgcgactttcagatcacagcatctggccagtatggacaatgggccccaaagttggctcgcctccattactccggtagcataaatgcgtggtccactaaagaacctttcagctggattaaggtcgatcttcttgcccccatgatcatccacggcattaagacacagggagcgaggcagaaattctcctccctctacatctcacagttcattattatgtatagtttggacggcaagaagtggcaaacttatagaggtaacagtactggaacagacatggtgttcttcggcaacgttgatagctctggcatcaaacacaacatctttaatcctcccataatagctcggtacatcagattgcatccgacccactacagcattaggagtacactccgaatggagcttatgggttgcgacttgaattcctgttcaatgccactcggaatggagtctaaagccatctctgatgcacagataaccgccagtagctactttacgaacatgtttgctacgtggtcaccctctaaggcaaggcttcatttgcaaggccggtctaatgcctggagacctcaggtgaacaacccgaaagaatggctccaggtggactttcagaagaccatgaaagtaacaggtgtcactactcagggagttaagtccttggatactagcatgtatgtgaaggagttccttatttcctcatcacaagatggccaccagtggaccctcttctttcagaatggtaaggtcaaagtgtttcagggcaatcaagacagcttcacacccgtggtgaacagtcttgatcctccactcttgacacgataccttcgaatccatccacagtcttgggagcaccagattgcattgcgcatggaagtacttggatgcgaggctcaggacctctac

SEQ ID NO: 788 - protein, 1457 aa, synthetic construct
  REGION 1..1457: note = Variant of human B-domain deleted Factor VIII
MQIELSTCFFLCLLRFCFSATRRYYLGAVELSWDYMQSDLGELPVDARFPPRVPKSFPFNTSVVYKKTLFVEFTDHLFNIAKPRPPWMGLLGPTIQAEVYDTVVITLKNMASHPVSLHAVGVSYWKASEGAEYDDQTSQREKEDDKVFPGGSHTYVWQVLKENGPMASDPPCLTYSYLSHVDLVKDLNSGLIGALLVCREGSLAKEKTQTLHKFILLFAVFDEGKSWHSETKNSLMQDRDAASARAWPKMHTVNGYVNRTLPGLIGCHRKSVYWHVIGMGTTPEVHSIFLEGHTFLVRNHRQASLEISPITFLTAQTLLMDLGQFLLFCHISSHQHDGMEAYVKVDSCPEEPQLRMKNNEEAEDYDDDLTDSEMDVVRFDDDNSPSRIQIRSVAKKHPKTWVHYIAAEEEDWDYAPLVLAPDDRSYKSQYLNNGPQRIGRKYKKVRFMAYTDETFKTREAIQHESGILGPLLYGEVGDTLLIIFKNQASRPYNIYPHGITDVRPLYSRRLPKGVKHLKDFPILPGEIFKYKWTVTVEDGPTKSDPRCLTRYYSSFVNMERDLASGLIGPLLICYKESVDQRGNQIMSDKRNVILFSVFDENRSWYLTENIQRFLPNPAGVQLEDPEFQASNIMHSINGYVFDSLQLSVCLHEVAYWYILSIGAQTDFLSVFFSGYTFKHKMVYEDTLTLFPFSGETVFMSMENPGLWILGCHNSDFRNRGMTALLKVSSCDKNTGDYYEDSYEDISAYLDSKNNAIEPRSFSQNPPVLKRHQREITRTTLQSDQEEIDYDDTISVEMKKEDFDIYDEDENQSPRSFQKKTRHYFIAAVERLWDYGMSSSPHVLRNRAQSGSVPQFKKVVFQEFTDGSFTQPLYRGELNEHLGLLGPYIRAEVEDNIMVTFRNQASRPYSFYSSLISYEEDQRQGAEPRKNFVKPNETKTYFWKVQHHMAPTKDEFDCKAWAYFSDVDLEKDVHSGLIGPLLVCHTNTLNPAHGRQVTVQEFALFFTIFDETKSWYFTENMERNCRAPCNIQMEDPTFKENYRFHAINGYIMDTLPGLVMAQDQRIRWYLLSMGSNENIHSIHFSGHVFTVRKKEEYKMALYNLYPGVFETVEMLPSKAGIWRVECLIGEHLHAGMSTLFLVYSNKCQTPLGMASGHIRDFQITASGQYGQWAPKLARLHYSGSINAWSTKEPFSWIKVDLLAPMIIHGIKTQGARQKFSSLYISQFIIMYSLDGKKWQTYRGNSTGTDMVFFGNVDSSGIKHNIFNPPIIARYIRLHPTHYSIRSTLRMELMGCDLNSCSMPLGMESKAISDAQITASSYFTNMFATWSPSKARLHLQGRSNAWRPQVNNPKEWLQVDFQKTMKVTGVTTQGVKSLDTSMYVKEFLISSSQDGHQWTLFFQNGKVKVFQGNQDSFTPVVNSLDPPLLTRYLRIHPQSWEHQIALRMEVLGCEAQDLY

SEQ ID NO: 789 - DNA, 4371 bp, synthetic construct
  misc_feature 1..4371: note = Variant of human B-domain deleted Factor VIII
  source 1..4371: mol_type = other DNA
atgcagattgaactgtctacctgcttcttcctctgtttgctgaggttctgctttagcgccactagacggtactaccttggcgctgtggagctgtcctgggactatatgcagagtgatttgggagagcttcccgtcgacgcacgatttcctcctcgcgttccaaagtcatttccctttaacacaagcgtggtgtacaagaagacgctcttcgtcgaattcaccgatcacctgttcaatatcgccaaacccagaccaccatggatgggtcttttggggcctaccatacaagcggaggtgtatgacacagttgttatcactctcaagaacatggcttctcatccggtaagtcttcacgcagtgggcgtgtcctactggaaagcttcagaaggagccgagtatgatgatcagacatcccagagggagaaagaagacgacaaggtatttccaggtgggtctcatacctatgtgtggcaagtgctcaaagagaatggccctatggcaagcgatccgccgtgtttgacttacagctacctttcacacgttgacctcgtcaaggacctcaactccgggttgattggagccttgttggtatgcagggaaggatctcttgccaaagagaagacacagaccctccacaagtttatccttctctttgctgtgttcgatgagggcaaaagttggcatagcgaaacgaagaattccctcatgcaggatcgcgacgcagccagcgccagagcttggcccaagatgcacactgtgaacggatatgtcaataggacgcttcctggcttgattgggtgtcatcggaaaagtgtctactggcacgtgatcggaatggggacaacaccagaggtccactccatatttctcgaaggccataccttccttgttcgaaaccacagacaggcatccttggagatctctcccattacctttctcactgcccaaacgctccttatggacttgggtcagttccttctcttctgccatatcagctcacaccagcatgatggtatggaagcttatgtgaaagtcgacagttgtcctgaggagccacagttgcgcatgaagaataatgaagaagccgaggattacgacgacgatctcaccgattctgagatggacgtggtgaggtttgatgacgacaactctccctccatcattcaaatccggagcgtggcgaagaaacaccccaagacttgggtccactatatagcggcggaagaggaggattgggattacgctcctcttgtattggcaccagatgaccgctcatacaaaagccagtacctcaacaacggaccgcagagaattggccggaagtataagaaagtgcgatttatggcctatacagacgaaacctttaagacaagggaggccatccagcatgagagtgggattttgggacctcttctttacggcgaagttggtgataccctcctcatcatcttcaagaatcaagcttctcgcccctataacatttacccacacgggatcactgacgttaggcctttgtatagcagaagacttcccaaaggcgtgaagcatctcaaagacttccccattttgccaggcgagatctttaagtacaaatggaccgtcacagtggaagatggaccgactaaatcagaccctcgatgccttacgcggtactattcctccttcgtgaatatggagagagatttggcaagcggactcataggaccactcctcatctgttacaaggaatctgtagaccagaggggtaaccagattatgagtgataaacgcaatgtgatcctttttagcgtcttcgacgagaaccggtcctggtacttgaccgagaatatacaaaggttccttcccaaccccgcaggcgttcagttggaagaccctgagtttcaggccagcaatattatgcactcaatcaacggctatgtgtttgatagtctccagctttctgtttgcctccatgaagtagcctattggtacatcttgtcaattggtgctcaaacagacttcctctccgtcttcttctccggctacacctttaagcacaagatggtgtatgaggacactctcacactctttccattttctggagaaaccgtgttcatgagcatggagaatccaggcctttggatcttgggttgccacaacagtgattttcgcaatcggggaatgactgctctcctcaaagtcagcagctgtgataagaacacaggcgactattacgaagattcttacgaggacataagtgcctacttggactccaagaataacgccattgagcccagatcattctcccagaatcctcccgtgcttaaaaggcatcagcgcgaaatcaccagaactactcttcagtctgatcaagaggagattgactatgacgacaccataagcgtggaaatgaagaaggaggatttcgatatctatgacgaagatgagaaccagtctccgcggagctttcagaagaagacgcgacactacttcattgcagcagtcgaaaggctttgggactacggtatgtcatcatcccctcatgtgttgcgcaatagagctcagagtggaagtgttccacagttcaagaaagtcgtctttcaagagtttacagatggcagcttcacacagcctctctatcggggcgagcttaacgaacatttgggactccttggtccctatatccgagccgaagtggaggacaacattatggttacctttaggaatcaagcctctcgcccctacagcttctactcctccctcatcagttatgaggaggatcagagacaaggcgctgaaccacggaagaactttgtgaaaccgaatgagacgaagacctacttctggaaagtacagcaccacatggcccccacaaaagacgaattcgattgcaaagcatgggcgtatttttcagacgttgacttggagaaagatgtacattcaggacttattggtcctttgttggtgtgtcacactaacactctcaatccagcccatggcaggcaggtgacagtccaggaattcgctcttttctttaccatctttgatgagaccaagtcctggtacttcacggaaaacatggagcgcaattgcagagccccctgtaacatacagatggaggaccctacctttaaggaaaattatcggttccacgcaatcaacggatacattcgtgatacactccctggccttgtgatggctcaggaccaacgaatcaggtggtacctcctcagcatgggttctaatgagaacatacactccattcacttttcaggacatgtgttcactgtccggaagaaagaagagtataagatggccctctacaatttgtatccaggcgtgtttgagaccgttgaaatgcttccctctaaagctggcatctggagagtagagtgcttgatcggagaacatcttcacgcaggtatgagcaccttgttcctcgtgtacagcaacaaatgtcagaccccacttggcatggccagtggacacattcgcgactttcagatcacagcatctggccagtatggacaatgggccccaaagttggctcgcctccattactccggtagcataaatgcgtggtccactaaagaacctttcagctggattaaggtcgatcttcttgcccccatgatcatccacggcattaagacacagggagcgaggcagaaattctcctccctgtacatctcacagttcattattatgtatagtttggacggcaagaagtggcaaacttatagaggtaacagtactggaacagacatggtgttcttcggcaacgttgatagctctggcatcaaacacaacatctttaatcctcccataatagctcggtacatcagattgcatccgacccactacagcattaggagtacactccgaatggagcttatgggttgcgacttgaattcctgttcaatgccactcggaatggagtctaaagccatctctgatgcacagataaccgccagtagctactttacgaacatgtttgctacgtggtcaccctctaaggcaaggcttcatttgcaaggccggtctaatgcctggagacctcaggtgaacaacccgaaagaatggctccaggtggactttcagaagaccatgaaagtaacaggtgtcactactcagggagttaagtccttggatactagcatgtatgtgaaggagttccttatttcctcatcacaagatggccaccagtggaccctcttctttcagaatggtaaggtcaaagtgtttcagggcaatcaagacagcttcacacccgtggtgaacagtcttgatcctccactcttgacacgataccttcgaatccatccacagtcttgggagcaccagattgcattgcgcatggaagtacttggatgcgaggctcaggacctctac

SEQ ID NO: 790 - protein, 1457 aa, synthetic construct
  REGION 1..1457: note = Variant of human B-domain deleted Factor VIII
MQIELSTCFFLCLLRFCFSATRRYYLGAVELSWDYMQSDLGELPVDARFPPRVPKSFPFNTSVVYKKTLFVEFTDHLFNIAKPRPPWMGLLGPTIQAEVYDTVVITLKNMASHPVSLHAVGVSYWKASEGAEYDDQTSQREKEDDKVFPGGSHTYVWQVLKENGPMASDPPCLTYSYLSHVDLVKDLNSGLIGALLVCREGSLAKEKTQTLHKFILLFAVFDEGKSWHSETKNSLMQDRDAASARAWPKMHTVNGYVNRTLPGLIGCHRKSVYWHVIGMGTTPEVHSIFLEGHTFLVRNHRQASLEISPITFLTAQTLLMDLGQFLLFCHISSHQHDGMEAYVKVDSCPEEPQLRMKNNEEAEDYDDDLTDSEMDVVRFDDDNSPSIIQIRSVAKKHPKTWVHYIAAEEEDWDYAPLVLAPDDRSYKSQYLNNGPQRIGRKYKKVRFMAYTDETFKTREAIQHESGILGPLLYGEVGDTLLIIFKNQASRPYNIYPHGITDVRPLYSRRLPKGVKHLKDFPILPGEIFKYKWTVTVEDGPTKSDPRCLTRYYSSFVNMERDLASGLIGPLLICYKESVDQRGNQIMSDKRNVILFSVFDENRSWYLTENIQRFLPNPAGVQLEDPEFQASNIMHSINGYVFDSLQLSVCLHEVAYWYILSIGAQTDFLSVFFSGYTFKHKMVYEDTLTLFPFSGETVFMSMENPGLWILGCHNSDFRNRGMTALLKVSSCDKNTGDYYEDSYEDISAYLDSKNNAIEPRSFSQNPPVLKRHQREITRTTLQSDQEEIDYDDTISVEMKKEDFDIYDEDENQSPRSFQKKTRHYFIAAVERLWDYGMSSSPHVLRNRAQSGSVPQFKKVVFQEFTDGSFTQPLYRGELNEHLGLLGPYIRAEVEDNIMVTFRNQASRPYSFYSSLISYEEDQRQGAEPRKNFVKPNETKTYFWKVQHHMAPTKDEFDCKAWAYFSDVDLEKDVHSGLIGPLLVCHTNTLNPAHGRQVTVQEFALFFTIFDETKSWYFTENMERNCRAPCNIQMEDPTFKENYRFHAINGYIRDTLPGLVMAQDQRIRWYLLSMGSNENIHSIHFSGHVFTVRKKEEYKMALYNLYPGVFETVEMLPSKAGIWRVECLIGEHLHAGMSTLFLVYSNKCQTPLGMASGHIRDFQITASGQYGQWAPKLARLHYSGSINAWSTKEPFSWIKVDLLAPMIIHGIKTQGARQKFSSLYISQFIIMYSLDGKKWQTYRGNSTGTDMVFFGNVDSSGIKHNIFNPPIIARYIRLHPTHYSIRSTLRMELMGCDLNSCSMPLGMESKAISDAQITASSYFTNMFATWSPSKARLHLQGRSNAWRPQVNNPKEWLQVDFQKTMKVTGVTTQGVKSLDTSMYVKEFLISSSQDGHQWTLFFQNGKVKVFQGNQDSFTPVVNSLDPPLLTRYLRIHPQSWEHQIALRMEVLGCEAQDLY

SEQ ID NO: 791 - DNA, 4371 bp, synthetic construct
  misc_feature 1..4371: note = Variant of human B-domain deleted Factor VIII
  source 1..4371: mol_type = other DNA
atgcagattgaactgtctacctgcttcttcctctgtttgctgaggttctgctttagcgccactagacggtactaccttggcgctgtggagctgtcctgggactatatgcagagtgatttgggagagcttcccgtcgacgcacgatttcctcctcgcgttccaaagtcatttccctttaacacaagcgtagtgtacaagaagacgctcttcgtcgaattcaccgatcacctgttcaatatcgccaaacccagaccaccatggatgggtcttttggggcctaccatacaagcggaggtgtatgacacagttgttatcactctcaagaacatggcttctcatccggtaagtcttcacgcagtgggcgtgtcctactggaaagcttcagaaggagccgagtatgatgatcagacatcccagagggagaaagaagacgacaaggtatttccaggtgggtctcatacctatgtgtggcaagtgctcaaagagaatggccctatggcaagcgatccgccgtgtttgacttacagctacctttcacacgttgacctcgtcaaggacctcaactccgggttgattggagccttgttggtatgcagggaaggatctcttgccaaagagaagacacagaccctccacaagtttatccttctctttgctgtgttcgatgagggcaaaagttggcatagcgaaacgaagaattccctcatgcaggatcgcgacgcagccagcgccagagcttggcccaagatgcacactgtgaacggatatgtcaataggacgcttcctggcttgattgggtgtcatcggaaaagtgtctactggcacgtgatcggaatggggacaacaccagaggtccactccatatttctcgaaggccataccttccttgttcgaaaccacagacaggcatccttggagatctctcccattacctttctcactgcccaaacgctccttatggacttgggtcagttccttctcttctgccatatcagctcacaccagcatgatggtatggaagcttatgtgaaagtcgacagttgtcctgaggagccacagttgcgcatgaagaataatgaagaagccgaggattacgacgacgatctcaccgattctgagatggacgtggtgaggtttgatgacgacaactctccctccatcattcaaatccggagcgtggcgaagaaacaccccaagacttgggtccactatatagcggcggaagaggaggattgggattacgctcctcttgtattggcaccagatgaccgctcatacaaaagccagtacctcaacaacggaccgcagagaattggccggaagtataagaaagtgcgatttatggcctatacagacgaaacctttaagacaagggaggccatccagcatgagagtgggattttgggacctcttctttacggcgaagttggtgataccctcctcatcatcttcaagaatcaagcttctcgcccctataacatttacccacacgggatcactgacgttaggcctttgtatagcagaagacttcccaaaggcgtgaagcatctcaaagacttccccattttgccaggcgagatctttaagtacaaatggaccgtcacagtggaagatggaccgactaaatcagaccctcgatgccttacgcggtactattcctccttcgtgaatatggagagagatttggcaagcggactcataggaccactcctcatctgttacaaggaatctgtagaccagaggggtaaccagattatgagtgataaacgcaatgtgatcctttttagcgtcttcgacgagaaccggtcctggtacttgaccgagaatatacaaaggttccttcccaaccccgcaggcgttcagttggaagaccctgagtttcaggccagcaatattatgcactcaatcaacggctatgtgtttgatagtctccagctttctgtttgcctccatgaagtagcctattggtacatcttgtcaattggtgctcaaacagacttcctctccgtcttcttctccggctacacctttaagcacaagatggtgtatgaggacactctcacactctttccattttctggagaaaccgtgttcatgagcatggagaatccaggcctttggatcttgggttgccacaacagtgattttcgcaatcggggaatgactgctctcctcaaagtcagcagctgtgataagaacacaggcgactattacgaagattcttacgaggacataagtgcctactttgactccaagaataacgccattgagcccagatcattctcccagaatcctcccgtgcttaaaaggcatcagcgcgaaatcaccagaactactcttcagtctgatcaagaggagattgactatgacgacaccataagcgtggaaatgaagaaggaggatttcgatatctatgacgaagatgagaaccagtctccgcggagctttcagaagaagacgcgacactacttcattgcagcagtcgaaaggctttgggactacggtatgtcatcatcccctcatgtgttgcgcaatagagctcagagtggaagtgttccacagttcaagaaagtcgtctttcaagagtttacagatggcagcttcacacagcctctctatcggggcgagcttaacgaacatttgggactccttggtccctatatccgagccgaagtggaggacaacattatggttacctttaggaatcaagcctctcgcccctacagcttctactcctccctcatcagttatgaggaggatcagagacaaggcgctgaaccacggaagaactttgtgaaaccgaatgagacgaagacctacttctggaaagtacagcaccacatggcccccacaaaagacgaattcgattgcaaagcatgggcgtatttttcagacgttgacttggagaaagatgtacattcaggacttattggtcctttgttggtgtgtcacactaacactctcaatccagcccatggcaggcaggtgacagtccaggaattcgctcttttctttaccatctttgatgagaccaagtcctggtacttcacggaaaacatggagcgcaattgcagagccccctgtaacatacagatggaggaccctacctttaaggaaaattatcggttccacgcaatcaacggatacattatggatacactccctggccttgtgatggctcaggaccaacgaatcaggtggtacctcctcagcatgggttctaatgagaacatacactccattcacttttcaggacatgtgttcactgtccggaagaaagaagagtataagatggccctctacaatttgtatccaggcgtgtttgagaccgttgaaatgcttccctctaaagctggcatctggagagtagagtgcttgatcggagaacatcttcacgcaggtatgagcaccttgttcctcgtgtacagcaacaaatgtcagaccccacttggcatggccagtggacacattcgcgactttcagatcacagcatctggccagtatggacaatgggccccaaagttggctcgcctccattactccggtagcataaatgcgtggtccactaaagaacctttcagctggattaaggtcgatcttcttgcccccatgatcatccacggcattaagacacagggagcgaggcagaaaggttcctccctgtacatctcacagttcattattatgtatagtttggacggcaagaagtggcaaacttatagaggtaacagtactggaacagacatggtgttcttcggcaacgttgatagctctggcatcaaacacaacatctttaatcctcccataatagctcggtacatcagattgcatccgacccactacagcattaggagtacactccgaatggagcttatgggttgcgacttgaattcctgttcaatgccactcggaatggagtctaaagccatctctgatgcacagataaccgccagtagctactttacgaacatgtttgctacgtggtcaccctctaaggcaaggcttcatttgcaaggccggtctaatgcctggagacctcaggtgaacaacccgaaagaatggctccaggtggactttcagaagaccatgaaagtaacaggtgtcactactcagggagttaagtccttggatactagcatgtatgtgaaggagttccttatttcctcatcacaagatggccaccagtggaccctcttctttcagaatggtaaggtcaaagtgtttcagggcaatcaagacagcttcacacccgtggtgaacagtcttgatcctccactcttgacacgataccttcgaatccatccacagtcttgggagcaccagattgcattgcgcatggaagtacttggatgcgaggctcaggacctctac

SEQ ID NO: 792 - protein, 1457 aa, synthetic construct
  REGION 1..1457: note = Variant of human B-domain deleted Factor VIII
MQIELSTCFFLCLLRFCFSATRRYYLGAVELSWDYMQSDLGELPVDARFPPRVPKSFPFNTSVVYKKTLFVEFTDHLFNIAKPRPPWMGLLGPTIQAEVYDTVVITLKNMASHPVSLHAVGVSYWKASEGAEYDDQTSQREKEDDKVFPGGSHTYVWQVLKENGPMASDPPCLTYSYLSHVDLVKDLNSGLIGALLVCREGSLAKEKTQTLHKFILLFAVFDEGKSWHSETKNSLMQDRDAASARAWPKMHTVNGYVNRTLPGLIGCHRKSVYWHVIGMGTTPEVHSIFLEGHTFLVRNHRQASLEISPITFLTAQTLLMDLGQFLLFCHISSHQHDGMEAYVKVDSCPEEPQLRMKNNEEAEDYDDDLTDSEMDVVRFDDDNSPSIIQIRSVAKKHPKTWVHYIAAEEEDWDYAPLVLAPDDRSYKSQYLNNGPQRIGRKYKKVRFMAYTDETFKTREAIQHESGILGPLLYGEVGDTLLIIFKNQASRPYNIYPHGITDVRPLYSRRLPKGVKHLKDFPILPGEIFKYKWTVTVEDGPTKSDPRCLTRYYSSFVNMERDLASGLIGPLLICYKESVDQRGNQIMSDKRNVILFSVFDENRSWYLTENIQRFLPNPAGVQLEDPEFQASNIMHSINGYVFDSLQLSVCLHEVAYWYILSIGAQTDFLSVFFSGYTFKHKMVYEDTLTLFPFSGETVFMSMENPGLWILGCHNSDFRNRGMTALLKVSSCDKNTGDYYEDSYEDISAYFDSKNNAIEPRSFSQNPPVLKRHQREITRTTLQSDQEEIDYDDTISVEMKKEDFDIYDEDENQSPRSFQKKTRHYFIAAVERLWDYGMSSSPHVLRNRAQSGSVPQFKKVVFQEFTDGSFTQPLYRGELNEHLGLLGPYIRAEVEDNIMVTFRNQASRPYSFYSSLISYEEDQRQGAEPRKNFVKPNETKTYFWKVQHHMAPTKDEFDCKAWAYFSDVDLEKDVHSGLIGPLLVCHTNTLNPAHGRQVTVQEFALFFTIFDETKSWYFTENMERNCRAPCNIQMEDPTFKENYRFHAINGYIMDTLPGLVMAQDQRIRWYLLSMGSNENIHSIHFSGHVFTVRKKEEYKMALYNLYPGVFETVEMLPSKAGIWRVECLIGEHLHAGMSTLFLVYSNKCQTPLGMASGHIRDFQITASGQYGQWAPKLARLHYSGSINAWSTKEPFSWIKVDLLAPMIIHGIKTQGARQKGSSLYISQFIIMYSLDGKKWQTYRGNSTGTDMVFFGNVDSSGIKHNIFNPPIIARYIRLHPTHYSIRSTLRMELMGCDLNSCSMPLGMESKAISDAQITASSYFTNMFATWSPSKARLHLQGRSNAWRPQVNNPKEWLQVDFQKTMKVTGVTTQGVKSLDTSMYVKEFLISSSQDGHQWTLFFQNGKVKVFQGNQDSFTPVVNSLDPPLLTRYLRIHPQSWEHQIALRMEVLGCEAQDLY

SEQ ID NO: 793 - DNA, 4371 bp, synthetic construct
  misc_feature 1..4371: note = Variant of human B-domain deleted Factor VIII
  source 1..4371: mol_type = other DNA
atgcagattgaactgtctacctgcttcttcctctgtttgctgaggttctgctttagcgccactagacggtactaccttggcgctgtggagctgtcctgggactatatgcagagtgatttgggagagcttcccgtcgacgcacgatttcctcctcgcgttccaaagtcatttccctttaacacaagcgtggtgtacaagaagacgctcttcgtcgaattcaccgatcacctgttcaatatcgccaaacccagaccaccatggatgggtcttttggggcctaccatacaagcggaggtgtatgacacagttgttatcactctcaagaacatggcttctcatccggtaagtcttcacgcagtgggcgtgtcctactggaaagcttcagaaggagccgagtatgatgatcagacatcccagagggagaaagaagacgacaaggtatttccaggtgggtctcatacctatgtgtggcaagtgctcaaagagaatggccctatggcaagcgatccgccgtgtttgacttacagctacctttcacacgttgacctcgtcaaggacctcaactccgggttgattggagccttgttggtatgcagggaaggatctcttgccaaagagaagacacagaccctccacaagtttatccttctctttgctgtgttcgatgagggcaaaagttggcatagcgaaacgaagaattccctcatgcaggatcgcgacgcagccagcgccagagcttggcccaagatgcacactgtgaacggatatgtcaataggacgcttcctggcttgattgggtgtcatcggaaaagtgtctactggcacgtgatcggaatggggacaacaccagaggtccactccatatttctcgaaggccataccttccttgttcgaaaccacagacaggcatccttggagatctctcccattacctttctcactgcccaaacgctccttatggacttgggtcagttccttctcttctgccatatcagctcacaccagcatgatggtatggaagcttatgtgaaagtcgacagttgtcctgaggagccacagttgcgcatgaagaataatgaagaagccgaggattacgacgacgatctcaccgattctgagatggacgtggtgaggtttgatgacgacaactctccctccaccattcaaattcggagcgtggcgaagaaacaccccaagacttgggtccactatatagcggcggaagaggaggattgggattacgctcctcttgtattggcaccagatgaccgctcatacaaaagccagtacctcaacaacggaccgcagagaattggccggaagtataagaaagtgcgatttatggcctatacagacgaaacctttaagacaagggaggccatccagcatgagagtgggattttgggacctcttctttacggcgaagttggtgataccctcctcatcatcttcaagaatcaagcttctcgcccctataacatttacccacacgggatcactgacgttaggcctttgtatagcagaagacttcccaaaggcgtgaagcatctcaaagacttccccattttgccaggcgagatctttaagtacaaatggaccgtcacagtggaagatggaccgactaaatcagaccctcgatgccttacgcggtactattcctccttcgtgaatatggagagagatttggcaagcggactcataggaccactcctcatctgttacaaggaatctgtagaccagaggggtaaccagattatgagtgataaacgcaatgtgatcctttttagcgtcttcgacgagaaccggtcctggtacttgaccgagaatatacaaaggttccttcccaaccccgcaggcgttcagttggaagaccctgagtttcaggccagcaatattatgcactcaatcaacggctatgtgtttgatagtctccagctttctgtttgcctccatgaagtagcctattggtacatcttgtcaattggtgctcaaacagacttcctctccgtcttcttctccggctacacctttaagcacaagatggtgtatgaggacactctcacactctttccattttctggagaaaccgtgttcatgagcatggagaatccaggcctttggatcttgggttgccacaacagtgattttcgcaatcggggaatgactgctctcctcaaagtcagcagctgtgataagaacacaggcgactattacgaagattcttacgaggacataagtgcctacctggactccaagaataacgccattgagcccagatcattctcccagaatcctcccgtgcttaaaaggcatcagcgcgaaatcaccagaactactcttcagtctgatcaagaggagattgactatgacgacaccataagcgtggaaatgaagaaggaggatttcgatatctatgacgaagatgagaaccagtctccgcggagctttcagaagaagacgcgacactacttcattgcagcagtcgaaaggctttgggactacggtatgtcatcatcccctcatgtgttgcgcaatagagctcagagtggaagtgttccacagttcaagaaagtcgtctttcaagagtttacagatggcagcttcacacagcctctctatcggggcgagcttaacgaacatttgggactccttggtccctatatccgagccgaagtggaggacaacattatggttacctttaggaatcaagcctctcgcccctacagcttctactcctccctcatcagttatgaggaggatcagagacaaggcgctgaaccacggaagaactttgtgaaaccgaatgagacgaagacctacttctggaaagtacagcaccacatggcccccacaaaagacgaattcgattgcaaagcatgggcgtatttttcagacgttgacttggagaaagatgtacattcaggacttattggtcctttgttggtgtgtcacactaacactctcaatccagcccatggcaggcaggtgacagtccaggaattcgctcttttctttaccatctttgatgagaccaagtcctggtacttcacggaaaacatggagcgcaattgcagagccccctgtaacatacagatggaggaccctacctttaaggaaaattatcggttccacgcaatcaacggatacattatggatacactccctggccttgtgatggctcaggaccaacgaatcaggtggtacctcctcagcatgggttctaatgagaacatacactccattcacttttcaggacatgtgttcactgtccggaagaaagaagagtataagatggccctctacaatttgtatccaggcgtgtttgagaccgttgaaatgcttccctctaaagctggcatctggagagtagagtgcttgatcggagaacatcttcacgcaggtatgagcaccttgttcctcgtgtacagcaacaaatgtcagaccccacttggcatggccagtggacacattcgcgactttcagatcacagcatctggccagtatggacaatgggccccaaagttggctcgcctccattactccggtagcataaatgcgtggtccactaaagaacctttcagctggattaaggtcgatcttcttgcccccatgatcatccacggcattaagacacagggagcgaggcagaaattctcctccctctacatctcacagttcattattatgtatagtttggacggcaagaagtggcaaacttatagaggtaacagtactggaacagacatggtgttcttcggcaacgttgatagctctggcatcaaacacaacatctttaatcctcccataatagctcggtacatcagattgcatccgacccactacagcattaggagtacactccgaatggagcttatgggttgcgacttgaattcctgttcaatgccactcggaatggagtctaaagccatctctgatgcacagataaccgccagtagctactttacgaacatgtttgctacgtggtcaccctctaaggcaaggcttcatttgcaaggccggtctaatgcctggagacctcaggtgaacaacccgaaagaatggctccaggtggactttcagaagaccatgaaagtaacaggtgtcactactcagggagttaagtccttggatactagcatgtatgtgaaggagttccttatttcctcatcacaagatggccaccagtggaccctcttctttcagaatggtaaggtcaaagtgtttcagggcaatcaagacagcttcacacccgtggtgaacagtcttgatcctccactcttgacacgataccttcgaatccatccacagtcttgggagcaccagattgcattgcgcatggaagtacttggatgcgaggctcaggacctctac

SEQ ID NO: 794 - protein, 1457 aa, synthetic construct
  REGION 1..1457: note = Variant of human B-domain deleted Factor VIII
MQIELSTCFFLCLLRFCFSATRRYYLGAVELSWDYMQSDLGELPVDARFPPRVPKSFPFNTSVVYKKTLFVEFTDHLFNIAKPRPPWMGLLGPTIQAEVYDTVVITLKNMASHPVSLHAVGVSYWKASEGAEYDDQTSQREKEDDKVFPGGSHTYVWQVLKENGPMASDPPCLTYSYLSHVDLVKDLNSGLIGALLVCREGSLAKEKTQTLHKFILLFAVFDEGKSWHSETKNSLMQDRDAASARAWPKMHTVNGYVNRTLPGLIGCHRKSVYWHVIGMGTTPEVHSIFLEGHTFLVRNHRQASLEISPITFLTAQTLLMDLGQFLLFCHISSHQHDGMEAYVKVDSCPEEPQLRMKNNEEAEDYDDDLTDSEMDVVRFDDDNSPSTIQIRSVAKKHPKTWVHYIAAEEEDWDYAPLVLAPDDRSYKSQYLNNGPQRIGRKYKKVRFMAYTDETFKTREAIQHESGILGPLLYGEVGDTLLIIFKNQASRPYNIYPHGITDVRPLYSRRLPKGVKHLKDFPILPGEIFKYKWTVTVEDGPTKSDPRCLTRYYSSFVNMERDLASGLIGPLLICYKESVDQRGNQIMSDKRNVILFSVFDENRSWYLTENIQRFLPNPAGVQLEDPEFQASNIMHSINGYVFDSLQLSVCLHEVAYWYILSIGAQTDFLSVFFSGYTFKHKMVYEDTLTLFPFSGETVFMSMENPGLWILGCHNSDFRNRGMTALLKVSSCDKNTGDYYEDSYEDISAYLDSKNNAIEPRSFSQNPPVLKRHQREITRTTLQSDQEEIDYDDTISVEMKKEDFDIYDEDENQSPRSFQKKTRHYFIAAVERLWDYGMSSSPHVLRNRAQSGSVPQFKKVVFQEFTDGSFTQPLYRGELNEHLGLLGPYIRAEVEDNIMVTFRNQASRPYSFYSSLISYEEDQRQGAEPRKNFVKPNETKTYFWKVQHHMAPTKDEFDCKAWAYFSDVDLEKDVHSGLIGPLLVCHTNTLNPAHGRQVTVQEFALFFTIFDETKSWYFTENMERNCRAPCNIQMEDPTFKENYRFHAINGYIMDTLPGLVMAQDQRIRWYLLSMGSNENIHSIHFSGHVFTVRKKEEYKMALYNLYPGVFETVEMLPSKAGIWRVECLIGEHLHAGMSTLFLVYSNKCQTPLGMASGHIRDFQITASGQYGQWAPKLARLHYSGSINAWSTKEPFSWIKVDLLAPMIIHGIKTQGARQKFSSLYISQFIIMYSLDGKKWQTYRGNSTGTDMVFFGNVDSSGIKHNIFNPPIIARYIRLHPTHYSIRSTLRMELMGCDLNSCSMPLGMESKAISDAQITASSYFTNMFATWSPSKARLHLQGRSNAWRPQVNNPKEWLQVDFQKTMKVTGVTTQGVKSLDTSMYVKEFLISSSQDGHQWTLFFQNGKVKVFQGNQDSFTPVVNSLDPPLLTRYLRIHPQSWEHQIALRMEVLGCEAQDLY

SEQ ID NO: 795 - DNA, 4371 bp, synthetic construct
  misc_feature 1..4371: note = Variant of human B-domain deleted Factor VIII
  source 1..4371: mol_type = other DNA
atgcagattgaactgtctacctgcttcttcctctgtttgctgaggttctgctttagcgccactagacggtactaccttggcgctgtggagctgtcctgggactatatgcagagtgatttgggagagcttcccgtcgacgcacgatttcctcctcgcgttccaaagtcatttccctttaacacaagcgtggtgtacaagaagacgctcttcgtcgaattcaccgatcacctgttcaatatcgccaaacccagaccaccatggatgggtcttttggggcctaccatacaagcggaggtgtatgacacagttgttatcactctcaagaacatggcttctcatccggtaagtcttcacgcagtgggcgtgtcctactggaaagcttcagaaggagccgagtatgatgatcagacatcccagagggagaaagaagacgacaaggtatttccaggtgggtctcatacctatgtgtggcaagtgctcaaagagaatggccctatggcaagcgatccgccgtgtttgacttacagctacctttcacacgttgacctcgtcaaggacctcaactccgggttgattggagccttgttggtatgcagggaaggatctcttgccaaagagaagacacagaccctccacaagtttatccttctctttgctgtgttcgatgagggcaaaagttggcatagcgaaacgaagaattccctcatgcaggatcgcgacgcagccagcgccagagcttggcccaagatgcacactgtgaacggatatgtcaataggacgcttcctggcttgattgggtgtcatcggaaaagtgtctactggcacgtgatcggaatggggacaacaccagaggtccactccatatttctcgaaggccataccttccttgttcgaaaccacagacaggcatccttggagatctctcccattacctttctcactgcccaaacgctccttatggacttgggtcagttccttctcttttgccatatcccgtcacaccagcatgatggtatggaagcttatgtgaaagtcgacagttgtcctgaggagccacagttgcgcatgaagaataatgaagaagccgaggattacgacgacgatctcaccgattctgagatggacgtggtgaggtttgatgacgacaactctccctccatcattcaaattcggagcgtggcgaagaaacaccccaagacttgggtccactatatagcggcggaagaggaggattgggattacgctcctcttgtattggcaccagatgaccgctcatacaaaagccagtacctcaacaacggaccgcagagaattggccggaagtataagaaagtgcgatttatggcctatacagacgaaacctttaagacaagggaggccatccagcatgagagtgggattttgggacctcttctttacggcgaagttggtgataccctcctcatcatcttcaagaatcaagcttctcgcccctataacatttacccacacgggatcactgacgttaggcctttgtatagcagaagacttcccaaaggcgtgaagcatctcaaagacttccccattttgccaggcgagatctttaagtacaaatggaccgtcacagtggaagatggaccgactaaatcagaccctcgatgccttacgcggtactattcctccttcgtgaatatggagagagatttggcaagcggactcataggaccactcctcatctgttacaaggaatctgtagaccagaggggtaaccagattatgagtgataaacgcaatgtgatcctttttagcgtcttcgacgagaaccggtcctggtacttgaccgagaatatacaaaggttccttcccaaccccgcaggcgttcagttggaagaccctgagtttcaggccagcaatattatgcactcaatcaacggctatgtgtttgatagtctccagctttctgtttgcctccatgaagtagcctattggtacatcttgtcaattggtgctcaaacagacttcctctccgtcttcttctccggctacacctttaagcacaagatggtgtatgaggacactctcacactctttccattttctggagaaaccgtgttcatgagcatggagaatccaggcctttggatcttgggttgccacaacagtgattttcgcaatcggggaatgactgctctcctcaaagtcagcagctgtgataagaacacaggcgactattacgaagattcttacgaggacataagtgcctacctggactccaagaataacgccattgagcccagatcattctcccagaatcctcccgtgcttaaaaggcatcagcgcgaaatcaccagaactactcttcagtctgatcaagaggagattgactatgacgacaccataagcgtggaaatgaagaaggaggatttcgatatctatgacgaagatgagaaccagtctccgcggagctttcagaagaagacgcgacactacttcattgcagcagtcgaaaggctttgggactacggtatgtcatcatcccctcatgtgttgcgcaatagagctcagagtggaagtgttccacagttcaagaaagtcgtctttcaagagtttacagatggcagcttcacacagcctctctatcggggcgagcttaacgaacatttgggactccttggtccctatatccgagccgaagtggaggacaacattatggttacctttaggaatcaagcctctcgcccctacagcttctactcctccctcatcagttatgaggaggatcagagacaaggcgctgaaccacggaagaactttgtgaaaccgaatgagacgaagacctacttctggaaagtacagcaccacatggcccccacaaaagacgaattcgattgcaaagcatgggcgtatttttcagacgttgacttggagaaagatgtacattcaggacttattggtcctttgttggtgtgtcacactaacactctcaatccagcccatggcaggcaggtgacagtccaggaattcgctcttttctttaccatctttgatgagaccaagtcctggtacttcacggaaaacatggagcgcaattgcagagccccctgtaacatacagatggaggaccctacctttaaggaaaattatcggttccacgcaatcaacggatacattatggatacactccctggccttgtgatggctcaggaccaacgaatcaggtggtacctcctcagcatgggttctaatgagaacatacactccattcacttttcaggacatgtgttcactgtccggaagaaagaagagtataagatggccctctacaatttgtatccaggcgtgtttgagaccgttgaaatgcttccctctaaagctggcatctggagagtagagtgcttgatcggagaacatcttcacgcaggtatgagcaccttgttcctcgtgtacagcaacaaatgtcagaccccacttggcatggccagtggacacattcgcgactttcagatcacagcatctggccagtatggacaatgggccccaaagttggctcgcctccattactccggtagcataaatgcgtggtccactaaagaacctttcagctggattaaggtcgatcttcttgcccccatgatcatccacggcattaagacacagggagcgaggcagaaattctcctccctctacatctcacagttcattattatgtatagtttggacggcaagaagtggcaaacttatagaggtaacagtactggaacagacatggtgttcttcggcaacgttgatagctctggcatcaaacacaacatctttaatcctcccataatagctcggtacatcagattgcatccgacccactacagcattaggagtacactccgaatggagcttatgggttgcgacttgaattcctgttcaatgccactcggaatggagtctaaagccatctctgatgcacagataaccgccagtagctactttacgaacatgtttgctacgtggtcaccctctaaggcaaggcttcatttgcaaggccggtctaatgcctggagacctcaggtgaacaacccgaaagaatggctccaggtggactttcagaagaccatgaaagtaacaggtgtcactactcagggagttaagtccttggatactagcatgtatgtgaaggagttccttatttcctcatcacaagatggccaccagtggaccctcttctttcagaatggtaaggtcaaagtgtttcagggcaatcaagacagcttcacacccgtggtgaacagtcttgatcctccactcttgacacgataccttcgaatccatccacagtcttgggagcaccagattgcattgcgcatggaagtacttggatgcgaggctcaggacctctac

SEQ ID NO: 796 - protein, 1457 aa, synthetic construct
  REGION 1..1457: note = Variant of human B-domain deleted Factor VIII
MQIELSTCFFLCLLRFCFSATRRYYLGAVELSWDYMQSDLGELPVDARFPPRVPKSFPFNTSVVYKKTLFVEFTDHLFNIAKPRPPWMGLLGPTIQAEVYDTVVITLKNMASHPVSLHAVGVSYWKASEGAEYDDQTSQREKEDDKVFPGGSHTYVWQVLKENGPMASDPPCLTYSYLSHVDLVKDLNSGLIGALLVCREGSLAKEKTQTLHKFILLFAVFDEGKSWHSETKNSLMQDRDAASARAWPKMHTVNGYVNRTLPGLIGCHRKSVYWHVIGMGTTPEVHSIFLEGHTFLVRNHRQASLEISPITFLTAQTLLMDLGQFLLFCHIPSHQHDGMEAYVKVDSCPEEPQLRMKNNEEAEDYDDDLTDSEMDVVRFDDDNSPSIIQIRSVAKKHPKTWVHYIAAEEEDWDYAPLVLAPDDRSYKSQYLNNGPQRIGRKYKKVRFMAYTDETFKTREAIQHESGILGPLLYGEVGDTLLIIFKNQASRPYNIYPHGITDVRPLYSRRLPKGVKHLKDFPILPGEIFKYKWTVTVEDGPTKSDPRCLTRYYSSFVNMERDLASGLIGPLLICYKESVDQRGNQIMSDKRNVILFSVFDENRSWYLTENIQRFLPNPAGVQLEDPEFQASNIMHSINGYVFDSLQLSVCLHEVAYWYILSIGAQTDFLSVFFSGYTFKHKMVYEDTLTLFPFSGETVFMSMENPGLWILGCHNSDFRNRGMTALLKVSSCDKNTGDYYEDSYEDISAYLDSKNNAIEPRSFSQNPPVLKRHQREITRTTLQSDQEEIDYDDTISVEMKKEDFDIYDEDENQSPRSFQKKTRHYFIAAVERLWDYGMSSSPHVLRNRAQSGSVPQFKKVVFQEFTDGSFTQPLYRGELNEHLGLLGPYIRAEVEDNIMVTFRNQASRPYSFYSSLISYEEDQRQGAEPRKNFVKPNETKTYFWKVQHHMAPTKDEFDCKAWAYFSDVDLEKDVHSGLIGPLLVCHTNTLNPAHGRQVTVQEFALFFTIFDETKSWYFTENMERNCRAPCNIQMEDPTFKENYRFHAINGYIMDTLPGLVMAQDQRIRWYLLSMGSNENIHSIHFSGHVFTVRKKEEYKMALYNLYPGVFETVEMLPSKAGIWRVECLIGEHLHAGMSTLFLVYSNKCQTPLGMASGHIRDFQITASGQYGQWAPKLARLHYSGSINAWSTKEPFSWIKVDLLAPMIIHGIKTQGARQKFSSLYISQFIIMYSLDGKKWQTYRGNSTGTDMVFFGNVDSSGIKHNIFNPPIIARYIRLHPTHYSIRSTLRMELMGCDLNSCSMPLGMESKAISDAQITASSYFTNMFATWSPSKARLHLQGRSNAWRPQVNNPKEWLQVDFQKTMKVTGVTTQGVKSLDTSMYVKEFLISSSQDGHQWTLFFQNGKVKVFQGNQDSFTPVVNSLDPPLLTRYLRIHPQSWEHQIALRMEVLGCEAQDLY

SEQ ID NO: 797 - DNA, 4371 bp, synthetic construct
  misc_feature 1..4371: note = Variant of human B-domain deleted Factor VIII
  source 1..4371: mol_type = other DNA
atgcagattgaactgtctacctgcttcttcctctgtttgctgaggttctgctttagcgccactagacggtactaccttggcgctgtggagctgtcctgggactatatgcagagtgatttgggagagcttcccgtcgacgcacgatttcctcctcgcgttccaaagtcatttccctttaacacaagcgtggtgtacaagaagacgctcttcgtcgaattcaccgatcacctgttcaatatcgccaaacccagaccaccatggatgggtcttttggggcctaccatacaagcggaggtgtatgacacagttgttatcactctcaagaacatggcttctcatccggtaagtcttcacgcagtgggcgtgtcctactggaaagcttcagaaggagccgagtatgatgatcagacatcccagagggagaaagaagacgacaaggtatttccaggtgggtctcatacctatgtgtggcaagtgctcaaagagaatggccctatggcaagcgatccgccgtgtttgacttacagctacctttcacacgttgacctcgtcaaggacctcaactccgggttgattggagccttgttggtatgcagggaaggatctcttgccaaagagaagacacagaccctccacaagtttatccttctctttgctgtgttcgatgagggcaaaagttggcatagcgaaacgaagaattccctcatgcaggatcgcgacgcagccagcgccagagcttggcccaagatgcacactgtgaacggatatgtcaataggacgcttcctggcttgattgggtgtcatcggaaaagtgtctactggcacgtgatcggaatggggacaacaccagaggtccactccatatttctcgaaggccataccttccttgttcgaaaccacagacaggcatccttggagatctctcccattacctttctcactgcccaaacgctccttatggacttgggtcagttccttctcttctgccatatcagctcacaccagcatgatggtatggaagcttatgtgaaagtcgacagttgtcctgaggagccacagttgcgcatgaagaataatgaagaagccgaggattacgacgacgatctcaccgattctgagatggacgtggtgaggtttgatgacgacaactctccctccatcattcaaatccggagcgtggcgaagaaacaccccaagacttgggtccactatatagcggcggaagaggaggattgggattacgctcctcttgtattggcaccagatgaccgctcatacaaaagccagtacctcaacaacggaccgcagagaattggccggaagtataagaaagtgcgatttatggcctatacagacgaaacctttaagacaagggaggccatccagcatgagagtgggattttgggacctcttctttacggcgaagttggtgataccctcctcatcatcttcaagaatcaagcttctcgcccctataacatttacccacacgggatcactgacgttaggcctttgtatagcagaagacttcccaaaggcgtgaagcatctcaaagacttccccattttgccaggcgagatctttaagtacaaatggaccgtcacagtggaagatggaccgactaaatcagaccctcgatgccttacgcggtactattcctccttcgtgaatatggagagagatttggcaagcggactcataggaccactcctcatctgttacaaggaatctgtagaccagaggggtaaccagattatgagtgataaacgcaatgtgatcctttttagcgtcttcgacgagaaccggtcctggtacttgaccgagaatatacaaaggttccttcccaaccccgcaggcgttcagttggaagaccctgagtttcaggccagcaatattatgcactcaatcaacggctatgtgtttgatagtctccagctttctgtttgcctccatgaagtagcctattggtacatcttgtcaattggtgctcaaacagacttcctctccgtcttcttctccggctacacctttaagcacaagatggtgtatgaggacactctcacactctttccattttctggagaaaccgtgttcatgagcatggagaatccaggcctttggatcttgggttgccacaacagtgattttcgcaatcggggaatgactgctctcctcaaagtcagcagctgtgataagaacacaggcgactattacgaagattcttacgaggacataagtgcctacttggactccaagaataacgccattgagcccagatcattctcccagaatcctcccgtgcttaaaaggcatcagcgcgaaatcaccagaactactcttcagtctgatcaagaggagattgactatgacgacaccataagcgtggaaatgaagaaggaggatttcgatatctatgacgaagatgagaaccagtctccgcggagctttcagaagaagacgcgacactacttcattgcagcagtcgaaaggctttgggactacggtatgtcatcatcccctcatgtgttgcgcaatagagctcagagtggaagtgttccacagttcaagaaagtcgtctttcaagagtttacagatggcagcttcacacagcctctctatcggggcgagcttaacgaacatttgggactccttggtccctatatccgagccgaagtggaggacaacattaaggttacctttaggaatcaagcctctcgcccctacagcttctactcctccctcatcagttatgaggaggatcagagacaaggcgctgaaccacggaagaactttgtgaaaccgaatgagacgaagacctacttctggaaagtacagcaccacatggcccccacaaaagacgaattcgattgcaaagcatgggcgtatttttcagacgttgacttggagaaagatgtacattcaggacttattggtcctttgttggtgtgtcacactaacactctcaatccagcccatggcaggcaggtgacagtccaggaattcgctcttttctttaccatctttgatgagaccaagtcctggtacttcacggaaaacatggagcgcaattgcagagccccctgtaacatacagatggaggaccctacctttaaggaaaattatcggttccacgcaatcaacggatacattatggatacactccctggccttgtgatggctcaggaccaacgaatcaggtggtacctcctcagcatgggttctaatgagaacatacactccattcacttttcaggacatgtgttcactgtccggaagaaagaagagtataagatggccctctacaatttgtatccaggcgtgtttgagaccgttgaaatgcttccctctaaagctggcatctggagagtagagtgcttgatcggagaacatcttcacgcaggtatgagcaccttgttcctcgtgtacagcaacaaatgtcagaccccacttggcatggccagtggacacattcgcgactttcagatcacagcatctggccagtatggacaatgggccccaaagttggctcgcctccattactccggtagcataaatgcgtggtccactaaagaacctttcagctggattaaggtcgatcttcttgcccccatgatcatccacggcattaagacacagggagcgaggcagaaattctcctccctctacatctcacagttcattattatgtatagtttggacggcaagaagtggcaaacttatagaggtaacagtactggaacagacatggtgttcttcggcaacgttgatagctctggcatcaaacacaacatctttaatcctcccataatagctcggtacatcagattgcatccgacccactacagcattaggagtacactccgaatggagcttatgggttgcgacttgaattcctgttcaatgccactcggaatggagtctaaagccatctctgatgcacagataaccgccagtagctactttacgaacatgtttgctacgtggtcaccctctaaggcaaggcttcatttgcaaggccggtctaatgcctggagacctcaggtgaacaacccgaaagaatggctccaggtggactttcagaagaccatgaaagtaacaggtgtcactactcagggagttaagtccttggatactagcatgtatgtgaaggagttccttatttcctcatcacaagatggccaccagtggaccctcttctttcagaatggtaaggtcaaagtgtttcagggcaatcaagacagcttcacacccgtggtgaacagtcttgatcctccactcttgacacgataccttcgaatccatccacagtcttgggagcaccagattgcattgcgcatggaagtacttggatgcgaggctcaggacctctac

SEQ ID NO: 798 - protein, 1457 aa, synthetic construct
  REGION 1..1457: note = Variant of human B-domain deleted Factor VIII
MQIELSTCFFLCLLRFCFSATRRYYLGAVELSWDYMQSDLGELPVDARFPPRVPKSFPFNTSVVYKKTLFVEFTDHLFNIAKPRPPWMGLLGPTIQAEVYDTVVITLKNMASHPVSLHAVGVSYWKASEGAEYDDQTSQREKEDDKVFPGGSHTYVWQVLKENGPMASDPPCLTYSYLSHVDLVKDLNSGLIGALLVCREGSLAKEKTQTLHKFILLFAVFDEGKSWHSETKNSLMQDRDAASARAWPKMHTVNGYVNRTLPGLIGCHRKSVYWHVIGMGTTPEVHSIFLEGHTFLVRNHRQASLEISPITFLTAQTLLMDLGQFLLFCHISSHQHDGMEAYVKVDSCPEEPQLRMKNNEEAEDYDDDLTDSEMDVVRFDDDNSPSIIQIRSVAKKHPKTWVHYIAAEEEDWDYAPLVLAPDDRSYKSQYLNNGPQRIGRKYKKVRFMAYTDETFKTREAIQHESGILGPLLYGEVGDTLLIIFKNQASRPYNIYPHGITDVRPLYSRRLPKGVKHLKDFPILPGEIFKYKWTVTVEDGPTKSDPRCLTRYYSSFVNMERDLASGLIGPLLICYKESVDQRGNQIMSDKRNVILFSVFDENRSWYLTENIQRFLPNPAGVQLEDPEFQASNIMHSINGYVFDSLQLSVCLHEVAYWYILSIGAQTDFLSVFFSGYTFKHKMVYEDTLTLFPFSGETVFMSMENPGLWILGCHNSDFRNRGMTALLKVSSCDKNTGDYYEDSYEDISAYLDSKNNAIEPRSFSQNPPVLKRHQREITRTTLQSDQEEIDYDDTISVEMKKEDFDIYDEDENQSPRSFQKKTRHYFIAAVERLWDYGMSSSPHVLRNRAQSGSVPQFKKVVFQEFTDGSFTQPLYRGELNEHLGLLGPYIRAEVEDNIKVTFRNQASRPYSFYSSLISYEEDQRQGAEPRKNFVKPNETKTYFWKVQHHMAPTKDEFDCKAWAYFSDVDLEKDVHSGLIGPLLVCHTNTLNPAHGRQVTVQEFALFFTIFDETKSWYFTENMERNCRAPCNIQMEDPTFKENYRFHAINGYIMDTLPGLVMAQDQRIRWYLLSMGSNENIHSIHFSGHVFTVRKKEEYKMALYNLYPGVFETVEMLPSKAGIWRVECLIGEHLHAGMSTLFLVYSNKCQTPLGMASGHIRDFQITASGQYGQWAPKLARLHYSGSINAWSTKEPFSWIKVDLLAPMIIHGIKTQGARQKFSSLYISQFIIMYSLDGKKWQTYRGNSTGTDMVFFGNVDSSGIKHNIFNPPIIARYIRLHPTHYSIRSTLRMELMGCDLNSCSMPLGMESKAISDAQITASSYFTNMFATWSPSKARLHLQGRSNAWRPQVNNPKEWLQVDFQKTMKVTGVTTQGVKSLDTSMYVKEFLISSSQDGHQWTLFFQNGKVKVFQGNQDSFTPVVNSLDPPLLTRYLRIHPQSWEHQIALRMEVLGCEAQDLY

SEQ ID NO: 799 - DNA, 4371 bp, synthetic construct
  misc_feature 1..4371: note = Variant of human B-domain deleted Factor VIII
  source 1..4371: mol_type = other DNA
atgcagattgaactgtctacctgcttcttcctctgtttgctgaggttctgctttagcgccactagacggtactaccttggcgctgtggagctgtcctgggactatatgcagagtgatttgggagagcttcccgtcgacgcacgatttcctcctcgcgttccaaagtcatttccctttaacacaagcgtggtgtacaagaagacgctcttcgtcgaattcaccgatcacctgttcaatatcgccaaacccagaccaccatggatgggtcttttggggcctaccatacaagcggaggtgtatgacacagttgttatcactctcaagaacatggcttctcatccggtaagtcttcacgcagtgggcgtgtcctactggaaagcttcagaaggagccgagtatgatgatcagacatcccagagggagaaagaagacgacaaggtatttccaggtgggtctcatacctatgtgtggcaagtgctcaaagagaatggccctatggcaagcgatccgccgtgtttgacttacagctacctttcacacgttgacctcgtcaaggacctcaactccgggttgattggagccttgttggtatgcagggaaggatctcttgccaaagagaagacacagaccctccacaagtttatccttctctttgctgtgttcgatgagggcaaaagttggcatagcgaaacgaagaattccctcatgcaggatcgcgacgcagccagcgccagagcttggcccaagatgcacactgtgaacggatatgtcaataggacgcttcctggcttgattgggtgtcatcggaaaagtgtctactggcacgtgatcggaatggggacaacaccagaggtccactccatatttctcgaaggccataccttccttgttcgaaaccacagacaggcatccttggagatctctcccattacctttctcactgcccaaacgctccttatggacttgggtcagttccttctcttctgccatatcagctcacaccagcatgatggtatggaagcttatgtgaaagtcgacagttgtcctgaggagccacagttgcgcatgaagaataatgaagaagccgaggattacgacgacgatctcaccgattctgagatggacgtggtgaggtttgatgacgacaactctccctccatcattcaaatccggagcgtggcgaagaaacaccccaagacttgggtccactatatagcggcggaagaggaggattgggattacgctcctcttgtattggcaccagatgaccgctcatacaaaagccagtacctcaacaacggaccgcagagaattggccggaagtataagaaagtgcgatttatggcctatacagacgaaacctttaagacaagggaggccatccagcatgagagtgggattttgggacctcttctttacggcgaagttggtgataccctcctcatcatcttcaagaatcaagcttctcgcccctataacatttacccacacgggatcactgacgttaggcctttgtatagcagaagacttcccaaaggcgtgaagcatctcaaagacttccccattttgccaggcgagatctttaagtacaaatggaccgtcacagtggaagatggaccgactaaatcagaccctcgatgccttacgcggtactattcctccttcgtgaatatggagagagatttggcaagcggactcataggaccactcctcatctgttacaaggaatctgtagaccagaggggtaaccagattatgagtgataaacgcaatgtgatcctttttagcgtcttcgacgagaaccggtcctggtacttgaccgagaatatacaaaggttccttcccaaccccgcaggcgttcagttggaagaccctgagtttcaggccagcaatattatgcactcaatcaacggctatgtgtttgatagtctccagctttctgtttgcctccatgaagtagcctattggtacatcttgtcaattggtgctcaaacagacttcctctccgtcttcttctccggctacacctttaagcacaagatggtgtatgaggacactctcacactctttccattttctggagaagaggtgttcatgagcatggagaatccaggcctttggatcttgggttgccacaacagtgattttcgcaatcggggaatgactgctctcctcaaagtcagcagctgtgataagaacacaggcgactattacgaagattcttacgaggacataagtgcctacttggactccaagaataacgccattgagcccagatcattctcccagaatcctcccgtgcttaaaaggcatcagcgcgaaatcaccagaactactcttcagtctgatcaagaggagattgactatgacgacaccataagcgtggaaatgaagaaggaggatttcgatatctatgacgaagatgagaaccagtctccgcggagctttcagaagaagacgcgacactacttcattgcagcagtcgaaaggctttgggactacggtatgtcatcatcccctcatgtgttgcgcaatagagctcagagtggaagtgttccacagttcaagaaagtcgtctttcaagagtttacagatggcagcttcacacagcctctctatcggggcgagcttaacgaacatttgggactccttggtccctatatccgagccgaagtggaggacaacattatggttacctttaggaatcaagcctctcgcccctacagcttctactcctccctcatcagttatgaggaggatcagagacaaggcgctgaaccacggaagaactttgtgaaaccgaatgagacgaagacctacttctggaaagtacagcaccacatggcccccacaaaagacgaattcgattgcaaagcatgggcgtatttttcagacgttgacttggagaaagatgtacattcaggacttattggtcctttgttggtgtgtcacactaacactctcaatccagcccatggcaggcaggtgacagtccaggaattcgctcttttctttaccatctttgatgagaccaagtcctggtacttcacggaaaacatggagcgcaattgcagagccccctgtaacatacagatggaggaccctacctttaaggaaaattatcggttccacgcaatcaacggatacattatggatacactccctggccttgtgatggctcaggaccaacgaatcaggtggtacctcctcagcatgggttctaatgagaacatacactccattcacttttcaggacatgtgttcactgtccggaagaaagaagagtataagatggccctctacaatttgtatccaggcgtgtttgagaccgttgaaatgcttccctctaaagctggcatctggagagtagagtgcttgatcggagaacatcttcacgcaggtatgagcaccttgttcctcgtgtacagcaacaaatgtcagaccccacttggcatggccagtggacacattcgcgactttcagatcacagcatctggccagtatggacaatgggccccaaagttggctcgcctccattactccggtagcataaatgcgtggtccactaaagaacctttcagctggattaaggtcgatcttcttgcccccatgatcatccacggcattaagacacagggagcgaggcagaaattctcctccctctacatctcacagttcattattatgtatagtttggacggcaagaagtggcaaacttatagaggtaacagtactggaacagacatggtgttcttcggcaacgttgatagctctggcatcaaacacaacatctttaatcctcccataatagctcggtacatcagattgcatccgacccactacagcattaggagtacactccgaatggagcttatgggttgcgacttgaattcctgttcaatgccactcggaatggagtctaaagccatctctgatgcacagataaccgccagtagctactttacgaacatgtttgctacgtggtcaccctctaaggcaaggcttcatttgcaaggccggtctaatgcctggagacctcaggtgaacaacccgaaagaatggctccaggtggactttcagaagaccatgaaagtaacaggtgtcactactcagggagttaagtccttggatactagcatgtatgtgaaggagttccttatttcctcatcacaagatggccaccagtggaccctcttctttcagaatggtaaggtcaaagtgtttcagggcaatcaagacagcttcacacccgtggtgaacagtcttgatcctccactcttgacacgataccttcgaatccatccacagtcttgggagcaccagattgcattgcgcatggaagtacttggatgcgaggctcaggacctctac

SEQ ID NO: 800 - protein, 1457 aa, synthetic construct
  REGION 1..1457: note = Variant of human B-domain deleted Factor VIII
MQIELSTCFFLCLLRFCFSATRRYYLGAVELSWDYMQSDLGELPVDARFPPRVPKSFPFNTSVVYKKTLFVEFTDHLFNIAKPRPPWMGLLGPTIQAEVYDTVVITLKNMASHPVSLHAVGVSYWKASEGAEYDDQTSQREKEDDKVFPGGSHTYVWQVLKENGPMASDPPCLTYSYLSHVDLVKDLNSGLIGALLVCREGSLAKEKTQTLHKFILLFAVFDEGKSWHSETKNSLMQDRDAASARAWPKMHTVNGYVNRTLPGLIGCHRKSVYWHVIGMGTTPEVHSIFLEGHTFLVRNHRQASLEISPITFLTAQTLLMDLGQFLLFCHISSHQHDGMEAYVKVDSCPEEPQLRMKNNEEAEDYDDDLTDSEMDVVRFDDDNSPSIIQIRSVAKKHPKTWVHYIAAEEEDWDYAPLVLAPDDRSYKSQYLNNGPQRIGRKYKKVRFMAYTDETFKTREAIQHESGILGPLLYGEVGDTLLIIFKNQASRPYNIYPHGITDVRPLYSRRLPKGVKHLKDFPILPGEIFKYKWTVTVEDGPTKSDPRCLTRYYSSFVNMERDLASGLIGPLLICYKESVDQRGNQIMSDKRNVILFSVFDENRSWYLTENIQRFLPNPAGVQLEDPEFQASNIMHSINGYVFDSLQLSVCLHEVAYWYILSIGAQTDFLSVFFSGYTFKHKMVYEDTLTLFPFSGEEVFMSMENPGLWILGCHNSDFRNRGMTALLKVSSCDKNTGDYYEDSYEDISAYLDSKNNAIEPRSFSQNPPVLKRHQREITRTTLQSDQEEIDYDDTISVEMKKEDFDIYDEDENQSPRSFQKKTRHYFIAAVERLWDYGMSSSPHVLRNRAQSGSVPQFKKVVFQEFTDGSFTQPLYRGELNEHLGLLGPYIRAEVEDNIMVTFRNQASRPYSFYSSLISYEEDQRQGAEPRKNFVKPNETKTYFWKVQHHMAPTKDEFDCKAWAYFSDVDLEKDVHSGLIGPLLVCHTNTLNPAHGRQVTVQEFALFFTIFDETKSWYFTENMERNCRAPCNIQMEDPTFKENYRFHAINGYIMDTLPGLVMAQDQRIRWYLLSMGSNENIHSIHFSGHVFTVRKKEEYKMALYNLYPGVFETVEMLPSKAGIWRVECLIGEHLHAGMSTLFLVYSNKCQTPLGMASGHIRDFQITASGQYGQWAPKLARLHYSGSINAWSTKEPFSWIKVDLLAPMIIHGIKTQGARQKFSSLYISQFIIMYSLDGKKWQTYRGNSTGTDMVFFGNVDSSGIKHNIFNPPIIARYIRLHPTHYSIRSTLRMELMGCDLNSCSMPLGMESKAISDAQITASSYFTNMFATWSPSKARLHLQGRSNAWRPQVNNPKEWLQVDFQKTMKVTGVTTQGVKSLDTSMYVKEFLISSSQDGHQWTLFFQNGKVKVFQGNQDSFTPVVNSLDPPLLTRYLRIHPQSWEHQIALRMEVLGCEAQDLY

SEQ ID NO: 801 - DNA, 4371 bp, synthetic construct
  misc_feature 1..4371: note = Variant of human B-domain deleted Factor VIII
  source 1..4371: mol_type = other DNA
atgcagattgaactgtctacctgcttcttcctctgtttgctgaggttctgctttagcgccactagacggtactaccttggcgctgtggagctgtcctgggactatatgcagagtgatttgggagagcttcccgtcgacgcacgatttcctcctcgcgttccaaagtcatttccctttaacacaagcgtggtgtacaagaagacgctcttcgtcgaattcaccgatcacctgttcaatatcgccaaacccagaccaccatggatgggtcttttggggcctaccatacaagcggaggtgtatgacacagttgttatcactctcaagaacatggcttctcatccggtaagtcttcacgcagtgggcgtgtcctactggaaagcttcagaaggagccgagtatgatgatcagacatcccagagggagaaagaagacgacaaggtatttccaggtgggtctcatacctatgtgtggcaagtgctcaaagagaatggccctatggcaagcgatccgccgtgtttgacttacagctacctttcacacgttgacctcgtcaaggacctcaactccgggttgattggagccttgttggtatgcagggaaggatctcttgccaaagagaagacacagaccctccacaagtttatccttctctttgctgtgttcgatgagggcaaaagttggcatagcgaaacgaagaattccctcatgcaggatcgcgacgcagccagcgccagagcttggcccaagatgcacactgtgaacggatatgtcaataggacgcttcctggcttgattgggtgtcatcggaaaagtgtctactggcacgtgatcggaatggggacaacaccagaggtccactccatatttctcgaaggccataccttccttgttcgaaaccacagacaggcatccttggagatctctcccattacctttctcactgcccaaacgctccttatggacttgggtcagttccttctcttctgccatatcagctcacaccagcatgatggtatggaagcttatgtgaaagtcgacagttgtcctgaggagccacagttgcgcatgaagaataatgaagaagccgaggattacgacgacgatctcaccgattctgagatggacgtggtgaggtttgatgacgacaactctccctccatcattcaaatccggagcgtggcgaagaaacaccccaagacttgggtccactatatagcggcggaagaggaggattgggattacgctcctcttgtattggcaccagatgaccgctcatacaaaagccagtacctcaacaacggaccgcagagaattggccggaagtataagaaagtgcgatttatggcctatacagacgaaacctttaagacaagggaggccatccagcatgagagtgggattttgggacctcttctttacggcgaagttggtgataccctcctcatcatcttcaagaatcaagcttctcgcccctataacatttacccacacgggatcactgacgttaggcctttgtatagcagaagacttcccaaaggcgtgaagcatctcaaagacttccccattttgccaggcgagatctttaagtacaaatggaccgtcacagtggaagatggaccgactaaatcagaccctcgatgccttacgcggtactattcctccttcgtgaatatggagagagatttggcaagcggactcataggaccactcctcatctgttacaaggaatctgtagaccagaggggtaaccagattatgagtgataaacgcaatgtgatcctttttagcgtcttcgacgagaaccggtcctggtacttgaccgagaatatacaaaggttccttcccaaccccgcaggcgttcagttggaagaccctgagtttcaggccagcaatattatgcactcaatcaacggctatgtgtttgatagtctccagctttctgtttgcctccatgaagtagcctattggtacatcttgtcaattggtgctcaaacagacttcctctccgtcttcttctccggctacacctttaagcacaagatggtgtatgaggacactctcacactctttccattttctggagaaaccgtgttcatgagcatggagaatccaggcctttggatcttgggttgccacaacagtgattttcgcaatcggggaatgactgctctcctcaaagtcagcagctgtgataagaacacaggcgactattacgaagattcttacgaggacataagtgcctacttggactccaagaataacgccattgagcccagatcattctcccagaatcctcccgtgcttaaaaggcatcagcgcgaaatcaccagaactactcttcagtctgatcaagaggagattgactatgacgacaccataagcgtggaaatgaagaaggaggatttcgatatctatgacgaagatgagaaccagtctccgcggagctggcagaagaagacgcgacactacttcattgcagcagtcgaaaggctttgggactacggtatgtcatcatcccctcatgtgttgcgcaatagagctcagagtggaagtgttccacagttcaagaaagtcgtctttcaagagtttacagatggcagcttcacacagcctctctatcggggcgagcttaacgaacatttgggactccttggtccctatatccgagccgaagtggaggacaacattatggttacctttaggaatcaagcctctcgcccctacagcttctactcctccctcatcagttatgaggaggatcagagacaaggcgctgaaccacggaagaactttgtgaaaccgaatgagacgaagacctacttctggaaagtacagcaccacatggcccccacaaaagacgaattcgattgcaaagcatgggcgtatttttcagacgttgacttggagaaagatgtacattcaggacttattggtcctttgttggtgtgtcacactaacactctcaatccagcccatggcaggcaggtgacagtccaggaattcgctcttttctttaccatctttgatgagaccaagtcctggtacttcacggaaaacatggagcgcaattgcagagccccctgtaacatacagatggaggaccctacctttaaggaaaattatcggttccacgcaatcaacggatacattatggatacactccctggccttgtgatggctcaggaccaacgaatcaggtggtacctcctcagcatgggttctaatgagaacatacactccattcacttttcaggacatgtgttcactgtccggaagaaagaagagtataagatggccctctacaatttgtatccaggcgtgtttgagaccgttgaaatgcttccctctaaagctggcatctggagagtagagtgcttgatcggagaacatcttcacgcaggtatgagcaccttgttcctcgtgtacagcaacaaatgtcagaccccacttggcatggccagtggacacattcgcgactttcagatcacagcatctggccagtatggacaatgggccccaaagttggctcgcctccattactccggtagcataaatgcgtggtccactaaagaacctttcagctggattaaggtcgatcttcttgcccccatgatcatccacggcattaagacacagggagcgaggcagaaattctcctccctctacatctcacagttcattattatgtatagtttggacggcaagaagtggcaaacttatagaggtaacagtactggaacagacatggtgttcttcggcaacgttgatagctctggcatcaaacacaacatctttaatcctcccataatagctcggtacatcagattgcatccgacccactacagcattaggagtacactccgaatggagcttatgggttgcgacttgaattcctgttcaatgccactcggaatggagtctaaagccatctctgatgcacagataaccgccagtagctactttacgaacatgtttgctacgtggtcaccctctaaggcaaggcttcatttgcaaggccggtctaatgcctggagacctcaggtgaacaacccgaaagaatggctccaggtggactttcagaagaccatgaaagtaacaggtgtcactactcagggagttaagtccttggatactagcatgtatgtgaaggagttccttatttcctcatcacaagatggccaccagtggaccctcttctttcagaatggtaaggtcaaagtgtttcagggcaatcaagacagcttcacacccgtggtgaacagtcttgatcctccactcttgacacgataccttcgaatccatccacagtcttgggagcaccagattgcattgcgcatggaagtacttggatgcgaggctcaggacctctac

SEQ ID NO: 802 - protein, 1457 aa, synthetic construct
  REGION 1..1457: note = Variant of human B-domain deleted Factor VIII
MQIELSTCFFLCLLRFCFSATRRYYLGAVELSWDYMQSDLGELPVDARFPPRVPKSFPFNTSVVYKKTLFVEFTDHLFNIAKPRPPWMGLLGPTIQAEVYDTVVITLKNMASHPVSLHAVGVSYWKASEGAEYDDQTSQREKEDDKVFPGGSHTYVWQVLKENGPMASDPPCLTYSYLSHVDLVKDLNSGLIGALLVCREGSLAKEKTQTLHKFILLFAVFDEGKSWHSETKNSLMQDRDAASARAWPKMHTVNGYVNRTLPGLIGCHRKSVYWHVIGMGTTPEVHSIFLEGHTFLVRNHRQASLEISPITFLTAQTLLMDLGQFLLFCHISSHQHDGMEAYVKVDSCPEEPQLRMKNNEEAEDYDDDLTDSEMDVVRFDDDNSPSIIQIRSVAKKHPKTWVHYIAAEEEDWDYAPLVLAPDDRSYKSQYLNNGPQRIGRKYKKVRFMAYTDETFKTREAIQHESGILGPLLYGEVGDTLLIIFKNQASRPYNIYPHGITDVRPLYSRRLPKGVKHLKDFPILPGEIFKYKWTVTVEDGPTKSDPRCLTRYYSSFVNMERDLASGLIGPLLICYKESVDQRGNQIMSDKRNVILFSVFDENRSWYLTENIQRFLPNPAGVQLEDPEFQASNIMHSINGYVFDSLQLSVCLHEVAYWYILSIGAQTDFLSVFFSGYTFKHKMVYEDTLTLFPFSGETVFMSMENPGLWILGCHNSDFRNRGMTALLKVSSCDKNTGDYYEDSYEDISAYLDSKNNAIEPRSFSQNPPVLKRHQREITRTTLQSDQEEIDYDDTISVEMKKEDFDIYDEDENQSPRSWQKKTRHYFIAAVERLWDYGMSSSPHVLRNRAQSGSVPQFKKVVFQEFTDGSFTQPLYRGELNEHLGLLGPYIRAEVEDNIMVTFRNQASRPYSFYSSLISYEEDQRQGAEPRKNFVKPNETKTYFWKVQHHMAPTKDEFDCKAWAYFSDVDLEKDVHSGLIGPLLVCHTNTLNPAHGRQVTVQEFALFFTIFDETKSWYFTENMERNCRAPCNIQMEDPTFKENYRFHAINGYIMDTLPGLVMAQDQRIRWYLLSMGSNENIHSIHFSGHVFTVRKKEEYKMALYNLYPGVFETVEMLPSKAGIWRVECLIGEHLHAGMSTLFLVYSNKCQTPLGMASGHIRDFQITASGQYGQWAPKLARLHYSGSINAWSTKEPFSWIKVDLLAPMIIHGIKTQGARQKFSSLYISQFIIMYSLDGKKWQTYRGNSTGTDMVFFGNVDSSGIKHNIFNPPIIARYIRLHPTHYSIRSTLRMELMGCDLNSCSMPLGMESKAISDAQITASSYFTNMFATWSPSKARLHLQGRSNAWRPQVNNPKEWLQVDFQKTMKVTGVTTQGVKSLDTSMYVKEFLISSSQDGHQWTLFFQNGKVKVFQGNQDSFTPVVNSLDPPLLTRYLRIHPQSWEHQIALRMEVLGCEAQDLY

SEQ ID NO: 803 - DNA, 4371 bp, synthetic construct
  misc_feature 1..4371: note = Variant of human B-domain deleted Factor VIII
  source 1..4371: mol_type = other DNA
atgcagattgaactgtctacctgcttcttcctctgtttgctgaggttctgctttagcgccactagacggtactaccttggcgctgtggagctgtcctgggactatatgcagagtgatttgggagagcttcccgtcgacgcacgatttcctcctcgcgttccaaagtcatttccctttaacacaagcgtggtgtacaagaagacgctcttcgtcgaattcaccgatcacctgttcaatatcgccaaacccagaccaccatggatgggtcttttggggcctaccatacaagcggaggtgtatgacacagttgttatcactctcaagaacatggcttctcatccggtaagtcttcacgcagtgggcgtgtcctactggaaagcttcagaaggagccgagtatgatgatcagacatcccagagggagaaagaagacgacaaggtatttccaggtgggtctcatacctatgtgtggcaagtgctcaaagagaatggccctatggcaagcgatccgccgtgtttgacttacagctacctttcacacgttgacctcgtcaaggacctcaactccgggttgattggagccttgttggtatgcagggaaggatctcttgccaaagagaagacacagaccctccacaagtttatccttctctttgctgtgttcgatgagggcaaaagttggcatagcgaaacgaagaattccctcatgcaggatcgcgacgcagccagcgccagagcttggcccaagatgcacactgtgaacggatatgtcaataggacgcttcctggcttgattgggtgtcatcggaaaagtgtctactggcacgtgatcggaatggggacaacaccagaggtccactccatatttctcgaaggccataccttccttgttcgaaaccacagacaggcatccttggagatctctcccattacctttctcactgcccaaacgctccttatggacttgggtcagttccttctcttctgccatatcagctcacaccagcatgatggtatggaagcttatgtgaaagtcgacagttgtcctgaggagccacagttgcgcatgaagaataatgaagaagccgaggattacgacgacgatctcaccgattctgagatggacgtggtgaggtttgatgacgacaactctccctccatcattcaaatccggagcgtggcgaagaaacaccccaagacttgggtccactatatagcggcggaagaggaggattgggattacgctcctcttgtattggcaccagatgaccgctcatacaaaagccagtacctcaacaacggaccgcagagaattggccggaagtataagaaagtgcgatttatggcctatacagacgaaacctttaagacaagggaggccatccagcatgagagtgggattttgggacctcttctttacggcgaagttggtgataccctcctcatcatcttcaagaatcaagcttctcgcccctataacatttacccacacgggatcactgacgttaggcctttgtatagcagaagacttcccaaaggcgtgaagcatctcaaagacttccccattttgccaggcgagatctttaagtacaaatggaccgtcacagtggaagatggaccgactaaatcagaccctcgatgccttacgcggtactattcctccttcgtgaatatggagagagatttggcaagcggactcataggaccactcctcatctgttacaaggaatctgtagaccagaggggtaaccagattatgagtgataaacgcaatgtgatcctttttagcgtcttcgacgagaaccggtcctggtacttgaccgagaatatacaaaggttccttcccaaccccgcaggcgttcagttggaagaccctgagtttcaggccagcaatattatgcactcaatcaacggctatgtgtttgatagtctccagctttctgtttgcctccatgaagtagcctattggtacatcttgtcaattggtgctcaaacagacttcctctccgtcttcttctccggctacacctttaagcacaagatggtgtatgaggacactctcacactctttccattttctggagaaaccgtgttcatgagcatggagaatccaggcctttggatcttgggttgccacaacagtgattttcgcaatcggggaatgactgctctcctcaaagtcagcagctgtgataagaacacaggcgactattacgaagattcttacgaggacataagtgcctacttggactccaagaataacgccattgagcccagatcattctcccagaatcctcccgtgcttaaaaggcatcagcgcgaaatcaccagaactactcttcagtctgatcaagaggagattgactatgacgacaccataagcgtggaaatgaagaaggaggatttcgatatctatgacgaagatgagaaccagtctccgcggagctttcagaagaagacgcgacactactggattgcagcagtcgaaaggctttgggactacggtatgtcatcatcccctcatgtgttgcgcaatagagctcagagtggaagtgttccacagttcaagaaagtcgtctttcaagagtttacagatggcagcttcacacagcctctctatcggggcgagcttaacgaacatttgggactccttggtccctatatccgagccgaagtggaggacaacattatggttacctttaggaatcaagcctctcgcccctacagcttctactcctccctcatcagttatgaggaggatcagagacaaggcgctgaaccacggaagaactttgtgaaaccgaatgagacgaagacctacttctggaaagtacagcaccacatggcccccacaaaagacgaattcgattgcaaagcatgggcgtatttttcagacgttgacttggagaaagatgtacattcaggacttattggtcctttgttggtgtgtcacactaacactctcaatccagcccatggcaggcaggtgacagtccaggaattcgctcttttctttaccatctttgatgagaccaagtcctggtacttcacggaaaacatggagcgcaattgcagagccccctgtaacatacagatggaggaccctacctttaaggaaaattatcggttccacgcaatcaacggatacattatggatacactccctggccttgtgatggctcaggaccaacgaatcaggtggtacctcctcagcatgggttctaatgagaacatacactccattcacttttcaggacatgtgttcactgtccggaagaaagaagagtataagatggccctctacaatttgtatccaggcgtgtttgagaccgttgaaatgcttccctctaaagctggcatctggagagtagagtgcttgatcggagaacatcttcacgcaggtatgagcaccttgttcctcgtgtacagcaacaaatgtcagaccccacttggcatggccagtggacacattcgcgactttcagatcacagcatctggccagtatggacaatgggccccaaagttggctcgcctccattactccggtagcataaatgcgtggtccactaaagaacctttcagctggattaaggtcgatcttcttgcccccatgatcatccacggcattaagacacagggagcgaggcagaaattctcctccctctacatctcacagttcattattatgtatagtttggacggcaagaagtggcaaacttatagaggtaacagtactggaacagacatggtgttcttcggcaacgttgatagctctggcatcaaacacaacatctttaatcctcccataatagctcggtacatcagattgcatccgacccactacagcattaggagtacactccgaatggagcttatgggttgcgacttgaattcctgttcaatgccactcggaatggagtctaaagccatctctgatgcacagataaccgccagtagctactttacgaacatgtttgctacgtggtcaccctctaaggcaaggcttcatttgcaaggccggtctaatgcctggagacctcaggtgaacaacccgaaagaatggctccaggtggactttcagaagaccatgaaagtaacaggtgtcactactcagggagttaagtccttggatactagcatgtatgtgaaggagttccttatttcctcatcacaagatggccaccagtggaccctcttctttcagaatggtaaggtcaaagtgtttcagggcaatcaagacagcttcacacccgtggtgaacagtcttgatcctccactcttgacacgataccttcgaatccatccacagtcttgggagcaccagattgcattgcgcatggaagtacttggatgcgaggctcaggacctctac

SEQ ID NO: 804 - protein, 1457 aa, synthetic construct
  REGION 1..1457: note = Variant of human B-domain deleted Factor VIII
MQIELSTCFFLCLLRFCFSATRRYYLGAVELSWDYMQSDLGELPVDARFPPRVPKSFPFNTSVVYKKTLFVEFTDHLFNIAKPRPPWMGLLGPTIQAEVYDTVVITLKNMASHPVSLHAVGVSYWKASEGAEYDDQTSQREKEDDKVFPGGSHTYVWQVLKENGPMASDPPCLTYSYLSHVDLVKDLNSGLIGALLVCREGSLAKEKTQTLHKFILLFAVFDEGKSWHSETKNSLMQDRDAASARAWPKMHTVNGYVNRTLPGLIGCHRKSVYWHVIGMGTTPEVHSIFLEGHTFLVRNHRQASLEISPITFLTAQTLLMDLGQFLLFCHISSHQHDGMEAYVKVDSCPEEPQLRMKNNEEAEDYDDDLTDSEMDVVRFDDDNSPSIIQIRSVAKKHPKTWVHYIAAEEEDWDYAPLVLAPDDRSYKSQYLNNGPQRIGRKYKKVRFMAYTDETFKTREAIQHESGILGPLLYGEVGDTLLIIFKNQASRPYNIYPHGITDVRPLYSRRLPKGVKHLKDFPILPGEIFKYKWTVTVEDGPTKSDPRCLTRYYSSFVNMERDLASGLIGPLLICYKESVDQRGNQIMSDKRNVILFSVFDENRSWYLTENIQRFLPNPAGVQLEDPEFQASNIMHSINGYVFDSLQLSVCLHEVAYWYILSIGAQTDFLSVFFSGYTFKHKMVYEDTLTLFPFSGETVFMSMENPGLWILGCHNSDFRNRGMTALLKVSSCDKNTGDYYEDSYEDISAYLDSKNNAIEPRSFSQNPPVLKRHQREITRTTLQSDQEEIDYDDTISVEMKKEDFDIYDEDENQSPRSFQKKTRHYWIAAVERLWDYGMSSSPHVLRNRAQSGSVPQFKKVVFQEFTDGSFTQPLYRGELNEHLGLLGPYIRAEVEDNIMVTFRNQASRPYSFYSSLISYEEDQRQGAEPRKNFVKPNETKTYFWKVQHHMAPTKDEFDCKAWAYFSDVDLEKDVHSGLIGPLLVCHTNTLNPAHGRQVTVQEFALFFTIFDETKSWYFTENMERNCRAPCNIQMEDPTFKENYRFHAINGYIMDTLPGLVMAQDQRIRWYLLSMGSNENIHSIHFSGHVFTVRKKEEYKMALYNLYPGVFETVEMLPSKAGIWRVECLIGEHLHAGMSTLFLVYSNKCQTPLGMASGHIRDFQITASGQYGQWAPKLARLHYSGSINAWSTKEPFSWIKVDLLAPMIIHGIKTQGARQKFSSLYISQFIIMYSLDGKKWQTYRGNSTGTDMVFFGNVDSSGIKHNIFNPPIIARYIRLHPTHYSIRSTLRMELMGCDLNSCSMPLGMESKAISDAQITASSYFTNMFATWSPSKARLHLQGRSNAWRPQVNNPKEWLQVDFQKTMKVTGVTTQGVKSLDTSMYVKEFLISSSQDGHQWTLFFQNGKVKVFQGNQDSFTPVVNSLDPPLLTRYLRIHPQSWEHQIALRMEVLGCEAQDLY

SEQ ID NO: 805 - DNA, 4371 bp, synthetic construct
  misc_feature 1..4371: note = Variant of human B-domain deleted Factor VIII
  source 1..4371: mol_type = other DNA
atgcagattgaactgtctacctgcttcttcctctgtttgctgaggttctgctttagcgccactagacggtactaccttggcgctgtggagctgtcctgggactatatgcagagtgatttgggagagcttcccgtcgacgcacgatttcctcctcgcgttccaaagtcatttccctttaacacaagcgtggtgtacaagaagacgctcttcgtcgaattcaccgatcacctgttcaatatcgccaaacccagaccaccatggatgggtcttttggggcctaccatacaagcggaggtgtatgacacagttgttatcactctcaagaacatggcttctcatccggtaagtcttcacgcagtgggcgtgtcctactggaaagcttcagaaggagccgagtatgatgatcagacatcccagagggagaaagaagacgacaaggtatttccaggtgggtctcatacctatgtgtggcaagtgctcaaagagaatggccctatggcaagcgatccgccgtgtttgacttacagctacctttcacacgttgacctcgtcaaggacctcaactccgggttgattggagccttgttggtatgcagggaaggatctcttgccaaagagaagacacagaccctccacaagtttatccttctctttgctgtgttcgatgagggcaaaagttggcatagcgaaacgaagaattccctcatgcaggatcgcgacgcagccagcgccagagcttggcccaagatgcacactgtgaacggatatgtcaataggacgcttcctggcttgattgggtgtcatcggaaaagtgtctactggcacgtgatcggaatggggacaacaccagaggtccactccatatttctcgaaggccataccttccttgttcgaaaccacagacaggcatccttggagatctctcccattacctttctcactgcccaaacgctccttatggacttgggtcagttccttctcttctgccatatcagctcacaccagcatgatggtatggaagcttatgtgaaagtcgacagttgtcctgaggagccacagttgcgcatgaagaataatgaagaagccgaggattacgacgacgatctcaccgattctgagatggacgtggtgaggtttgatgacgacaactctccctccatcattcaaatccggagcgtggcgaagaaacaccccaagacttgggtccactatatagcggcggaagaggaggattgggattacgctcctcttgtattggcaccagatgaccgctcatacaaaagccagtacctcaacaacggaccgcagagaattggccggaagtataagaaagtgcgatttatggcctatacagacgaaacctttaagacaagggaggccatccagcatgagagtgggattttgggacctcttctttacggcgaagttggtgataccctcctcatcatcttcaagaatcaagcttctcgcccctataacatttacccacacgggatcactgacgttaggcctttgtatagcagaagacttcccaaaggcgtgaagcatctcaaagacttccccattttgccaggcgagatctttaagtacaaatggaccgtcacagtggaagatggaccgactaaatcagaccctcgatgccttacgcggtactattcctccttcgtgaatatggagagagatttggcaagcggactcataggaccactcctcatctgttacaaggaatctgtagaccagaggggtaaccagattatgagtgataaacgcaatgtgatcctttttagcgtcttcgacgagaaccggtcctggtacttgaccgagaatatacaaaggttccttcccaaccccgcaggcgttcagttggaagaccctgagtttcaggccagcaatattatgcactcaatcaacggctatgtgtttgatagtctccagctttctgtttgcctccatgaagtagcctattggtacatcttgtcaattggtgctcaaacagacttcctctccgtcttcttctccggctacacctttaagcacaagatggtgtatgaggacactctcacactctttccattttctggagaaaccgtgttcatgagcatggagaatccaggcctttggatcttgggttgccacaacagtgattttcgcaatcggggaatgactgctctcctcaaagtcagcagctgtgataagaacacaggcgactattacgaagattcttacgaggacataagtgcctacttggactccaagaataacgccattgagcccagatcattctcccagaatcctcccgtgcttaaaaggcatcagcgcgaaatcaccagaactactcttcagtctgatcaagaggagattgactatgacgacaccataagcgtggaaatgaagaaggaggatttcgatatctatgacgaagatgagaaccagtctccgcggagctttcagaagaagacgcgacactacttcattggggcagtcgaaaggctttgggactacggtatgtcatcatcccctcatgtgttgcgcaatagagctcagagtggaagtgttccacagttcaagaaagtcgtctttcaagagtttacagatggcagcttcacacagcctctctatcggggcgagcttaacgaacatttgggactccttggtccctatatccgagccgaagtggaggacaacattatggttacctttaggaatcaagcctctcgcccctacagcttctactcctccctcatcagttatgaggaggatcagagacaaggcgctgaaccacggaagaactttgtgaaaccgaatgagacgaagacctacttctggaaagtacagcaccacatggcccccacaaaagacgaattcgattgcaaagcatgggcgtatttttcagacgttgacttggagaaagatgtacattcaggacttattggtcctttgttggtgtgtcacactaacactctcaatccagcccatggcaggcaggtgacagtccaggaattcgctcttttctttaccatctttgatgagaccaagtcctggtacttcacggaaaacatggagcgcaattgcagagccccctgtaacatacagatggaggaccctacctttaaggaaaattatcggttccacgcaatcaacggatacattatggatacactccctggccttgtgatggctcaggaccaacgaatcaggtggtacctcctcagcatgggttctaatgagaacatacactccattcacttttcaggacatgtgttcactgtccggaagaaagaagagtataagatggccctctacaatttgtatccaggcgtgtttgagaccgttgaaatgcttccctctaaagctggcatctggagagtagagtgcttgatcggagaacatcttcacgcaggtatgagcaccttgttcctcgtgtacagcaacaaatgtcagaccccacttggcatggccagtggacacattcgcgactttcagatcacagcatctggccagtatggacaatgggccccaaagttggctcgcctccattactccggtagcataaatgcgtggtccactaaagaacctttcagctggattaaggtcgatcttcttgcccccatgatcatccacggcattaagacacagggagcgaggcagaaattctcctccctctacatctcacagttcattattatgtatagtttggacggcaagaagtggcaaacttatagaggtaacagtactggaacagacatggtgttcttcggcaacgttgatagctctggcatcaaacacaacatctttaatcctcccataatagctcggtacatcagattgcatccgacccactacagcattaggagtacactccgaatggagcttatgggttgcgacttgaattcctgttcaatgccactcggaatggagtctaaagccatctctgatgcacagataaccgccagtagctactttacgaacatgtttgctacgtggtcaccctctaaggcaaggcttcatttgcaaggccggtctaatgcctggagacctcaggtgaacaacccgaaagaatggctccaggtggactttcagaagaccatgaaagtaacaggtgtcactactcagggagttaagtccttggatactagcatgtatgtgaaggagttccttatttcctcatcacaagatggccaccagtggaccctcttctttcagaatggtaaggtcaaagtgtttcagggcaatcaagacagcttcacacccgtggtgaacagtcttgatcctccactcttgacacgataccttcgaatccatccacagtcttgggagcaccagattgcattgcgcatggaagtacttggatgcgaggctcaggacctctac

SEQ ID NO: 806 - protein, 1457 aa, synthetic construct
  REGION 1..1457: note = Variant of human B-domain deleted Factor VIII
MQIELSTCFFLCLLRFCFSATRRYYLGAVELSWDYMQSDLGELPVDARFPPRVPKSFPFNTSVVYKKTLFVEFTDHLFNIAKPRPPWMGLLGPTIQAEVYDTVVITLKNMASHPVSLHAVGVSYWKASEGAEYDDQTSQREKEDDKVFPGGSHTYVWQVLKENGPMASDPPCLTYSYLSHVDLVKDLNSGLIGALLVCREGSLAKEKTQTLHKFILLFAVFDEGKSWHSETKNSLMQDRDAASARAWPKMHTVNGYVNRTLPGLIGCHRKSVYWHVIGMGTTPEVHSIFLEGHTFLVRNHRQASLEISPITFLTAQTLLMDLGQFLLFCHISSHQHDGMEAYVKVDSCPEEPQLRMKNNEEAEDYDDDLTDSEMDVVRFDDDNSPSIIQIRSVAKKHPKTWVHYIAAEEEDWDYAPLVLAPDDRSYKSQYLNNGPQRIGRKYKKVRFMAYTDETFKTREAIQHESGILGPLLYGEVGDTLLIIFKNQASRPYNIYPHGITDVRPLYSRRLPKGVKHLKDFPILPGEIFKYKWTVTVEDGPTKSDPRCLTRYYSSFVNMERDLASGLIGPLLICYKESVDQRGNQIMSDKRNVILFSVFDENRSWYLTENIQRFLPNPAGVQLEDPEFQASNIMHSINGYVFDSLQLSVCLHEVAYWYILSIGAQTDFLSVFFSGYTFKHKMVYEDTLTLFPFSGETVFMSMENPGLWILGCHNSDFRNRGMTALLKVSSCDKNTGDYYEDSYEDISAYLDSKNNAIEPRSFSQNPPVLKRHQREITRTTLQSDQEEIDYDDTISVEMKKEDFDIYDEDENQSPRSFQKKTRHYFIGAVERLWDYGMSSSPHVLRNRAQSGSVPQFKKVVFQEFTDGSFTQPLYRGELNEHLGLLGPYIRAEVEDNIMVTFRNQASRPYSFYSSLISYEEDQRQGAEPRKNFVKPNETKTYFWKVQHHMAPTKDEFDCKAWAYFSDVDLEKDVHSGLIGPLLVCHTNTLNPAHGRQVTVQEFALFFTIFDETKSWYFTENMERNCRAPCNIQMEDPTFKENYRFHAINGYIMDTLPGLVMAQDQRIRWYLLSMGSNENIHSIHFSGHVFTVRKKEEYKMALYNLYPGVFETVEMLPSKAGIWRVECLIGEHLHAGMSTLFLVYSNKCQTPLGMASGHIRDFQITASGQYGQWAPKLARLHYSGSINAWSTKEPFSWIKVDLLAPMIIHGIKTQGARQKFSSLYISQFIIMYSLDGKKWQTYRGNSTGTDMVFFGNVDSSGIKHNIFNPPIIARYIRLHPTHYSIRSTLRMELMGCDLNSCSMPLGMESKAISDAQITASSYFTNMFATWSPSKARLHLQGRSNAWRPQVNNPKEWLQVDFQKTMKVTGVTTQGVKSLDTSMYVKEFLISSSQDGHQWTLFFQNGKVKVFQGNQDSFTPVVNSLDPPLLTRYLRIHPQSWEHQIALRMEVLGCEAQDLY

SEQ ID NO: 807 - DNA, 4371 bp, synthetic construct
  misc_feature 1..4371: note = Variant of human B-domain deleted Factor VIII
  source 1..4371: mol_type = other DNA
atgcagattgaactgtctacctgcttcttcctctgtttgctgaggttctgctttagcgccactagacggtactaccttggcgctgtggagctgtcctgggactatatgcagagtgatttgggagagcttcccgtcgacgcacgatttcctcctcgcgttccaaagtcatttccctttaacacaagcgtggtgtacaagaagacgctcttcgtcgaattcaccgatcacctgttcaatatcgccaaacccagaccaccatggatgggtcttttggggcctaccatacaagcggaggtgtatgacacagttgttatcactctcaagaacatggcttctcatccggtaagtcttcacgcagtgggcgtgtcctactggaaagcttcagaaggagccgagtatgatgatcagacatcccagagggagaaagaagacgacaaggtatttccaggtgggtctcatacctatgtgtggcaagtgctcaaagagaatggccctatggcaagcgatccgccgtgtttgacttacagctacctttcacacgttgacctcgtcaaggacctcaactccgggttgattggagccttgttggtatgcagggaaggatctcttgccaaagagaagacacagaccctccacaagtttatccttctctttgctgtgttcgatgagggcaaaagttggcatagcgaaacgaagaattccctcatgcaggatcgcgacgcagccagcgccagagcttggcccaagatgcacactgtgaacggatatgtcaataggacgcttcctggcttgattgggtgtcatcggaaaagtgtctactggcacgtgatcggaatggggacaacaccagaggtccactccatatttctcgaaggccataccttccttgttcgaaaccacagacaggcatccttggagatctctcccattacctttctcactgcccaaacgctccttatggacttgggtcagttccttctcttctgccatatcagctcacaccagcatgatggtatggaagcttatgtgaaagtcgacagttgtcctgaggagccacagttgcgcatgaagaataatgaagaagccgaggattacgacgacgatctcaccgattctgagatggacgtggtgaggtttgatgacgacaactctccctccatcattcaaatccggagctgggcgaagaaacaccccaagacttgggtccactatatagcggcggaagaggaggattgggattacgctcctcttgtattggcaccagatgaccgctcatacaaaagccagtacctcaacaacggaccgcagagaattggccggaagtataagaaagtgcgatttatggcctatacagacgaaacctttaagacaagggaggccatccagcatgagagtgggattttgggacctcttctttacggcgaagttggtgataccctcctcatcatcttcaagaatcaagcttctcgcccctataacatttacccacacgggatcactgacgttaggcctttgtatagcagaagacttcccaaaggcgtgaagcatctcaaagacttccccattttgccaggcgagatctttaagtacaaatggaccgtcacagtggaagatggaccgactaaatcagaccctcgatgccttacgcggtactattcctccttcgtgaatatggagagagatttggcaagcggactcataggaccactcctcatctgttacaaggaatctgtagaccagaggggtaaccagattatgagtgataaacgcaatgtgatcctttttagcgtcttcgacgagaaccggtcctggtacttgaccgagaatatacaaaggttccttcccaaccccgcaggcgttcagttggaagaccctgagtttcaggccagcaatattatgcactcaatcaacggctatgtgtttgatagtctccagctttctgtttgcctccatgaagtagcctattggtacatcttgtcaattggtgctcaaacagacttcctctccgtcttcttctccggctacacctttaagcacaagatggtgtatgaggacactctcacactctttccattttctggagaaaccgtgttcatgagcatggagaatccaggcctttggatcttgggttgccacaacagtgattttcgcaatcggggaatgactgctctcctcaaagtcagcagctgtgataagaacacaggcgactattacgaagattcttacgaggacataagtgcctacttggactccaagaataacgccattgagcccagatcattctcccagaatcctcccgtgcttaaaaggcatcagcgcgaaatcaccagaactactcttcagtctgatcaagaggagattgactatgacgacaccataagcgtggaaatgaagaaggaggatttcgatatctatgacgaagatgagaaccagtctccgcggagctttcagaagaagacgcgacactacttcattgcagcagtcgaaaggctttgggactacggtatgtcatcatcccctcatgtgttgcgcaatagagctcagagtggaagtgttccacagttcaagaaagtcgtctttcaagagtttacagatggcagcttcacacagcctctctatcggggcgagcttaacgaacatttgggactccttggtccctatatccgagccgaagtggaggacaacattatggttacctttaggaatcaagcctctcgcccctacagcttctactcctccctcatcagttatgaggaggatcagagacaaggcgctgaaccacggaagaactttgtgaaaccgaatgagacgaagacctacttctggaaagtacagcaccacatggcccccacaaaagacgaattcgattgcaaagcatgggcgtatttttcagacgttgacttggagaaagatgtacattcaggacttattggtcctttgttggtgtgtcacactaacactctcaatccagcccatggcaggcaggtgacagtccaggaattcgctcttttctttaccatctttgatgagaccaagtcctggtacttcacggaaaacatggagcgcaattgcagagccccctgtaacatacagatggaggaccctacctttaaggaaaattatcggttccacgcaatcaacggatacattatggatacactccctggccttgtgatggctcaggaccaacgaatcaggtggtacctcctcagcatgggttctaatgagaacatacactccattcacttttcaggacatgtgttcactgtccggaagaaagaagagtataagatggccctctacaatttgtatccaggcgtgtttgagaccgttgaaatgcttccctctaaagctggcatctggagagtagagtgcttgatcggagaacatcttcacgcaggtatgagcaccttgttcctcgtgtacagcaacaaatgtcagaccccacttggcatggccagtggacacattcgcgactttcagatcacagcatctggccagtatggacaatgggccccaaagttggctcgcctccattactccggtagcataaatgcgtggtccactaaagaacctttcagctggattaaggtcgatcttcttgcccccatgatcatccacggcattaagacacagggagcgaggcagaaattctcctccctctacatctcacagttcattattatgtatagtttggacggcaagaagtggcaaacttatagaggtaacagtactggaacagacatggtgttcttcggcaacgttgatagctctggcatcaaacacaacatctttaatcctcccataatagctcggtacatcagattgcatccgacccactacagcattaggagtacactccgaatggagcttatgggttgcgacttgaattcctgttcaatgccactcggaatggagtctaaagccatctctgatgcacagataaccgccagtagctactttacgaacatgtttgctacgtggtcaccctctaaggcaaggcttcatttgcaaggccggtctaatgcctggagacctcaggtgaacaacccgaaagaatggctccaggtggactttcagaagaccatgaaagtaacaggtgtcactactcagggagttaagtccttggatactagcatgtatgtgaaggagttccttatttcctcatcacaagatggccaccagtggaccctcttctttcagaatggtaaggtcaaagtgtttcagggcaatcaagacagcttcacacccgtggtgaacagtcttgatcctccactcttgacacgataccttcgaatccatccacagtcttgggagcaccagattgcattgcgcatggaagtacttggatgcgaggctcaggacctctac

SEQ ID NO: 808 - protein, 1457 aa, synthetic construct
  REGION 1..1457: note = Variant of human B-domain deleted Factor VIII
MQIELSTCFFLCLLRFCFSATRRYYLGAVELSWDYMQSDLGELPVDARFPPRVPKSFPFNTSVVYKKTLFVEFTDHLFNIAKPRPPWMGLLGPTIQAEVYDTVVITLKNMASHPVSLHAVGVSYWKASEGAEYDDQTSQREKEDDKVFPGGSHTYVWQVLKENGPMASDPPCLTYSYLSHVDLVKDLNSGLIGALLVCREGSLAKEKTQTLHKFILLFAVFDEGKSWHSETKNSLMQDRDAASARAWPKMHTVNGYVNRTLPGLIGCHRKSVYWHVIGMGTTPEVHSIFLEGHTFLVRNHRQASLEISPITFLTAQTLLMDLGQFLLFCHISSHQHDGMEAYVKVDSCPEEPQLRMKNNEEAEDYDDDLTDSEMDVVRFDDDNSPSIIQIRSWAKKHPKTWVHYIAAEEEDWDYAPLVLAPDDRSYKSQYLNNGPQRIGRKYKKVRFMAYTDETFKTREAIQHESGILGPLLYGEVGDTLLIIFKNQASRPYNIYPHGITDVRPLYSRRLPKGVKHLKDFPILPGEIFKYKWTVTVEDGPTKSDPRCLTRYYSSFVNMERDLASGLIGPLLICYKESVDQRGNQIMSDKRNVILFSVFDENRSWYLTENIQRFLPNPAGVQLEDPEFQASNIMHSINGYVFDSLQLSVCLHEVAYWYILSIGAQTDFLSVFFSGYTFKHKMVYEDTLTLFPFSGETVFMSMENPGLWILGCHNSDFRNRGMTALLKVSSCDKNTGDYYEDSYEDISAYLDSKNNAIEPRSFSQNPPVLKRHQREITRTTLQSDQEEIDYDDTISVEMKKEDFDIYDEDENQSPRSFQKKTRHYFIAAVERLWDYGMSSSPHVLRNRAQSGSVPQFKKVVFQEFTDGSFTQPLYRGELNEHLGLLGPYIRAEVEDNIMVTFRNQASRPYSFYSSLISYEEDQRQGAEPRKNFVKPNETKTYFWKVQHHMAPTKDEFDCKAWAYFSDVDLEKDVHSGLIGPLLVCHTNTLNPAHGRQVTVQEFALFFTIFDETKSWYFTENMERNCRAPCNIQMEDPTFKENYRFHAINGYIMDTLPGLVMAQDQRIRWYLLSMGSNENIHSIHFSGHVFTVRKKEEYKMALYNLYPGVFETVEMLPSKAGIWRVECLIGEHLHAGMSTLFLVYSNKCQTPLGMASGHIRDFQITASGQYGQWAPKLARLHYSGSINAWSTKEPFSWIKVDLLAPMIIHGIKTQGARQKFSSLYISQFIIMYSLDGKKWQTYRGNSTGTDMVFFGNVDSSGIKHNIFNPPIIARYIRLHPTHYSIRSTLRMELMGCDLNSCSMPLGMESKAISDAQITASSYFTNMFATWSPSKARLHLQGRSNAWRPQVNNPKEWLQVDFQKTMKVTGVTTQGVKSLDTSMYVKEFLISSSQDGHQWTLFFQNGKVKVFQGNQDSFTPVVNSLDPPLLTRYLRIHPQSWEHQIALRMEVLGCEAQDLY

SEQ ID NO: 809 - DNA, 4371 bp, synthetic construct
  misc_feature 1..4371: note = Variant of human B-domain deleted Factor VIII
  source 1..4371: mol_type = other DNA
atgcagattgaactgtctacctgcttcttcctctgtttgctgaggttctgctttagcgccactagacggtactaccttggcgctgtggagctgtcctgggactatatgcagagtgatttgggagagcttcccgtcgacgcacgatttcctcctcgcgttccaaagtcatttccctttaacacaagcgtggtgtacaagaagacgctcttcgtcgaattcaccgatcacctgttcaatatcgccaaacccagaccaccatggatgggtcttttggggcctaccatacaagcggaggtgtatgacacagttgttatcactctcaagaacatggcttctcatccggtaagtcttcacgcagtgggcgtgtcctactggaaagcttcagaaggagccgagtatgatgatcagacatcccagagggagaaagaagacgacaaggtatttccaggtgggtctcatacctatgtgtggcaagtgctcaaagagaatggccctatggcaagcgatccgccgtgtttgacttacagctacctttcacacgttgacctcgtcaaggacctcaactccgggttgattggagccttgttggtatgcagggaaggatctcttgccaaagagaagacacagaccctccacaagtttatccttctctttgctgtgttcgatgagggcaaaagttggcatagcgaaacgaagaattccctcatgcaggatcgcgacgcagccagcgccagagcttggcccaagatgcacactgtgaacggatatgtcaataggacgcttcctggcttgattgggtgtcatcggaaaagtgtctactggcacgtgatcggaatggggacaacaccagaggtccactccatatttctcgaaggccataccttccttgttcgaaaccacagacaggcatccttggagatctctcccattacctttctcactgcccaaacgctccttatggacttgggtcagttccttctcttctgccatatcagctcacaccagcatgatggtatggaagcttatgtgaaagtcgacagttgtcctgaggagccacagttgcgcatgaagaataatgaagaagccgaggattacgacgacgatctcaccgattctgagatggacgtggtgaggtttgatgacgacaactctccctccatcattcaaatccggagcgtggcgaagaaacaccccaagacttgggtccactatatagcggcggaagaggaggattgggattacgctcctcttgtattggcaccagatgaccgctcatacaaaagccagtacctcaacaacggaccgcagagaattggccggaagtataagaaagtgcgatttatggcctatacagacgaaacctttaagacaagggaggccatccagcatgagagtgggattttgggacctcttctttacggcgaagttggtgataccctcctcatcatcttcaagaatcaagcttctcgcccctataacatttacccacacgggatcactgacgttaggcctttgtatagcagaagacttcccaaaggcgtgaagcatctcaaagacttccccattttgccaggcgagatctttaagtacaaatggaccgtcacagtggaagatggaccgactaaatcagaccctcgatgccttacgcggtactattcctccttcgtgaatatggagagagatttggcaagcggactcataggaccactcctcatctgttacaaggaatctgtagaccagaggggtaaccagattatgagtgataaacgcaatgtgatcctttttagcgtcttcgacgagaaccggtcctggtacttgaccgagaatatacaaaggttccttcccaaccccgcaggcgttcagttggaagaccctgagtttcaggccagcaatattatgcactcaatcaacggctatgtgtttgatagtctccagctttctgtttgcctccatgaagtagcctattggtacatcttgtcaattggtgctcaaacagacttcctctccgtcttcttctccggctacacctttaagcacaagatggtgtatgaggacactctcacactctttccattttctggagaaaccgtgttcatgagcatggagaatccaggcctttggatcttgggttgccacaacagtgattttcgcaatcggggaatgactgctctcctcaaagtcagcagctgtgataagaacacaggcgactattacgaagattcttacgaggacataagtgcctacttggactccaagaataacgccattgagcccagatcattctcccagaatcctcccgtgcttaaaaggcatcagcgcgaaatcaccagaactactcttcagtctgatcaagaggagattgactatgacgacaccataagcgtggaaatgaagaaggaggatttcgatatctatgacgaagatgagaaccagtctccgcggagctttcagaagaagacgcgacactacttcctggcagcagtcgaaaggctttgggactacggtatgtcatcatcccctcatgtgttgcgcaatagagctcagagtggaagtgttccacagttcaagaaagtcgtctttcaagagtttacagatggcagcttcacacagcctctctatcggggcgagcttaacgaacatttgggactccttggtccctatatccgagccgaagtggaggacaacattatggttacctttaggaatcaagcctctcgcccctacagcttctactcctccctcatcagttatgaggaggatcagagacaaggcgctgaaccacggaagaactttgtgaaaccgaatgagacgaagacctacttctggaaagtacagcaccacatggcccccacaaaagacgaattcgattgcaaagcatgggcgtatttttcagacgttgacttggagaaagatgtacattcaggacttattggtcctttgttggtgtgtcacactaacactctcaatccagcccatggcaggcaggtgacagtccaggaattcgctcttttctttaccatctttgatgagaccaagtcctggtacttcacggaaaacatggagcgcaattgcagagccccctgtaacatacagatggaggaccctacctttaaggaaaattatcggttccacgcaatcaacggatacattatggatacactccctggccttgtgatggctcaggaccaacgaatcaggtggtacctcctcagcatgggttctaatgagaacatacactccattcacttttcaggacatgtgttcactgtccggaagaaagaagagtataagatggccctctacaatttgtatccaggcgtgtttgagaccgttgaaatgcttccctctaaagctggcatctggagagtagagtgcttgatcggagaacatcttcacgcaggtatgagcaccttgttcctcgtgtacagcaacaaatgtcagaccccacttggcatggccagtggacacattcgcgactttcagatcacagcatctggccagtatggacaatgggccccaaagttggctcgcctccattactccggtagcataaatgcgtggtccactaaagaacctttcagctggattaaggtcgatcttcttgcccccatgatcatccacggcattaagacacagggagcgaggcagaaattctcctccctctacatctcacagttcattattatgtatagtttggacggcaagaagtggcaaacttatagaggtaacagtactggaacagacatggtgttcttcggcaacgttgatagctctggcatcaaacacaacatctttaatcctcccataatagctcggtacatcagattgcatccgacccactacagcattaggagtacactccgaatggagcttatgggttgcgacttgaattcctgttcaatgccactcggaatggagtctaaagccatctctgatgcacagataaccgccagtagctactttacgaacatgtttgctacgtggtcaccctctaaggcaaggcttcatttgcaaggccggtctaatgcctggagacctcaggtgaacaacccgaaagaatggctccaggtggactttcagaagaccatgaaagtaacaggtgtcactactcagggagttaagtccttggatactagcatgtatgtgaaggagttccttatttcctcatcacaagatggccaccagtggaccctcttctttcagaatggtaaggtcaaagtgtttcagggcaatcaagacagcttcacacccgtggtgaacagtcttgatcctccactcttgacacgataccttcgaatccatccacagtcttgggagcaccagattgcattgcgcatggaagtacttggatgcgaggctcaggacctctac

SEQ ID NO: 810 - protein, 1457 aa, synthetic construct
  REGION 1..1457: note = Variant of human B-domain deleted Factor VIII
MQIELSTCFFLCLLRFCFSATRRYYLGAVELSWDYMQSDLGELPVDARFPPRVPKSFPFNTSVVYKKTLFVEFTDHLFNIAKPRPPWMGLLGPTIQAEVYDTVVITLKNMASHPVSLHAVGVSYWKASEGAEYDDQTSQREKEDDKVFPGGSHTYVWQVLKENGPMASDPPCLTYSYLSHVDLVKDLNSGLIGALLVCREGSLAKEKTQTLHKFILLFAVFDEGKSWHSETKNSLMQDRDAASARAWPKMHTVNGYVNRTLPGLIGCHRKSVYWHVIGMGTTPEVHSIFLEGHTFLVRNHRQASLEISPITFLTAQTLLMDLGQFLLFCHISSHQHDGMEAYVKVDSCPEEPQLRMKNNEEAEDYDDDLTDSEMDVVRFDDDNSPSIIQIRSVAKKHPKTWVHYIAAEEEDWDYAPLVLAPDDRSYKSQYLNNGPQRIGRKYKKVRFMAYTDETFKTREAIQHESGILGPLLYGEVGDTLLIIFKNQASRPYNIYPHGITDVRPLYSRRLPKGVKHLKDFPILPGEIFKYKWTVTVEDGPTKSDPRCLTRYYSSFVNMERDLASGLIGPLLICYKESVDQRGNQIMSDKRNVILFSVFDENRSWYLTENIQRFLPNPAGVQLEDPEFQASNIMHSINGYVFDSLQLSVCLHEVAYWYILSIGAQTDFLSVFFSGYTFKHKMVYEDTLTLFPFSGETVFMSMENPGLWILGCHNSDFRNRGMTALLKVSSCDKNTGDYYEDSYEDISAYLDSKNNAIEPRSFSQNPPVLKRHQREITRTTLQSDQEEIDYDDTISVEMKKEDFDIYDEDENQSPRSFQKKTRHYFLAAVERLWDYGMSSSPHVLRNRAQSGSVPQFKKVVFQEFTDGSFTQPLYRGELNEHLGLLGPYIRAEVEDNIMVTFRNQASRPYSFYSSLISYEEDQRQGAEPRKNFVKPNETKTYFWKVQHHMAPTKDEFDCKAWAYFSDVDLEKDVHSGLIGPLLVCHTNTLNPAHGRQVTVQEFALFFTIFDETKSWYFTENMERNCRAPCNIQMEDPTFKENYRFHAINGYIMDTLPGLVMAQDQRIRWYLLSMGSNENIHSIHFSGHVFTVRKKEEYKMALYNLYPGVFETVEMLPSKAGIWRVECLIGEHLHAGMSTLFLVYSNKCQTPLGMASGHIRDFQITASGQYGQWAPKLARLHYSGSINAWSTKEPFSWIKVDLLAPMIIHGIKTQGARQKFSSLYISQFIIMYSLDGKKWQTYRGNSTGTDMVFFGNVDSSGIKHNIFNPPIIARYIRLHPTHYSIRSTLRMELMGCDLNSCSMPLGMESKAISDAQITASSYFTNMFATWSPSKARLHLQGRSNAWRPQVNNPKEWLQVDFQKTMKVTGVTTQGVKSLDTSMYVKEFLISSSQDGHQWTLFFQNGKVKVFQGNQDSFTPVVNSLDPPLLTRYLRIHPQSWEHQIALRMEVLGCEAQDLY

SEQ ID NO: 811 - DNA, 4371 bp, synthetic construct
  misc_feature 1..4371: note = Variant of human B-domain deleted Factor VIII
  source 1..4371: mol_type = other DNA
atgcagattgaactgtctacctgcttcttcctctgtttgctgaggttctgctttagcgccactagacggtactaccttggcgctgtggagctgtcctgggactatatgcagagtgatttgggagagcttcccgtcgacgcacgatttcctcctcgcgttccaaagtcatttccctttaacacaagcgtggtgtacaagaagacgctcttcgtcgaattcaccgatcacctgttcaatatcgccaaacccagaccaccatggatgggtcttttggggcctaccatacaagcggaggtgtatgacacagttgttatcactctcaagaacatggcttctcatccggtaagtcttcacgcagtgggcgtgtcctactggaaagcttcagaaggagccgagtatgatgatcagacatcccagagggagaaagaagacgacaaggtatttccaggtgggtctcatacctatgtgtggcaagtgctcaaagagaatggccctatggcaagcgatccgccgtgtttgacttacagctacctttcacacgttgacctcgtcaaggacctcaactccgggttgattggagccttgttggtatgcagggaaggatctcttgccaaagagaagacacagaccctccacaagtttatccttctctttgctgtgttcgatgagggcaaaagttggcatagcgaaacgaagaattccctcatgcaggatcgcgacgcagccagcgccagagcttggcccaagatgcacactgtgaacggatatgtcaataggacgcttcctggcttgattgggtgtcatcggaaaagtgtctactggcacgtgatcggaatggggacaacaccagaggtccactccatatttctcgaaggccataccttccttgttcgaaaccacagacaggcatccttggagatctctcccattacctttctcactgcccaaacgctccttatggacttgggtcagttccttctcttctgccatatcagctcacaccagcatgatggtatggaagcttatgtgaaagtcgacagttgtcctgaggagccacagttgcgcatgaagaataatgaagaagccgaggattacgacgacgatctcaccgattctgagatggacgtggtgaggtttgatgacgacaactctccctccatcattcaaatccggagcgtggcgaagaaacaccccaagacttgggtccactatatagcggcggaagaggaggattgggattacgctcctcttgtattggcaccagatgaccgctcatacaaaagccagtacctcaacaacggaccgcagagaattggccggaagtataagaaagtgcgatttatggcctatacagacgaaacctttaagacaagggaggccatccagcatgagagtgggattttgggacctcttctttacggcgaagttggtgataccctcctcatcatcttcaagaatcaagcttctcgcccctataacatttacccacacgggatcactgacgttaggcctttgtatagcagaagacttcccaaaggcgtgaagcatctcaaagacttccccattttgccaggcgagatctttaagtacaaatggaccgtcacagtggaagatggaccgactaaatcagaccctcgatgccttacgcggtactattcctccttcgtgaatatggagagagatttggcaagcggactcataggaccactcctcatctgttacaaggaatctgtagaccagaggggtaaccagattatgagtgataaacgcaatgtgatcctttttagcgtcttcgacgagaaccggtcctggtacttgaccgagaatatacaaaggttccttcccaaccccgcaggcgttcagttggaagaccctgagtttcaggccagcaatattatgcactcaatcaacggctatgtgtttgatagtctccagctttctgtttgcctccatgaagtagcctattggtacatcttgtcaattggtgctcaaacagacttcctctccgtcttcttctccggctacacctttaagcacaagatggtgtatgaggacactctcacactctttccattttctggagaaaccgtgttcatgagcatggagaatccaggcctttggatcttgggttgccacaacagtgattttcgcaatcggggaatgactgctctcctcaaagtcagcagctgtgataagaacacaggcgactattacgaagattcttacgaggacataagtgcctacttggactccaagaataacgccattgagcccagatcattctcccagaatcctcccgtgcttaaaaggcatcagcgcgaaatcaccagaactactcttcagtctgatcaagaggagattgactatgacgacaccataagcgtggaaatgaagaaggaggatttcgatatctatgacgaagatgagaaccagtctccgcggagctttcagaagaagacgcgacactacttcattgcagcagtcgaaaggctttgggactacggtatgtcatcatcccctcatgtgttgcgcaatagagctcagagtggaagtgttccacagttcaagaaagtcgtctttcaagagtttacagatggcagcttcacacagcctctctatcggggcgagcttaacgaacatttgggactccttggtccctatatccgagccgaagtggaggacaacattagggttacctttaggaatcaagcctctcgcccctacagcttctactcctccctcatcagttatgaggaggatcagagacaaggcgctgaaccacggaagaactttgtgaaaccgaatgagacgaagacctacttctggaaagtacagcaccacatggcccccacaaaagacgaattcgattgcaaagcatgggcgtatttttcagacgttgacttggagaaagatgtacattcaggacttattggtcctttgttggtgtgtcacactaacactctcaatccagcccatggcaggcaggtgacagtccaggaattcgctcttttctttaccatctttgatgagaccaagtcctggtacttcacggaaaacatggagcgcaattgcagagccccctgtaacatacagatggaggaccctacctttaaggaaaattatcggttccacgcaatcaacggatacattatggatacactccctggccttgtgatggctcaggaccaacgaatcaggtggtacctcctcagcatgggttctaatgagaacatacactccattcacttttcaggacatgtgttcactgtccggaagaaagaagagtataagatggccctctacaatttgtatccaggcgtgtttgagaccgttgaaatgcttccctctaaagctggcatctggagagtagagtgcttgatcggagaacatcttcacgcaggtatgagcaccttgttcctcgtgtacagcaacaaatgtcagaccccacttggcatggccagtggacacattcgcgactttcagatcacagcatctggccagtatggacaatgggccccaaagttggctcgcctccattactccggtagcataaatgcgtggtccactaaagaacctttcagctggattaaggtcgatcttcttgcccccatgatcatccacggcattaagacacagggagcgaggcagaaattctcctccctctacatctcacagttcattattatgtatagtttggacggcaagaagtggcaaacttatagaggtaacagtactggaacagacatggtgttcttcggcaacgttgatagctctggcatcaaacacaacatctttaatcctcccataatagctcggtacatcagattgcatccgacccactacagcattaggagtacactccgaatggagcttatgggttgcgacttgaattcctgttcaatgccactcggaatggagtctaaagccatctctgatgcacagataaccgccagtagctactttacgaacatgtttgctacgtggtcaccctctaaggcaaggcttcatttgcaaggccggtctaatgcctggagacctcaggtgaacaacccgaaagaatggctccaggtggactttcagaagaccatgaaagtaacaggtgtcactactcagggagttaagtccttggatactagcatgtatgtgaaggagttccttatttcctcatcacaagatggccaccagtggaccctcttctttcagaatggtaaggtcaaagtgtttcagggcaatcaagacagcttcacacccgtggtgaacagtcttgatcctccactcttgacacgataccttcgaatccatccacagtcttgggagcaccagattgcattgcgcatggaagtacttggatgcgaggctcaggacctctac

SEQ ID NO: 812 - protein, 1457 aa, synthetic construct
  REGION 1..1457: note = Variant of human B-domain deleted Factor VIII
MQIELSTCFFLCLLRFCFSATRRYYLGAVELSWDYMQSDLGELPVDARFPPRVPKSFPFNTSVVYKKTLFVEFTDHLFNIAKPRPPWMGLLGPTIQAEVYDTVVITLKNMASHPVSLHAVGVSYWKASEGAEYDDQTSQREKEDDKVFPGGSHTYVWQVLKENGPMASDPPCLTYSYLSHVDLVKDLNSGLIGALLVCREGSLAKEKTQTLHKFILLFAVFDEGKSWHSETKNSLMQDRDAASARAWPKMHTVNGYVNRTLPGLIGCHRKSVYWHVIGMGTTPEVHSIFLEGHTFLVRNHRQASLEISPITFLTAQTLLMDLGQFLLFCHISSHQHDGMEAYVKVDSCPEEPQLRMKNNEEAEDYDDDLTDSEMDVVRFDDDNSPSIIQIRSVAKKHPKTWVHYIAAEEEDWDYAPLVLAPDDRSYKSQYLNNGPQRIGRKYKKVRFMAYTDETFKTREAIQHESGILGPLLYGEVGDTLLIIFKNQASRPYNIYPHGITDVRPLYSRRLPKGVKHLKDFPILPGEIFKYKWTVTVEDGPTKSDPRCLTRYYSSFVNMERDLASGLIGPLLICYKESVDQRGNQIMSDKRNVILFSVFDENRSWYLTENIQRFLPNPAGVQLEDPEFQASNIMHSINGYVFDSLQLSVCLHEVAYWYILSIGAQTDFLSVFFSGYTFKHKMVYEDTLTLFPFSGETVFMSMENPGLWILGCHNSDFRNRGMTALLKVSSCDKNTGDYYEDSYEDISAYLDSKNNAIEPRSFSQNPPVLKRHQREITRTTLQSDQEEIDYDDTISVEMKKEDFDIYDEDENQSPRSFQKKTRHYFIAAVERLWDYGMSSSPHVLRNRAQSGSVPQFKKVVFQEFTDGSFTQPLYRGELNEHLGLLGPYIRAEVEDNIRVTFRNQASRPYSFYSSLISYEEDQRQGAEPRKNFVKPNETKTYFWKVQHHMAPTKDEFDCKAWAYFSDVDLEKDVHSGLIGPLLVCHTNTLNPAHGRQVTVQEFALFFTIFDETKSWYFTENMERNCRAPCNIQMEDPTFKENYRFHAINGYIMDTLPGLVMAQDQRIRWYLLSMGSNENIHSIHFSGHVFTVRKKEEYKMALYNLYPGVFETVEMLPSKAGIWRVECLIGEHLHAGMSTLFLVYSNKCQTPLGMASGHIRDFQITASGQYGQWAPKLARLHYSGSINAWSTKEPFSWIKVDLLAPMIIHGIKTQGARQKFSSLYISQFIIMYSLDGKKWQTYRGNSTGTDMVFFGNVDSSGIKHNIFNPPIIARYIRLHPTHYSIRSTLRMELMGCDLNSCSMPLGMESKAISDAQITASSYFTNMFATWSPSKARLHLQGRSNAWRPQVNNPKEWLQVDFQKTMKVTGVTTQGVKSLDTSMYVKEFLISSSQDGHQWTLFFQNGKVKVFQGNQDSFTPVVNSLDPPLLTRYLRIHPQSWEHQIALRMEVLGCEAQDLY

SEQ ID NO: 813 - DNA, 4371 bp, synthetic construct
  misc_feature 1..4371: note = Variant of human B-domain deleted Factor VIII
  source 1..4371: mol_type = other DNA
atgcagattgaactgtctacctgcttcttcctctgtttgctgaggttctgctttagcgccactagacggtactaccttggcgctgtggagctgtcctgggactatatgcagagtgatttgggagagcttcccgtcgacgcacgatttcctcctcgcgttccaaagtcatttccctttaacacaagcgtggtgtacaagaagacgctcttcgtcgaattcaccgatcacctgttcaatatcgccaaacccagaccaccatggatgggtcttttggggcctaccatacaagcggaggtgtatgacacagttgttatcactctcaagaacatggcttctcatccggtaagtcttcacgcagtgggcgtgtcctactggaaagcttcagaaggagccgagtatgatgatcagacatcccagagggagaaagaagacgacaaggtatttccaggtgggtctcatacctatgtgtggcaagtgctcaaagagaatggccctatggcaagcgatccgccgtgtttgacttacagctacctttcacacgttgacctcgtcaaggacctcaactccgggttgattggagccttgttggtatgcagggaaggatctcttgccaaagagaagacacagaccctccacaagtttatccttctctttgctgtgttcgatgagggcaaaagttggcatagcgaaacgaagaattccctcatgcaggatcgcgacgcagccagcgccagagcttggcccaagatgcacactgtgaacggatatgtcaataggacgcttcctggcttgattgggtgtcatcggaaaagtgtctactggcacgtgatcggaatggggacaacaccagaggtccactccatatttctcgaaggccataccttccttgttcgaaaccacagacaggcatccttggagatctctcccattacctttctcactgcccaaacgctccttatggacttgggtcagttccttctcttctgccatatcagctcacaccagcatgatggtatggaagcttatgtgaaagtcgacagttgtcctgaggagccacagttgcgcatgaagaataatgaagaagccgaggattacgacgacgatctcaccgattctgagatggacgtggtgaggtttgatgacgacaactctccctccatcattcaaatccggagcgtggcgaagaaacaccccaagacttgggtccactatatagcggcggaagaggaggattgggattacgctcctcttgtattggcaccagatgaccgctcatacaaaagccagtacctcaacaacggaccgcagagaattggccggaagtataagaaagtgcgatttatggcctatacagacgaaacctttaagacaagggaggccatccagcatgagagtgggattttgggacctcttctttacggcgaagttggtgataccctcctcatcatcttcaagaatcaagcttctcgcccctataacatttacccacacgggatcactgacgttaggcctttgtatagcagaagacttcccaaaggcgtgaagcatctcaaagacttccccattttgccaggcgagatctttaagtacaaatggaccgtcacagtggaagatggaccgactaaatcagaccctcgatgccttacgcggtactattcctccttcgtgaatatggagagagatttggcaagcggactcataggaccactcctcatctgttacaaggaatctgtagaccagaggggtaaccagattatgagtgataaacgcaatgtgatcctttttagcgtcttcgacgagaaccggtcctggtacttgaccgagaatatacaaaggttccttcccaaccccgcaggcgttcagttggaagaccctgagtttcaggccagcaatattatgcactcaatcaacggctatgtgtttgatagtctccagctttctgtttgcctccatgaagtagcctattggtacatcttgtcaattggtgctcaaacagacttcctctccgtcttcttctccggctacacctttaagcacaagatggtgtatgaggacactctcacactctttccattttctggagaaaccgtgttcatgagcatggagaatccaggcctttggatcttgggttgccacaacagtgattttcgcaatcggggaatgactgctctcctcaaagtcagcagctgtgataagaacacaggcgactattacgaagattcttacgaggacataagtgcctacttggactccaagaataacgccattgagcccagatcattctcccagaatcctcccgtgcttaaaaggcatcagcgcgaaatcaccagaactactcttcagtctgatcaagaggagattgactatgacgacaccataagcgtggaaatgaagaaggaggatttcgatatctatgacgaagatgagaaccagtctccgcggagcgtgcagaagaagacgcgacactacttcattgcagcagtcgaaaggctttgggactacggtatgtcatcatcccctcatgtgttgcgcaatagagctcagagtggaagtgttccacagttcaagaaagtcgtctttcaagagtttacagatggcagcttcacacagcctctctatcggggcgagcttaacgaacatttgggactccttggtccctatatccgagccgaagtggaggacaacattatggttacctttaggaatcaagcctctcgcccctacagcttctactcctccctcatcagttatgaggaggatcagagacaaggcgctgaaccacggaagaactttgtgaaaccgaatgagacgaagacctacttctggaaagtacagcaccacatggcccccacaaaagacgaattcgattgcaaagcatgggcgtatttttcagacgttgacttggagaaagatgtacattcaggacttattggtcctttgttggtgtgtcacactaacactctcaatccagcccatggcaggcaggtgacagtccaggaattcgctcttttctttaccatctttgatgagaccaagtcctggtacttcacggaaaacatggagcgcaattgcagagccccctgtaacatacagatggaggaccctacctttaaggaaaattatcggttccacgcaatcaacggatacattatggatacactccctggccttgtgatggctcaggaccaacgaatcaggtggtacctcctcagcatgggttctaatgagaacatacactccattcacttttcaggacatgtgttcactgtccggaagaaagaagagtataagatggccctctacaatttgtatccaggcgtgtttgagaccgttgaaatgcttccctctaaagctggcatctggagagtagagtgcttgatcggagaacatcttcacgcaggtatgagcaccttgttcctcgtgtacagcaacaaatgtcagaccccacttggcatggccagtggacacattcgcgactttcagatcacagcatctggccagtatggacaatgggccccaaagttggctcgcctccattactccggtagcataaatgcgtggtccactaaagaacctttcagctggattaaggtcgatcttcttgcccccatgatcatccacggcattaagacacagggagcgaggcagaaattctcctccctctacatctcacagttcattattatgtatagtttggacggcaagaagtggcaaacttatagaggtaacagtactggaacagacatggtgttcttcggcaacgttgatagctctggcatcaaacacaacatctttaatcctcccataatagctcggtacatcagattgcatccgacccactacagcattaggagtacactccgaatggagcttatgggttgcgacttgaattcctgttcaatgccactcggaatggagtctaaagccatctctgatgcacagataaccgccagtagctactttacgaacatgtttgctacgtggtcaccctctaaggcaaggcttcatttgcaaggccggtctaatgcctggagacctcaggtgaacaacccgaaagaatggctccaggtggactttcagaagaccatgaaagtaacaggtgtcactactcagggagttaagtccttggatactagcatgtatgtgaaggagttccttatttcctcatcacaagatggccaccagtggaccctcttctttcagaatggtaaggtcaaagtgtttcagggcaatcaagacagcttcacacccgtggtgaacagtcttgatcctccactcttgacacgataccttcgaatccatccacagtcttgggagcaccagattgcattgcgcatggaagtacttggatgcgaggctcaggacctctac

SEQ ID NO: 814 - protein, 1457 aa, synthetic construct
  REGION 1..1457: note = Variant of human B-domain deleted Factor VIII
MQIELSTCFFLCLLRFCFSATRRYYLGAVELSWDYMQSDLGELPVDARFPPRVPKSFPFNTSVVYKKTLFVEFTDHLFNIAKPRPPWMGLLGPTIQAEVYDTVVITLKNMASHPVSLHAVGVSYWKASEGAEYDDQTSQREKEDDKVFPGGSHTYVWQVLKENGPMASDPPCLTYSYLSHVDLVKDLNSGLIGALLVCREGSLAKEKTQTLHKFILLFAVFDEGKSWHSETKNSLMQDRDAASARAWPKMHTVNGYVNRTLPGLIGCHRKSVYWHVIGMGTTPEVHSIFLEGHTFLVRNHRQASLEISPITFLTAQTLLMDLGQFLLFCHISSHQHDGMEAYVKVDSCPEEPQLRMKNNEEAEDYDDDLTDSEMDVVRFDDDNSPSIIQIRSVAKKHPKTWVHYIAAEEEDWDYAPLVLAPDDRSYKSQYLNNGPQRIGRKYKKVRFMAYTDETFKTREAIQHESGILGPLLYGEVGDTLLIIFKNQASRPYNIYPHGITDVRPLYSRRLPKGVKHLKDFPILPGEIFKYKWTVTVEDGPTKSDPRCLTRYYSSFVNMERDLASGLIGPLLICYKESVDQRGNQIMSDKRNVILFSVFDENRSWYLTENIQRFLPNPAGVQLEDPEFQASNIMHSINGYVFDSLQLSVCLHEVAYWYILSIGAQTDFLSVFFSGYTFKHKMVYEDTLTLFPFSGETVFMSMENPGLWILGCHNSDFRNRGMTALLKVSSCDKNTGDYYEDSYEDISAYLDSKNNAIEPRSFSQNPPVLKRHQREITRTTLQSDQEEIDYDDTISVEMKKEDFDIYDEDENQSPRSVQKKTRHYFIAAVERLWDYGMSSSPHVLRNRAQSGSVPQFKKVVFQEFTDGSFTQPLYRGELNEHLGLLGPYIRAEVEDNIMVTFRNQASRPYSFYSSLISYEEDQRQGAEPRKNFVKPNETKTYFWKVQHHMAPTKDEFDCKAWAYFSDVDLEKDVHSGLIGPLLVCHTNTLNPAHGRQVTVQEFALFFTIFDETKSWYFTENMERNCRAPCNIQMEDPTFKENYRFHAINGYIMDTLPGLVMAQDQRIRWYLLSMGSNENIHSIHFSGHVFTVRKKEEYKMALYNLYPGVFETVEMLPSKAGIWRVECLIGEHLHAGMSTLFLVYSNKCQTPLGMASGHIRDFQITASGQYGQWAPKLARLHYSGSINAWSTKEPFSWIKVDLLAPMIIHGIKTQGARQKFSSLYISQFIIMYSLDGKKWQTYRGNSTGTDMVFFGNVDSSGIKHNIFNPPIIARYIRLHPTHYSIRSTLRMELMGCDLNSCSMPLGMESKAISDAQITASSYFTNMFATWSPSKARLHLQGRSNAWRPQVNNPKEWLQVDFQKTMKVTGVTTQGVKSLDTSMYVKEFLISSSQDGHQWTLFFQNGKVKVFQGNQDSFTPVVNSLDPPLLTRYLRIHPQSWEHQIALRMEVLGCEAQDLY

SEQ ID NO: 815 - DNA, 4371 bp, synthetic construct
  misc_feature 1..4371: note = Variant of human B-domain deleted Factor VIII
  source 1..4371: mol_type = other DNA
atgcagattgaactgtctacctgcttcttcctctgtttgctgaggttctgctttagcgccactagacggtactaccttggcgctgtggagctgtcctgggactatatgcagagtgatttgggagagcttcccgtcgacgcacgatttcctcctcgcgttccaaagtcatttccctttaacacaagcgtggtgtacaagaagacgctcttcgtcgaattcaccgatcacctgttcaatatcgccaaacccagaccaccatggatgggtcttttggggcctaccatacaagcggaggtgtatgacacagttgttatcactctcaagaacatggcttctcatccggtaagtcttcacgcagtgggcgtgtcctactggaaagcttcagaaggagccgagtatgatgatcagacatcccagagggagaaagaagacgacaaggtatttccaggtgggtctcatacctatgtgtggcaagtgctcaaagagaatggccctatggcaagcgatccgccgtgtttgacttacagctacctttcacacgttgacctcgtcaaggacctcaactccgggttgattggagccttgttggtatgcagggaaggatctcttgccaaagagaagacacagaccctccacaagtttatccttctctttgctgtgttcgatgagggcaaaagttggcatagcgaaacgaagaattccctcatgcaggatcgcgacgcagccagcgccagagcttggcccaagatgcacactgtgaacggatatgtcaataggacgcttcctggcttgattgggtgtcatcggaaaagtgtctactggcacgtgatcggaatggggacaacaccagaggtccactccatatttctcgaaggccataccttccttgttcgaaaccacagacaggcatccttggagatctctcccattacctttctcactgcccaaacgctccttatggacttgggtcagttccttctcttctgccatatcagctcacaccagcatgatggtatggaagcttatgtgaaagtcgacagttgtcctgaggagccacagttgcgcatgaagaataatgaagaagccgaggattacgacgacgatctcaccgattctgagatggacgtggtgaggtttgatgacgacaactctccctccatcattcaaatccggagcgtggcgaagaaacaccccaagacttgggtccactatatagcggcggaagaggaggattgggattacgctcctcttgtattggcaccagatgaccgctcatacaaaagccagtacctcaacaacggaccgcagagaattggccggaagtataagaaagtgcgatttatggcctatacagacgaaacctttaagacaagggaggccatccagcatgagagtgggattttgggacctcttctttacggcgaagttggtgataccctcctcatcatcttcaagaatcaagcttctcgcccctataacatttacccacacgggatcactgacgttaggcctttgtatagcagaagacttcccaaaggcgtgaagcatctcaaagacttccccattttgccaggcgagatctttaagtacaaatggaccgtcacagtggaagatggaccgactaaatcagaccctcgatgccttacgcggtactattcctccttcgtgaatatggagagagatttggcaagcggactcataggaccactcctcatctgttacaaggaatctgtagaccagaggggtaaccagattatgagtgataaacgcaatgtgatcctttttagcgtcttcgacgagaaccggtcctggtacttgaccgagaatatacaaaggttccttcccaaccccgcaggcgttcagttggaagaccctgagtttcaggccagcaatattatgcactcaatcaacggctatgtgtttgatagtctccagctttctgtttgcctccatgaagtagcctattggtacatcttgtcaattggtgctcaaacagacttcctctccgtcttcttctccggctacacctttaagcacaagatggtgtatgaggacactctcacactctttccattttctggagaaaccgtgtggatgagcatggagaatccaggcctttggatcttgggttgccacaacagtgattttcgcaatcggggaatgactgctctcctcaaagtcagcagctgtgataagaacacaggcgactattacgaagattcttacgaggacataagtgcctacttggactccaagaataacgccattgagcccagatcattctcccagaatcctcccgtgcttaaaaggcatcagcgcgaaatcaccagaactactcttcagtctgatcaagaggagattgactatgacgacaccataagcgtggaaatgaagaaggaggatttcgatatctatgacgaagatgagaaccagtctccgcggagctttcagaagaagacgcgacactacttcattgcagcagtcgaaaggctttgggactacggtatgtcatcatcccctcatgtgttgcgcaatagagctcagagtggaagtgttccacagttcaagaaagtcgtctttcaagagtttacagatggcagcttcacacagcctctctatcggggcgagcttaacgaacatttgggactccttggtccctatatccgagccgaagtggaggacaacattatggttacctttaggaatcaagcctctcgcccctacagcttctactcctccctcatcagttatgaggaggatcagagacaaggcgctgaaccacggaagaactttgtgaaaccgaatgagacgaagacctacttctggaaagtacagcaccacatggcccccacaaaagacgaattcgattgcaaagcatgggcgtatttttcagacgttgacttggagaaagatgtacattcaggacttattggtcctttgttggtgtgtcacactaacactctcaatccagcccatggcaggcaggtgacagtccaggaattcgctcttttctttaccatctttgatgagaccaagtcctggtacttcacggaaaacatggagcgcaattgcagagccccctgtaacatacagatggaggaccctacctttaaggaaaattatcggttccacgcaatcaacggatacattatggatacactccctggccttgtgatggctcaggaccaacgaatcaggtggtacctcctcagcatgggttctaatgagaacatacactccattcacttttcaggacatgtgttcactgtccggaagaaagaagagtataagatggccctctacaatttgtatccaggcgtgtttgagaccgttgaaatgcttccctctaaagctggcatctggagagtagagtgcttgatcggagaacatcttcacgcaggtatgagcaccttgttcctcgtgtacagcaacaaatgtcagaccccacttggcatggccagtggacacattcgcgactttcagatcacagcatctggccagtatggacaatgggccccaaagttggctcgcctccattactccggtagcataaatgcgtggtccactaaagaacctttcagctggattaaggtcgatcttcttgcccccatgatcatccacggcattaagacacagggagcgaggcagaaattctcctccctctacatctcacagttcattattatgtatagtttggacggcaagaagtggcaaacttatagaggtaacagtactggaacagacatggtgttcttcggcaacgttgatagctctggcatcaaacacaacatctttaatcctcccataatagctcggtacatcagattgcatccgacccactacagcattaggagtacactccgaatggagcttatgggttgcgacttgaattcctgttcaatgccactcggaatggagtctaaagccatctctgatgcacagataaccgccagtagctactttacgaacatgtttgctacgtggtcaccctctaaggcaaggcttcatttgcaaggccggtctaatgcctggagacctcaggtgaacaacccgaaagaatggctccaggtggactttcagaagaccatgaaagtaacaggtgtcactactcagggagttaagtccttggatactagcatgtatgtgaaggagttccttatttcctcatcacaagatggccaccagtggaccctcttctttcagaatggtaaggtcaaagtgtttcagggcaatcaagacagcttcacacccgtggtgaacagtcttgatcctccactcttgacacgataccttcgaatccatccacagtcttgggagcaccagattgcattgcgcatggaagtacttggatgcgaggctcaggacctctac

SEQ ID NO: 816 - protein, 1457 aa, synthetic construct
  REGION 1..1457: note = Variant of human B-domain deleted Factor VIII
MQIELSTCFFLCLLRFCFSATRRYYLGAVELSWDYMQSDLGELPVDARFPPRVPKSFPFNTSVVYKKTLFVEFTDHLFNIAKPRPPWMGLLGPTIQAEVYDTVVITLKNMASHPVSLHAVGVSYWKASEGAEYDDQTSQREKEDDKVFPGGSHTYVWQVLKENGPMASDPPCLTYSYLSHVDLVKDLNSGLIGALLVCREGSLAKEKTQTLHKFILLFAVFDEGKSWHSETKNSLMQDRDAASARAWPKMHTVNGYVNRTLPGLIGCHRKSVYWHVIGMGTTPEVHSIFLEGHTFLVRNHRQASLEISPITFLTAQTLLMDLGQFLLFCHISSHQHDGMEAYVKVDSCPEEPQLRMKNNEEAEDYDDDLTDSEMDVVRFDDDNSPSIIQIRSVAKKHPKTWVHYIAAEEEDWDYAPLVLAPDDRSYKSQYLNNGPQRIGRKYKKVRFMAYTDETFKTREAIQHESGILGPLLYGEVGDTLLIIFKNQASRPYNIYPHGITDVRPLYSRRLPKGVKHLKDFPILPGEIFKYKWTVTVEDGPTKSDPRCLTRYYSSFVNMERDLASGLIGPLLICYKESVDQRGNQIMSDKRNVILFSVFDENRSWYLTENIQRFLPNPAGVQLEDPEFQASNIMHSINGYVFDSLQLSVCLHEVAYWYILSIGAQTDFLSVFFSGYTFKHKMVYEDTLTLFPFSGETVWMSMENPGLWILGCHNSDFRNRGMTALLKVSSCDKNTGDYYEDSYEDISAYLDSKNNAIEPRSFSQNPPVLKRHQREITRTTLQSDQEEIDYDDTISVEMKKEDFDIYDEDENQSPRSFQKKTRHYFIAAVERLWDYGMSSSPHVLRNRAQSGSVPQFKKVVFQEFTDGSFTQPLYRGELNEHLGLLGPYIRAEVEDNIMVTFRNQASRPYSFYSSLISYEEDQRQGAEPRKNFVKPNETKTYFWKVQHHMAPTKDEFDCKAWAYFSDVDLEKDVHSGLIGPLLVCHTNTLNPAHGRQVTVQEFALFFTIFDETKSWYFTENMERNCRAPCNIQMEDPTFKENYRFHAINGYIMDTLPGLVMAQDQRIRWYLLSMGSNENIHSIHFSGHVFTVRKKEEYKMALYNLYPGVFETVEMLPSKAGIWRVECLIGEHLHAGMSTLFLVYSNKCQTPLGMASGHIRDFQITASGQYGQWAPKLARLHYSGSINAWSTKEPFSWIKVDLLAPMIIHGIKTQGARQKFSSLYISQFIIMYSLDGKKWQTYRGNSTGTDMVFFGNVDSSGIKHNIFNPPIIARYIRLHPTHYSIRSTLRMELMGCDLNSCSMPLGMESKAISDAQITASSYFTNMFATWSPSKARLHLQGRSNAWRPQVNNPKEWLQVDFQKTMKVTGVTTQGVKSLDTSMYVKEFLISSSQDGHQWTLFFQNGKVKVFQGNQDSFTPVVNSLDPPLLTRYLRIHPQSWEHQIALRMEVLGCEAQDLY

SEQ ID NO: 817 - DNA, 4371 bp, synthetic construct
  misc_feature 1..4371: note = Variant of human B-domain deleted Factor VIII
  source 1..4371: mol_type = other DNA
atgcagattgaactgtctacctgcttcttcctctgtttgctgaggttctgctttagcgccactagacggtactaccttggcgctgtggagctgtcctgggactatatgcagagtgatttgggagagcttcccgtcgacgcacgatttcctcctcgcgttccaaagtcatttccctttaacacaagcgtggtgtacaagaagacgctcttcgtcgaattcaccgatcacctgttcaatatcgccaaacccagaccaccatggatgggtcttttggggcctaccatacaagcggaggtgtatgacacagttgttatcactctcaagaacatggcttctcatccggtaagtcttcacgcagtgggcgtgtcctactggaaagcttcagaaggagccgagtatgatgatcagacatcccagagggagaaagaagacgacaaggtatttccaggtgggtctcatacctatgtgtggcaagtgctcaaagagaatggccctatggcaagcgatccgccgtgtttgacttacagctacctttcacacgttgacctcgtcaaggacctcaactccgggttgattggagccttgttggtatgcagggaaggatctcttgccaaagagaagacacagaccctccacaagtttatccttctctttgctgtgttcgatgagggcaaaagttggcatagcgaaacgaagaattccctcatgcaggatcgcgacgcagccagcgccagagcttggcccaagatgcacactgtgaacggatatgtcaataggacgcttcctggcttgattgggtgtcatcggaaaagtgtctactggcacgtgatcggaatggggacaacaccagaggtccactccatatttctcgaaggccataccttccttgttcgaaaccacagacaggcatccttggagatctctcccattacctttctcactgcccaaacgctccttatggacttgggtcagttccttctcttctgccatatcagctcacaccagcatgatggtatggaagcttatgtgaaagtcgacagttgtcctgaggagccacagttgcgcatgaagaataatgaagaagccgaggattacgacgacgatctcaccgattctgagatggacgtggtgaggtttgatgacgacaactctccctccatcattcaaatccggagccaggcgaagaaacaccccaagacttgggtccactatatagcggcggaagaggaggattgggattacgctcctcttgtattggcaccagatgaccgctcatacaaaagccagtacctcaacaacggaccgcagagaattggccggaagtataagaaagtgcgatttatggcctatacagacgaaacctttaagacaagggaggccatccagcatgagagtgggattttgggacctcttctttacggcgaagttggtgataccctcctcatcatcttcaagaatcaagcttctcgcccctataacatttacccacacgggatcactgacgttaggcctttgtatagcagaagacttcccaaaggcgtgaagcatctcaaagacttccccattttgccaggcgagatctttaagtacaaatggaccgtcacagtggaagatggaccgactaaatcagaccctcgatgccttacgcggtactattcctccttcgtgaatatggagagagatttggcaagcggactcataggaccactcctcatctgttacaaggaatctgtagaccagaggggtaaccagattatgagtgataaacgcaatgtgatcctttttagcgtcttcgacgagaaccggtcctggtacttgaccgagaatatacaaaggttccttcccaaccccgcaggcgttcagttggaagaccctgagtttcaggccagcaatattatgcactcaatcaacggctatgtgtttgatagtctccagctttctgtttgcctccatgaagtagcctattggtacatcttgtcaattggtgctcaaacagacttcctctccgtcttcttctccggctacacctttaagcacaagatggtgtatgaggacactctcacactctttccattttctggagaaaccgtgttcatgagcatggagaatccaggcctttggatcttgggttgccacaacagtgattttcgcaatcggggaatgactgctctcctcaaagtcagcagctgtgataagaacacaggcgactattacgaagattcttacgaggacataagtgcctacttggactccaagaataacgccattgagcccagatcattctcccagaatcctcccgtgcttaaaaggcatcagcgcgaaatcaccagaactactcttcagtctgatcaagaggagattgactatgacgacaccataagcgtggaaatgaagaaggaggatttcgatatctatgacgaagatgagaaccagtctccgcggagctttcagaagaagacgcgacactacttcattgcagcagtcgaaaggctttgggactacggtatgtcatcatcccctcatgtgttgcgcaatagagctcagagtggaagtgttccacagttcaagaaagtcgtctttcaagagtttacagatggcagcttcacacagcctctctatcggggcgagcttaacgaacatttgggactccttggtccctatatccgagccgaagtggaggacaacattatggttacctttaggaatcaagcctctcgcccctacagcttctactcctccctcatcagttatgaggaggatcagagacaaggcgctgaaccacggaagaactttgtgaaaccgaatgagacgaagacctacttctggaaagtacagcaccacatggcccccacaaaagacgaattcgattgcaaagcatgggcgtatttttcagacgttgacttggagaaagatgtacattcaggacttattggtcctttgttggtgtgtcacactaacactctcaatccagcccatggcaggcaggtgacagtccaggaattcgctcttttctttaccatctttgatgagaccaagtcctggtacttcacggaaaacatggagcgcaattgcagagccccctgtaacatacagatggaggaccctacctttaaggaaaattatcggttccacgcaatcaacggatacattatggatacactccctggccttgtgatggctcaggaccaacgaatcaggtggtacctcctcagcatgggttctaatgagaacatacactccattcacttttcaggacatgtgttcactgtccggaagaaagaagagtataagatggccctctacaatttgtatccaggcgtgtttgagaccgttgaaatgcttccctctaaagctggcatctggagagtagagtgcttgatcggagaacatcttcacgcaggtatgagcaccttgttcctcgtgtacagcaacaaatgtcagaccccacttggcatggccagtggacacattcgcgactttcagatcacagcatctggccagtatggacaatgggccccaaagttggctcgcctccattactccggtagcataaatgcgtggtccactaaagaacctttcagctggattaaggtcgatcttcttgcccccatgatcatccacggcattaagacacagggagcgaggcagaaattctcctccctctacatctcacagttcattattatgtatagtttggacggcaagaagtggcaaacttatagaggtaacagtactggaacagacatggtgttcttcggcaacgttgatagctctggcatcaaacacaacatctttaatcctcccataatagctcggtacatcagattgcatccgacccactacagcattaggagtacactccgaatggagcttatgggttgcgacttgaattcctgttcaatgccactcggaatggagtctaaagccatctctgatgcacagataaccgccagtagctactttacgaacatgtttgctacgtggtcaccctctaaggcaaggcttcatttgcaaggccggtctaatgcctggagacctcaggtgaacaacccgaaagaatggctccaggtggactttcagaagaccatgaaagtaacaggtgtcactactcagggagttaagtccttggatactagcatgtatgtgaaggagttccttatttcctcatcacaagatggccaccagtggaccctcttctttcagaatggtaaggtcaaagtgtttcagggcaatcaagacagcttcacacccgtggtgaacagtcttgatcctccactcttgacacgataccttcgaatccatccacagtcttgggagcaccagattgcattgcgcatggaagtacttggatgcgaggctcaggacctctac

SEQ ID NO: 818 - protein, 1457 aa, synthetic construct
  REGION 1..1457: note = Variant of human B-domain deleted Factor VIII
MQIELSTCFFLCLLRFCFSATRRYYLGAVELSWDYMQSDLGELPVDARFPPRVPKSFPFNTSVVYKKTLFVEFTDHLFNIAKPRPPWMGLLGPTIQAEVYDTVVITLKNMASHPVSLHAVGVSYWKASEGAEYDDQTSQREKEDDKVFPGGSHTYVWQVLKENGPMASDPPCLTYSYLSHVDLVKDLNSGLIGALLVCREGSLAKEKTQTLHKFILLFAVFDEGKSWHSETKNSLMQDRDAASARAWPKMHTVNGYVNRTLPGLIGCHRKSVYWHVIGMGTTPEVHSIFLEGHTFLVRNHRQASLEISPITFLTAQTLLMDLGQFLLFCHISSHQHDGMEAYVKVDSCPEEPQLRMKNNEEAEDYDDDLTDSEMDVVRFDDDNSPSIIQIRSQAKKHPKTWVHYIAAEEEDWDYAPLVLAPDDRSYKSQYLNNGPQRIGRKYKKVRFMAYTDETFKTREAIQHESGILGPLLYGEVGDTLLIIFKNQASRPYNIYPHGITDVRPLYSRRLPKGVKHLKDFPILPGEIFKYKWTVTVEDGPTKSDPRCLTRYYSSFVNMERDLASGLIGPLLICYKESVDQRGNQIMSDKRNVILFSVFDENRSWYLTENIQRFLPNPAGVQLEDPEFQASNIMHSINGYVFDSLQLSVCLHEVAYWYILSIGAQTDFLSVFFSGYTFKHKMVYEDTLTLFPFSGETVFMSMENPGLWILGCHNSDFRNRGMTALLKVSSCDKNTGDYYEDSYEDISAYLDSKNNAIEPRSFSQNPPVLKRHQREITRTTLQSDQEEIDYDDTISVEMKKEDFDIYDEDENQSPRSFQKKTRHYFIAAVERLWDYGMSSSPHVLRNRAQSGSVPQFKKVVFQEFTDGSFTQPLYRGELNEHLGLLGPYIRAEVEDNIMVTFRNQASRPYSFYSSLISYEEDQRQGAEPRKNFVKPNETKTYFWKVQHHMAPTKDEFDCKAWAYFSDVDLEKDVHSGLIGPLLVCHTNTLNPAHGRQVTVQEFALFFTIFDETKSWYFTENMERNCRAPCNIQMEDPTFKENYRFHAINGYIMDTLPGLVMAQDQRIRWYLLSMGSNENIHSIHFSGHVFTVRKKEEYKMALYNLYPGVFETVEMLPSKAGIWRVECLIGEHLHAGMSTLFLVYSNKCQTPLGMASGHIRDFQITASGQYGQWAPKLARLHYSGSINAWSTKEPFSWIKVDLLAPMIIHGIKTQGARQKFSSLYISQFIIMYSLDGKKWQTYRGNSTGTDMVFFGNVDSSGIKHNIFNPPIIARYIRLHPTHYSIRSTLRMELMGCDLNSCSMPLGMESKAISDAQITASSYFTNMFATWSPSKARLHLQGRSNAWRPQVNNPKEWLQVDFQKTMKVTGVTTQGVKSLDTSMYVKEFLISSSQDGHQWTLFFQNGKVKVFQGNQDSFTPVVNSLDPPLLTRYLRIHPQSWEHQIALRMEVLGCEAQDLY

SEQ ID NO: 819 - DNA, 4371 bp, synthetic construct
  misc_feature 1..4371: note = Variant of human B-domain deleted Factor VIII
  source 1..4371: mol_type = other DNA
atgcagattgaactgtctacctgcttcttcctctgtttgctgaggttctgctttagcgccactagacggtactaccttggcgctgtggagctgtcctgggactatatgcagagtgatttgggagagcttcccgtcgacgcacgatttcctcctcgcgttccaaagtcatttccctttaacacaagcgtggtgtacaagaagacgctcttcgtcgaattcaccgatcacctgttcaatatcgccaaacccagaccaccatggatgggtcttttggggcctaccatacaagcggaggtgtatgacacagttgttatcactctcaagaacatggcttctcatccggtaagtcttcacgcagtgggcgtgtcctactggaaagcttcagaaggagccgagtatgatgatcagacatcccagagggagaaagaagacgacaaggtatttccaggtgggtctcatacctatgtgtggcaagtgctcaaagagaatggccctatggcaagcgatccgccgtgtttgacttacagctacctttcacacgttgacctcgtcaaggacctcaactccgggttgattggagccttgttggtatgcagggaaggatctcttgccaaagagaagacacagaccctccacaagtttatccttctctttgctgtgttcgatgagggcaaaagttggcatagcgaaacgaagaattccctcatgcaggatcgcgacgcagccagcgccagagcttggcccaagatgcacactgtgaacggatatgtcaataggacgcttcctggcttgattgggtgtcatcggaaaagtgtctactggcacgtgatcggaatggggacaacaccagaggtccactccatatttctcgaaggccataccttccttgttcgaaaccacagacaggcatccttggagatctctcccattacctttctcactgcccaaacgctccttatggacttgggtcagttccttctcttttgccatatcccgtcacaccagcatgatggtatggaagcttatgtgaaagtcgacagttgtcctgaggagccacagttgcgcatgaagaataatgaagaagccgaggattacgacgacgatctcaccgattctgagatggacgtggtgaggtttgatgacgacaactctccctcccgcattcaagctcggagcgtggcgaagaaacaccccaagacttgggtccactatatagcggcggaagaggaggattgggattacgctcctcttgtattggcaccagatgaccgctcatacaaaagccagtacctcaacaacggaccgcagagaattggccggaagtataagaaagtgcgatttatggcctatacagacgaaacctttaagacaagggaggccatccagcatgagagtgggattttgggacctcttctttacggcgaagttggtgataccctcctcatcatcttcaagaatcaagcttctcgcccctataacatttacccacacgggatcactgacgttaggcctttgtatagcagaagacttcccaaaggcgtgaagcatctcaaagacttccccattttgccaggcgagatctttaagtacaaatggaccgtcacagtggaagatggaccgactaaatcagaccctcgatgccttacgcggtactattcctccttcgtgaatatggagagagatttggcaagcggactcataggaccactcctcatctgttacaaggaatctgtagaccagaggggtaaccagattatgagtgataaacgcaatgtgatcctttttagcgtcttcgacgagaaccggtcctggtacttgaccgagaatatacaaaggttccttcccaaccccgcaggcgttcagttggaagaccctgagtttcaggccagcaatattatgcactcaatcaacggctatgtgtttgatagtctccagctttctgtttgcctccatgaagtagcctattggtacatcttgtcaattggtgctcaaacagacttcctctccgtcttcttctccggctacacctttaagcacaagatggtgtatgaggacactctcacactctttccattttctggagaaaccgtgttcatgagcatggagaatccaggcctttggatcttgggttgccacaacagtgattttcgcaatcggggaatgactgctctcctcaaagtcagcagctgtgataagaacacaggcgactattacgaagattcttacgaggacataagtgcctacctggactccaagaataacgccattgagcccagatcattctcccagaatcctcccgtgcttaaaaggcatcagcgcgaaatcaccagaactactcttcagtctgatcaagaggagattgactatgacgacaccataagcgtggaaatgaagaaggaggatttcgatatctatgacgaagatgagaaccagtctccgcggagctttcagaagaagacgcgacactacttcattgcagcagtcgaaaggctttgggactacggtatgtcatcatcccctcatgtgttgcgcaatagagctcagagtggaagtgttccacagttcaagaaagtcgtctttcaagagtttacagatggcagcttcacacagcctctctatcggggcgagcttaacgaacatttgggactccttggtccctatatccgagccgaagtggaggacaacattatggttacctttaggaatcaagcctctcgcccctacagcttctactcctccctcatcagttatgaggaggatcagagacaaggcgctgaaccacggaagaactttgtgaaaccgaatgagacgaagacctacttctggaaagtacagcaccacatggcccccacaaaagacgaattcgattgcaaagcatgggcgtatttttcagacgttgacttggagaaagatgtacattcaggacttattggtcctttgttggtgtgtcacactaacactctcaatccagcccatggcaggcaggtgacagtccaggaattcgctcttttctttaccatctttgatgagaccaagtcctggtacttcacggaaaacatggagcgcaattgcagagccccctgtaacatacagatggaggaccctacctttaaggaaaattatcggttccacgcaatcaacggatacattatggatacactccctggccttgtgatggctcaggaccaacgaatcaggtggtacctcctcagcatgggttctaatgagaacatacactccattcacttttcaggacatgtgttcactgtccggaagaaagaagagtataagatggccctctacaatttgtatccaggcgtgtttgagaccgttgaaatgcttccctctaaagctggcatctggagagtagagtgcttgatcggagaacatcttcacgcaggtatgagcaccttgttcctcgtgtacagcaacaaatgtcagaacccacttggcatggccagtggacacattcgcgactttcagatcacagcatctggccagtatggacaatgggccccaaagttggctcgcctccattactccggtagcataaatgcgtggtccactaaagaacctttcagctggattaaggtcgatcttcttgcccccatgatcatccacggcattaagacacagggagcgaggcagaaattctcctccctgtacatctcacagttcattattatgtatagtttggacggcaagaagtggcaaacttatagaggtaacagtactggaacagacatggtgttcttcggcaacgttgatagctctggcatcaaacacaacatctttaatcctcccataatagctcggtacatcagattgcatccgacccactacagcattaggagtacactccgaatggagcttatgggttgcgacttgaattcctgttcaatgccactcggaatggagtctaaagccatctctgatgcacagataaccgccagtagctactttacgaacatgtttgctacgtggtcaccctctaaggcaaggcttcatttgcaaggccggtctaatgcctggagacctcaggtgaacaacccgaaagaatggctccaggtggactttcagaagaccatgaaagtaacaggtgtcactactcagggagttaagtccttggatactagcatgtatgtgaaggagttccttatttcctcatcacaagatggccaccagtggaccctcttctttcagaatggtaaggtcaaagtgtttcagggcaatcaagacagcttcacacccgtggtgaacagtcttgatcctccactcttgacacgataccttcgaatccatccacagtcttgggagcaccagattgcattgcgcatggaagtacttggatgcgaggctcaggacctctac

SEQ ID NO: 820 - protein, 1457 aa, synthetic construct
  REGION 1..1457: note = Variant of human B-domain deleted Factor VIII
MQIELSTCFFLCLLRFCFSATRRYYLGAVELSWDYMQSDLGELPVDARFPPRVPKSFPFNTSVVYKKTLFVEFTDHLFNIAKPRPPWMGLLGPTIQAEVYDTVVITLKNMASHPVSLHAVGVSYWKASEGAEYDDQTSQREKEDDKVFPGGSHTYVWQVLKENGPMASDPPCLTYSYLSHVDLVKDLNSGLIGALLVCREGSLAKEKTQTLHKFILLFAVFDEGKSWHSETKNSLMQDRDAASARAWPKMHTVNGYVNRTLPGLIGCHRKSVYWHVIGMGTTPEVHSIFLEGHTFLVRNHRQASLEISPITFLTAQTLLMDLGQFLLFCHIPSHQHDGMEAYVKVDSCPEEPQLRMKNNEEAEDYDDDLTDSEMDVVRFDDDNSPSRIQARSVAKKHPKTWVHYIAAEEEDWDYAPLVLAPDDRSYKSQYLNNGPQRIGRKYKKVRFMAYTDETFKTREAIQHESGILGPLLYGEVGDTLLIIFKNQASRPYNIYPHGITDVRPLYSRRLPKGVKHLKDFPILPGEIFKYKWTVTVEDGPTKSDPRCLTRYYSSFVNMERDLASGLIGPLLICYKESVDQRGNQIMSDKRNVILFSVFDENRSWYLTENIQRFLPNPAGVQLEDPEFQASNIMHSINGYVFDSLQLSVCLHEVAYWYILSIGAQTDFLSVFFSGYTFKHKMVYEDTLTLFPFSGETVFMSMENPGLWILGCHNSDFRNRGMTALLKVSSCDKNTGDYYEDSYEDISAYLDSKNNAIEPRSFSQNPPVLKRHQREITRTTLQSDQEEIDYDDTISVEMKKEDFDIYDEDENQSPRSFQKKTRHYFIAAVERLWDYGMSSSPHVLRNRAQSGSVPQFKKVVFQEFTDGSFTQPLYRGELNEHLGLLGPYIRAEVEDNIMVTFRNQASRPYSFYSSLISYEEDQRQGAEPRKNFVKPNETKTYFWKVQHHMAPTKDEFDCKAWAYFSDVDLEKDVHSGLIGPLLVCHTNTLNPAHGRQVTVQEFALFFTIFDETKSWYFTENMERNCRAPCNIQMEDPTFKENYRFHAINGYIMDTLPGLVMAQDQRIRWYLLSMGSNENIHSIHFSGHVFTVRKKEEYKMALYNLYPGVFETVEMLPSKAGIWRVECLIGEHLHAGMSTLFLVYSNKCQNPLGMASGHIRDFQITASGQYGQWAPKLARLHYSGSINAWSTKEPFSWIKVDLLAPMIIHGIKTQGARQKFSSLYISQFIIMYSLDGKKWQTYRGNSTGTDMVFFGNVDSSGIKHNIFNPPIIARYIRLHPTHYSIRSTLRMELMGCDLNSCSMPLGMESKAISDAQITASSYFTNMFATWSPSKARLHLQGRSNAWRPQVNNPKEWLQVDFQKTMKVTGVTTQGVKSLDTSMYVKEFLISSSQDGHQWTLFFQNGKVKVFQGNQDSFTPVVNSLDPPLLTRYLRIHPQSWEHQIALRMEVLGCEAQDLY

SEQ ID NO: 821 - DNA, 4371 bp, synthetic construct
  misc_feature 1..4371: note = Variant of human B-domain deleted Factor VIII
  source 1..4371: mol_type = other DNA
atgcagattgaactgtctacctgcttcttcctctgtttgctgaggttctgctttagcgccactagacggtactaccttggcgctgtggagctgtcctgggactatatgcagagtgatttgggagagcttcccgtcgacgcacgatttcctcctcgcgttccaaagtcatttccctttaacacaagcgtggtgtacaagaagacgctcttcgtcgaattcaccgatcacctgttcaatatcgccaaacccagaccaccatggatgggtcttttggggcctaccatacaagcggaggtgtatgacacagttgttatcactctcaagaacatggcttctcatccggtaagtcttcacgcagtgggcgtgtcctactggaaagcttcagaaggagccgagtatgatgatcagacatcccagagggagaaagaagacgacaaggtatttccaggtgggtctcatacctatgtgtggcaagtgctcaaagagaatggccctatggcaagcgatccgccgtgtttgacttacagctacctttcacacgttgacctcgtcaaggacctcaactccgggttgattggagccttgttggtatgcagggaaggatctcttgccaaagagaagacacagaccctccacaagtttatccttctctttgctgtgttcgatgagggcaaaagttggcatagcgaaacgaagaattccctcatgcaggatcgcgacgcagccagcgccagagcttggcccaagatgcacactgtgaacggatatgtcaataggacgcttcctggcttgattgggtgtcatcggaaaagtgtctactggcacgtgatcggaatggggacaacaccagaggtccactccatatttctcgaaggccataccttccttgttcgaaaccacagacaggcatccttggagatctctcccattacctttctcactgcccaaacgctccttatggacttgggtcagttccttctcagttgccatatctcgtcacaccagcatgatggtatggaagcttatgtgaaagtcgacagttgtcctgaggagccacagttgcgcatgaagaataatgaagaagccgaggattacgacgacgatctcaccgattctgagatggacgtggtgaggtttgatgacgacaactctccctcccgcattcaaattcggagcgtggcgaagaaacaccccaagacttgggtccactatatagcggcggaagaggaggattgggattacgctcctcttgtattggcaccagatgaccgctcatacaaaagccagtacctcaacaacggaccgcagagaattggccggaagtataagaaagtgcgatttatggcctatacagacgaaacctttaagacaagggaggccatccagcatgagagtgggattttgggacctcttctttacggcgaagttggtgataccctcctcatcatcttcaagaatcaagcttctcgcccctataacatttacccacacgggatcactgacgttaggcctttgtatagcagaagacttcccaaaggcgtgaagcatctcaaagacttccccattttgccaggcgagatctttaagtacaaatggaccgtcacagtggaagatggaccgactaaatcagaccctcgatgccttacgcggtactattcctccttcgtgaatatggagagagatttggcaagcggactcataggaccactcctcatctgttacaaggaatctgtagaccagaggggtaaccagattatgagtgataaacgcaatgtgatcctttttagcgtcttcgacgagaaccggtcctggtacttgaccgagaatatacaaaggttccttcccaaccccgcaggcgttcagttggaagaccctgagtttcaggccagcaatattatgcactcaatcaacggctatgtgtttgatagtctccagctttctgtttgcctccatgaagtagcctattggtacatcttgtcaattggtgctcaaacagacttcctctccgtcttcttctccggctacacctttaagcacaagatggtgtatgaggacactctcacactctttccattttctggagaaaccgtgttcatgagcatggagaatccaggcctttggatcttgggttgccacaacagtgattttcgcaatcggggaatgactgctctcctcaaagtcagcagctgtgataagaacacaggcgactattacgaagattcttacgaggacataagtgcctactttgactccaagaataacgccattgagcccagatcattctcccagaatcctcccgtgcttaaaaggcatcagcgcgaaatcaccagaactactcttcagtctgatcaagaggagattgactatgacgacaccataagcgtggaaatgaagaaggaggatttcgatatctatgacgaagatgagaaccagtctccgcggagctttcagaagaagacgcgacactacttcattgcagcagtcgaaaggctttgggactacggtatgtcatcatcccctcatgtgttgcgcaatagagctcagagtggaagtgttccacagttcaagaaagtcgtctttcaagagtttacagatggcagcttcacacagcctctctatcggggcgagcttaacgaacatttgggactccttggtccctatatccgagccgaagtggaggacaacattatggttacctttaggaatcaagcctctcgcccctacagcttctactcctccctcatcagttatgaggaggatcagagacaaggcgctgaaccacggaagaactttgtgaaaccgaatgagacgaagacctacttctggaaagtacagcaccacatggcccccacaaaagacgaattcgattgcaaagcatgggcgtatttttcagacgttgacttggagaaagatgtacattcaggacttattggtcctttgttggtgtgtcacactaacactctcaatccagcccatggcaggcaggtgacagtccaggaattcgctcttttctttaccatctttgatgagaccaagtcctggtacttcacggaaaacatggagcgcaattgcagagccccctgtaacatacagatggaggaccctacctttaaggaaaattatcggttccacgcaatcaacggatacattatggatacactccctggccttgtgatggctcaggaccaacgaatcaggtggtacctcctcagcatgggttctaatgagaacatacactccattcacttttcaggacatgtgttcactgtccggaagaaagaagagtataagatggccctctacaatttgtatccaggcgtgtttgagaccgttgaaatgcttccctctaaagctggcatctggagagtagagtgcttgatcggagaacatcttcacgcaggtatgagcaccttgttcctcgtgtacagcaacaaatgtcagaccccacttggcatggccagtggacacattcgcgactttcagatcacagcatctggccagtatggacaatgggccccaaagttggctcgcctccattactccggtagcataaatgcgtggtccactaaagaacctttcagctggattaaggtcgatcttcttgcccccatgatcatccacggcattaagacacagggagcgaggcagaaattctcctccctctacatctcacagttcattattatgtatagtttggacggcaagaagtggcaaacttatagaggtaacagtactggaacagacatggtgttcttcggcaacgttgatagctctggcatcaaacacaacatctttaatcctcccataatagctcggtacatcagattgcatccgacccactacagcattaggagtacactccgaatggagcttatgggttgcgacttgaattcctgttcaatgccactcggaatggagtctaaagccatctctgatgcacagataaccgccagtagctactttacgaacatgtttgctacgtggtcaccctctaaggcaaggcttcatttgcaaggccggtctaatgcctggagacctcaggtgaacaacccgaaagaatggctccaggtggactttcagaagaccatgaaagtaacaggtgtcactactcagggagttaagtccttggatactagcatgtatgtgaaggagttccttatttcctcatcacaagatggccaccagtggaccctcttctttcagaatggtaaggtcaaagtgtttcagggcaatcaagacagcttcacacccgtggtgaacagtcttgatcctccactcttgacacgataccttcgaatccatccacagtcttgggagcaccagattgcattgcgcatggaagtacttggatgcgaggctcaggacctctac

SEQ ID NO: 822 - protein, 1457 aa, synthetic construct
  REGION 1..1457: note = Variant of human B-domain deleted Factor VIII
MQIELSTCFFLCLLRFCFSATRRYYLGAVELSWDYMQSDLGELPVDARFPPRVPKSFPFNTSVVYKKTLFVEFTDHLFNIAKPRPPWMGLLGPTIQAEVYDTVVITLKNMASHPVSLHAVGVSYWKASEGAEYDDQTSQREKEDDKVFPGGSHTYVWQVLKENGPMASDPPCLTYSYLSHVDLVKDLNSGLIGALLVCREGSLAKEKTQTLHKFILLFAVFDEGKSWHSETKNSLMQDRDAASARAWPKMHTVNGYVNRTLPGLIGCHRKSVYWHVIGMGTTPEVHSIFLEGHTFLVRNHRQASLEISPITFLTAQTLLMDLGQFLLSCHISSHQHDGMEAYVKVDSCPEEPQLRMKNNEEAEDYDDDLTDSEMDVVRFDDDNSPSRIQIRSVAKKHPKTWVHYIAAEEEDWDYAPLVLAPDDRSYKSQYLNNGPQRIGRKYKKVRFMAYTDETFKTREAIQHESGILGPLLYGEVGDTLLIIFKNQASRPYNIYPHGITDVRPLYSRRLPKGVKHLKDFPILPGEIFKYKWTVTVEDGPTKSDPRCLTRYYSSFVNMERDLASGLIGPLLICYKESVDQRGNQIMSDKRNVILFSVFDENRSWYLTENIQRFLPNPAGVQLEDPEFQASNIMHSINGYVFDSLQLSVCLHEVAYWYILSIGAQTDFLSVFFSGYTFKHKMVYEDTLTLFPFSGETVFMSMENPGLWILGCHNSDFRNRGMTALLKVSSCDKNTGDYYEDSYEDISAYFDSKNNAIEPRSFSQNPPVLKRHQREITRTTLQSDQEEIDYDDTISVEMKKEDFDIYDEDENQSPRSFQKKTRHYFIAAVERLWDYGMSSSPHVLRNRAQSGSVPQFKKVVFQEFTDGSFTQPLYRGELNEHLGLLGPYIRAEVEDNIMVTFRNQASRPYSFYSSLISYEEDQRQGAEPRKNFVKPNETKTYFWKVQHHMAPTKDEFDCKAWAYFSDVDLEKDVHSGLIGPLLVCHTNTLNPAHGRQVTVQEFALFFTIFDETKSWYFTENMERNCRAPCNIQMEDPTFKENYRFHAINGYIMDTLPGLVMAQDQRIRWYLLSMGSNENIHSIHFSGHVFTVRKKEEYKMALYNLYPGVFETVEMLPSKAGIWRVECLIGEHLHAGMSTLFLVYSNKCQTPLGMASGHIRDFQITASGQYGQWAPKLARLHYSGSINAWSTKEPFSWIKVDLLAPMIIHGIKTQGARQKFSSLYISQFIIMYSLDGKKWQTYRGNSTGTDMVFFGNVDSSGIKHNIFNPPIIARYIRLHPTHYSIRSTLRMELMGCDLNSCSMPLGMESKAISDAQITASSYFTNMFATWSPSKARLHLQGRSNAWRPQVNNPKEWLQVDFQKTMKVTGVTTQGVKSLDTSMYVKEFLISSSQDGHQWTLFFQNGKVKVFQGNQDSFTPVVNSLDPPLLTRYLRIHPQSWEHQIALRMEVLGCEAQDLY

SEQ ID NO: 823 - DNA, 4371 bp, synthetic construct
  misc_feature 1..4371: note = Variant of human B-domain deleted Factor VIII
  source 1..4371: mol_type = other DNA
atgcagattgaactgtctacctgcttcttcctctgtttgctgaggttctgctttagcgccactagacggtactaccttggcgctgtggagctgtcctgggactatatgcagagtgatttgggagagcttcccgtcgacgcacgatttcctcctcgcgttccaaagtcatttccctttaacacaagcgtagtgtacaagaagacgctcttcgtcgaattcaccgatcacctgttcaatatcgccaaacccagaccaccatggatgggtcttttggggcctaccatacaagcggaggtgtatgacacagttgttatcactctcaagaacatggcttctcatccggtaagtcttcacgcagtgggcgtgtcctactggaaagcttcagaaggagccgagtatgatgatcagacatcccagagggagaaagaagacgacaaggtatttccaggtgggtctcatacctatgtgtggcaagtgctcaaagagaatggccctatggcaagcgatccgccgtgtttgacttacagctacctttcacacgttgacctcgtcaaggacctcaactccgggttgattggagccttgttggtatgcagggaaggatctcttgccaaagagaagacacagaccctccacaagtttatccttctctttgctgtgttcgatgagggcaaaagttggcatagcgaaacgaagaattccctcatgcaggatcgcgacgcagccagcgccagagcttggcccaagatgcacactgtgaacggatatgtcaataggacgcttcctggcttgattgggtgtcatcggaaaagtgtctactggcacgtgatcggaatggggacaacaccagaggtccactccatatttctcgaaggccataccttccttgttcgaaaccacagacaggcatccttggagatctctcccattacctttctcactgcccaaacgctccttatggacttgggtcagttccttctcttttgccatatctcgtcacaccagcatgatggtatggaagcttatgtgaaagtcgacagttgtcctgaggagccacagttgcgcatgaagaataatgaagaagccgaggattacgacgacgatctcaccgattctgagatggacgtggtgaggtttgatgacgacaactctccctccatcattcaaatccggagcgtggcgaagaaacaccccaagacttgggtccactatatagcggcggaagaggaggattgggattacgctcctcttgtattggcaccagatgaccgctcatacaaaagccagtacctcaacaacggaccgcagagaattggccggaagtataagaaagtgcgatttatggcctatacagacgaaacctttaagacaagggaggccatccagcatgagagtgggattttgggacctcttctttacggcgaagttggtgataccctcctcatcatcttcaagaatcaagcttctcgcccctataacatttacccacacgggatcactgacgttaggcctttgtatagcagaagacttcccaaaggcgtgaagcatctcaaagacttccccattttgccaggcgagatctttaagtacaaatggaccgtcacagtggaagatggaccgactaaatcagaccctcgatgccttacgcggtactattcctccttcgtgaatatggagagagatttggcaagcggactcataggaccactcctcatctgttacaaggaatctgtagaccagaggggtaaccagattatgagtgataaacgcaatgtgatcctttttagcgtcttcgacgagaaccggtcctggtacttgaccgagaatatacaaaggttccttcccaaccccgcaggcgttcagttggaagaccctgagtttcaggccagcaatattatgcactcaatcaacggctatgtgtttgatagtctccagctttctgtttgcctccatgaagtagcctattggtacatcttgtcaattggtgctcaaacagacttcctctccgtcttcttctccggctacacctttaagcacaagatggtgtatgaggacactctcacactctttccattttctggagaaaccgtgttcatgagcatggagaatccaggcctttggatcttgggttgccacaacagtgattttcgcaatcggggaatgactgctctcctcaaagtcagcagctgtgataagaacacaggcgactattacgaagattcttacgaggacataagtgcctactttgactccaagaataacgccattgagcccagatcattctcccagaatcctcccgtgcttaaaaggcatcagcgcgaaatcaccagaactactcttcagtctgatcaagaggagattgactatgacgacaccataagcgtggaaatgaagaaggaggatttcgatatctatgacgaagatgagaaccagtctccgcggagctttcagaagaagacgcgacactacttcattgcagcagtcgaaaggctttgggactacggtatgtcatcatcccctcatgtgttgcgcaatagagctcagagtggaagtgttccacagttcaagaaagtcgtctttcaagagtttacagatggcagcttcacacagcctctctatcggggcgagcttaacgaacatttgggactccttggtccctatatccgagccgaagtggaggacaacattatggttacctttaggaatcaagcctctcgcccctacagcttctactcctccctcatcagttatgaggaggatcagagacaaggcgctgaaccacggaagaactttgtgaaaccgaatgagacgaagacctacttctggaaagtacagcaccacatggcccccacaaaagacgaattcgattgcaaagcatgggcgtatttttcagacgttgacttggagaaagatgtacattcaggacttattggtcctttgttggtgtgtcacactaacactctcaatccagcccatggcaggcaggtgacagtccaggaattcgctcttttctttaccatctttgatgagaccaagtcctggtacttcacggaaaacatggagcgcaattgcagagccccctgtaacatacagatggaggaccctacctttaaggaaaattatcggttccacgcaatcaacggatacattatggatacactccctggccttgtgatggctcaggaccaacgaatcaggtggtacctcctcagcatgggttctaatgagaacatacactccattcacttttcaggacatgtgttcactgtccggaagaaagaagagtataagatggccctctacaatttgtatccaggcgtgtttgagaccgttgaaatgcttccctctaaagctggcatctggagagtagagtgcttgatcggagaacatcttcacgcaggtatgagcaccttgttcctcgtgtacagcaacaaatgtcagaccccacttggcatggccagtggacacattcgcgactttcagatcacagcatctggccagtatggacaatgggccccaaagttggctcgcctccattactccggtagcataaatgcgtggtccactaaagaacctttcagctggattaaggtcgatcttcttgcccccatgatcatccacggcattaagacacagggagcgaggcagaaattctcctccctgtacatctcacagttcattattatgtatagtttggacggcaagaagtggcaaacttatagaggtaacagtactggaacagacatggtgttcttcggcaacgttgatagctctggcatcaaacacaacatctttaatcctcccataatagctcggtacatcagattgcatccgacccactacagcattaggagtacactccgaatggagcttatgggttgcgacttgaattcctgttcaatgccactcggaatggagtctaaagccatctctgatgcacagataaccgccagtagctactttacgaacatgtttgctacgtggtcaccctctaaggcaaggcttcatttgcaaggccggtctaatgcctggagacctcaggtgaacaacccgaaagaatggctccaggtggactttcagaagaccatgaaagtaacaggtgtcactactcagggagttaagtccttggatactagcatgtatgtgaaggagttccttatttcctcatcacaagatggccaccagtggaccctcttctttcagaatggtaaggtcaaagtgtttcagggcaatcaagacagcttcacacccgtggtgaacagtcttgatcctccactcttgacacgataccttcgaatccatccacagtcttgggagcaccagattgcattgcgcatggaagtacttggatgcgaggctcaggacctctac

SEQ ID NO: 824 - protein, 1457 aa, synthetic construct
  REGION 1..1457: note = Variant of human B-domain deleted Factor VIII
MQIELSTCFFLCLLRFCFSATRRYYLGAVELSWDYMQSDLGELPVDARFPPRVPKSFPFNTSVVYKKTLFVEFTDHLFNIAKPRPPWMGLLGPTIQAEVYDTVVITLKNMASHPVSLHAVGVSYWKASEGAEYDDQTSQREKEDDKVFPGGSHTYVWQVLKENGPMASDPPCLTYSYLSHVDLVKDLNSGLIGALLVCREGSLAKEKTQTLHKFILLFAVFDEGKSWHSETKNSLMQDRDAASARAWPKMHTVNGYVNRTLPGLIGCHRKSVYWHVIGMGTTPEVHSIFLEGHTFLVRNHRQASLEISPITFLTAQTLLMDLGQFLLFCHISSHQHDGMEAYVKVDSCPEEPQLRMKNNEEAEDYDDDLTDSEMDVVRFDDDNSPSIIQIRSVAKKHPKTWVHYIAAEEEDWDYAPLVLAPDDRSYKSQYLNNGPQRIGRKYKKVRFMAYTDETFKTREAIQHESGILGPLLYGEVGDTLLIIFKNQASRPYNIYPHGITDVRPLYSRRLPKGVKHLKDFPILPGEIFKYKWTVTVEDGPTKSDPRCLTRYYSSFVNMERDLASGLIGPLLICYKESVDQRGNQIMSDKRNVILFSVFDENRSWYLTENIQRFLPNPAGVQLEDPEFQASNIMHSINGYVFDSLQLSVCLHEVAYWYILSIGAQTDFLSVFFSGYTFKHKMVYEDTLTLFPFSGETVFMSMENPGLWILGCHNSDFRNRGMTALLKVSSCDKNTGDYYEDSYEDISAYFDSKNNAIEPRSFSQNPPVLKRHQREITRTTLQSDQEEIDYDDTISVEMKKEDFDIYDEDENQSPRSFQKKTRHYFIAAVERLWDYGMSSSPHVLRNRAQSGSVPQFKKVVFQEFTDGSFTQPLYRGELNEHLGLLGPYIRAEVEDNIMVTFRNQASRPYSFYSSLISYEEDQRQGAEPRKNFVKPNETKTYFWKVQHHMAPTKDEFDCKAWAYFSDVDLEKDVHSGLIGPLLVCHTNTLNPAHGRQVTVQEFALFFTIFDETKSWYFTENMERNCRAPCNIQMEDPTFKENYRFHAINGYIMDTLPGLVMAQDQRIRWYLLSMGSNENIHSIHFSGHVFTVRKKEEYKMALYNLYPGVFETVEMLPSKAGIWRVECLIGEHLHAGMSTLFLVYSNKCQTPLGMASGHIRDFQITASGQYGQWAPKLARLHYSGSINAWSTKEPFSWIKVDLLAPMIIHGIKTQGARQKFSSLYISQFIIMYSLDGKKWQTYRGNSTGTDMVFFGNVDSSGIKHNIFNPPIIARYIRLHPTHYSIRSTLRMELMGCDLNSCSMPLGMESKAISDAQITASSYFTNMFATWSPSKARLHLQGRSNAWRPQVNNPKEWLQVDFQKTMKVTGVTTQGVKSLDTSMYVKEFLISSSQDGHQWTLFFQNGKVKVFQGNQDSFTPVVNSLDPPLLTRYLRIHPQSWEHQIALRMEVLGCEAQDLY

SEQ ID NO: 825 - DNA, 4371 bp, synthetic construct
  misc_feature 1..4371: note = Variant of human B-domain deleted Factor VIII
  source 1..4371: mol_type = other DNA
atgcagattgaactgtctacctgcttcttcctctgtttgctgaggttctgctttagcgccactagacggtactaccttggcgctgtggagctgtcctgggactatatgcagagtgatttgggagagcttcccgtcgacgcacgatttcctcctcgcgttccaaagtcatttccctttaacacaagcgtagtgtacaagaagacgctcttcgtcgaattcaccgatcacctgttcaatatcgccaaacccagaccaccatggatgggtcttttggggcctaccatacaagcggaggtgtatgacacagttgttatcactctcaagaacatggcttctcatccggtaagtcttcacgcagtgggcgtgtcctactggaaagcttcagaaggagccgagtatgatgatcagacatcccagagggagaaagaagacgacaaggtatttccaggtgggtctcatacctatgtgtggcaagtgctcaaagagaatggccctatggcaagcgatccgccgtgtttgacttacagctacctttcacacgttgacctcgtcaaggacctcaactccgggttgattggagccttgttggtatgcagggaaggatctcttgccaaagagaagacacagaccctccacaagtttatccttctctttgctgtgttcgatgagggcaaaagttggcatagcgaaacgaagaattccctcatgcaggatcgcgacgcagccagcgccagagcttggcccaagatgcacactgtgaacggatatgtcaataggacgcttcctggcttgattgggtgtcatcggaaaagtgtctactggcacgtgatcggaatggggacaacaccagaggtccactccatatttctcgaaggccataccttccttgttcgaaaccacagacaggcatccttggggatctctcccattacctttctcactgcccaaacgctccttatggacttgggtcagttccttctcagttgccatatcccgtcacaccagcatgatggtatggaagcttatgtgaaagtcgacagttgtcctgaggagccacagttgcgcatgaagaataatgaagaagccgaggattacgacgacgatctcaccgattctgagatggacgtggtgaggtttgatgacgacaactctccctccatcattcaagctcggagcgtggcgaagaaacaccccaagacttgggtccactatatagcggcggaagaggaggattgggattacgctcctcttgtattggcaccagatgaccgctcatacaaaagccagtacctcaacaacggaccgcagagaattggccggaagtataagaaagtgcgatttatggcctatacagacgaaacctttaagacaagggaggccatccagcatgagagtgggattttgggacctcttctttacggcgaagttggtgataccctcctcatcatcttcaagaatcaagcttctcgcccctataacatttacccacacgggatcactgacgttaggcctttgtatagcagaagacttcccaaaggcgtgaagcatctcaaagacttccccattttgccaggcgagatctttaagtacaaatggaccgtcacagtggaagatggaccgactaaatcagaccctcgatgccttacgcggtactattcctccttcgtgaatatggagagagatttggcaagcggactcataggaccactcctcatctgttacaaggaatctgtagaccagaggggtaaccagattatgagtgataaacgcaatgtgatcctttttagcgtcttcgacgagaaccggtcctggtacttgaccgagaatatacaaaggttccttcccaaccccgcaggcgttcagttggaagaccctgagtttcaggccagcaatattatgcactcaatcaacggctatgtgtttgatagtctccagctttctgtttgcctccatgaagtagcctattggtacatcttgtcaattggtgctcaaacagacttcctctccgtcttcttctccggctacacctttaagcacaagatggtgtatgaggacactctcacactctttccattttctggagaaaccgtgttcatgagcatggagaatccaggcctttggatcttgggttgccacaacagtgattttcgcaatcggggaatgactgctctcctcaaagtcagcagctgtgataagaacacaggcgactattacgaagattcttacgaggacataagtgcctacctggactccaagaataacgccattgagcccagatcattctcccagaatcctcccgtgcttaaaaggcatcagcgcgaaatcaccagaactactcttcagtctgatcaagaggagattgactatgacgacaccataagcgtggaaatgaagaaggaggatttcgatatctatgacgaagatgagaaccagtctccgcggagctttcagaagaagacgcgacactacttcattgcagcagtcgaaaggctttgggactacggtatgtcatcatcccctcatgtgttgcgcaatagagctcagagtggaagtgttccacagttcaagaaagtcgtctttcaagagtttacagatggcagcttcacacagcctctctatcggggcgagcttaacgaacatttgggactccttggtccctatatccgagccgaagtggaggacaacattatggttacctttaggaatcaagcctctcgcccctacagcttctactcctccctcatcagttatgaggaggatcagagacaaggcgctgaaccacggaagaactttgtgaaaccgaatgagacgaagacctacttctggaaagtacagcaccacatggcccccacaaaagacgaattcgattgcaaagcatgggcgtatttttcagacgttgacttggagaaagatgtacattcaggacttattggtcctttgttggtgtgtcacactaacactctcaatccagcccatggcaggcaggtgacagtccaggaattcgctcttttctttaccatctttgatgagaccaagtcctggtacttcacggaaaacatggagcgcaattgcagagccccctgtaacatacagatggaggaccctacctttaaggaaaattatcggttccacgcaatcaacggatacattcgtgatacactccctggccttgtgatggctcaggaccaacgaatcaggtggtacctcctcagcatgggttctaatgagaacatacactccattcacttttcaggacatgtgttcactgtccggaagaaagaagagtataagatggccctctacaatttgtatccaggcgtgtttgagaccgttgaaatgcttccctctaaagctggcatctggagagtagagtgcttgatcggagaacatcttcacgcaggtatgagcaccttgttcctcgtgtacagcaacaaatgtcagaccccacttggcatggccagtggacacattcgcgactttcagatcacagcatctggccagtatggacaatgggccccaaagttggctcgcctccattactccggtagcataaatgcgtggtccactaaagaacctgccagctggattaaggtcgatcttcttgcccccatgatcatccacggcattaagacacagggagcgaggcagaaaggttcctccctgtacatctcacagttcattattatgtatagtttggacggcaagaagtggcaaacttatagaggtaacagtactggaacagacatggtgttcttcggcaacgttgatagctctggcatcaaacacaacatctttaatcctcccataatagctcggtacatcagattgcatccgacccactacagcattaggagtacactccgaatggagcttatgggttgcgacttgaattcctgttcaatgccactcggaatggagtctaaagccatctctgatgcacagataaccgccagtagctactttacgaacatgtttgctacgtggtcaccctctaaggcaaggcttcatttgcaaggccggtctaatgcctggagacctcaggtgaacaacccgaaagaatggctccaggtggactttcagaagaccatgaaagtaacaggtgtcactactcagggagttaagtccttggatactagcatgtatgtgaaggagttccttatttcctcatcacaagatggccaccagtggaccctcttctttcagaatggtaaggtcaaagtgtttcagggcaatcaagacagcttcacacccgtggtgaacagtcttgatcctccactcttgacacgataccttcgaatccatccacagtcttgggagcaccagattgcattgcgcatggaagtacttggatgcgaggctcaggacctctac

SEQ ID NO: 826 - protein, 1457 aa, synthetic construct
  REGION 1..1457: note = Variant of human B-domain deleted Factor VIII
MQIELSTCFFLCLLRFCFSATRRYYLGAVELSWDYMQSDLGELPVDARFPPRVPKSFPFNTSVVYKKTLFVEFTDHLFNIAKPRPPWMGLLGPTIQAEVYDTVVITLKNMASHPVSLHAVGVSYWKASEGAEYDDQTSQREKEDDKVFPGGSHTYVWQVLKENGPMASDPPCLTYSYLSHVDLVKDLNSGLIGALLVCREGSLAKEKTQTLHKFILLFAVFDEGKSWHSETKNSLMQDRDAASARAWPKMHTVNGYVNRTLPGLIGCHRKSVYWHVIGMGTTPEVHSIFLEGHTFLVRNHRQASLGISPITFLTAQTLLMDLGQFLLSCHIPSHQHDGMEAYVKVDSCPEEPQLRMKNNEEAEDYDDDLTDSEMDVVRFDDDNSPSIIQARSVAKKHPKTWVHYIAAEEEDWDYAPLVLAPDDRSYKSQYLNNGPQRIGRKYKKVRFMAYTDETFKTREAIQHESGILGPLLYGEVGDTLLIIFKNQASRPYNIYPHGITDVRPLYSRRLPKGVKHLKDFPILPGEIFKYKWTVTVEDGPTKSDPRCLTRYYSSFVNMERDLASGLIGPLLICYKESVDQRGNQIMSDKRNVILFSVFDENRSWYLTENIQRFLPNPAGVQLEDPEFQASNIMHSINGYVFDSLQLSVCLHEVAYWYILSIGAQTDFLSVFFSGYTFKHKMVYEDTLTLFPFSGETVFMSMENPGLWILGCHNSDFRNRGMTALLKVSSCDKNTGDYYEDSYEDISAYLDSKNNAIEPRSFSQNPPVLKRHQREITRTTLQSDQEEIDYDDTISVEMKKEDFDIYDEDENQSPRSFQKKTRHYFIAAVERLWDYGMSSSPHVLRNRAQSGSVPQFKKVVFQEFTDGSFTQPLYRGELNEHLGLLGPYIRAEVEDNIMVTFRNQASRPYSFYSSLISYEEDQRQGAEPRKNFVKPNETKTYFWKVQHHMAPTKDEFDCKAWAYFSDVDLEKDVHSGLIGPLLVCHTNTLNPAHGRQVTVQEFALFFTIFDETKSWYFTENMERNCRAPCNIQMEDPTFKENYRFHAINGYIRDTLPGLVMAQDQRIRWYLLSMGSNENIHSIHFSGHVFTVRKKEEYKMALYNLYPGVFETVEMLPSKAGIWRVECLIGEHLHAGMSTLFLVYSNKCQTPLGMASGHIRDFQITASGQYGQWAPKLARLHYSGSINAWSTKEPASWIKVDLLAPMIIHGIKTQGARQKGSSLYISQFIIMYSLDGKKWQTYRGNSTGTDMVFFGNVDSSGIKHNIFNPPIIARYIRLHPTHYSIRSTLRMELMGCDLNSCSMPLGMESKAISDAQITASSYFTNMFATWSPSKARLHLQGRSNAWRPQVNNPKEWLQVDFQKTMKVTGVTTQGVKSLDTSMYVKEFLISSSQDGHQWTLFFQNGKVKVFQGNQDSFTPVVNSLDPPLLTRYLRIHPQSWEHQIALRMEVLGCEAQDLY

SEQ ID NO: 827 - DNA, 4371 bp, synthetic construct
  misc_feature 1..4371: note = Variant of human B-domain deleted Factor VIII
  source 1..4371: mol_type = other DNA
atgcagattgaactgtctacctgcttcttcctctgtttgctgaggttctgctttagcgccactagacggtactaccttggcgctgtggagctgtcctgggactatatgcagagtgatttgggagagcttcccgtcgacgcacgatttcctcctcgcgttccaaagtcatttccctttaacacaagccaagtgtacaagaagacgctcttcgtcgaattcaccgatcacctgttcaatatcgccaaacccagaccaccatggatgggtcttttggggcctaccatacaagcggaggtgtatgacacagttgttatcactctcaagaacatggcttctcatccggtaagtcttcacgcagtgggcgtgtcctactggaaagcttcagaaggagccgagtatgatgatcagacatcccagagggagaaagaagacgacaaggtatttccaggtgggtctcatacctatgtgtggcaagtgctcaaagagaatggccctatggcaagcgatccgccgtgtttgacttacagctacctttcacacgttgacctcgtcaaggacctcaactccgggttgattggagccttgttggtatgcagggaaggatctcttgccaaagagaagacacagaccctccacaagtttatccttctctttgctgtgttcgatgagggcaaaagttggcatagcgaaacgaagaattccctcatgcaggatcgcgacgcagccagcgccagagcttggcccaagatgcacactgtgaacggatatgtcaataggacgcttcctggcttgattgggtgtcatcggaaaagtgtctactggcacgtgatcggaatggggacaacaccagaggtccactccatatttctcgaaggccataccttccttgttcgaaaccacagacaggcatccttggggatctctcccattacctttctcactgcccaaacgctccttatggacttgggtcagttccttctcttttgccatatcccgtcacaccagcatgatggtatggaagcttatgtgaaagtcgacagttgtcctgaggagccacagttgcgcatgaagaataatgaagaagccgaggattacgacgacgatctcaccgattctgagatggacgtggtgaggtttgatgacgacaactctccctccatcattcaaattcggagcgtggcgaagaaacaccccaagacttgggtccactatatagcggcggaagaggaggattgggattacgctcctcttgtattggcaccagatgaccgctcatacaaaagccagtacctcaacaacggaccgcagagaattggccggaagtataagaaagtgcgatttatggcctatacagacgaaacctttaagacaagggaggccatccagcatgagagtgggattttgggacctcttctttacggcgaagttggtgataccctcctcatcatcttcaagaatcaagcttctcgcccctataacatttacccacacgggatcactgacgttaggcctttgtatagcagaagacttcccaaaggcgtgaagcatctcaaagacttccccattttgccaggcgagatctttaagtacaaatggaccgtcacagtggaagatggaccgactaaatcagaccctcgatgccttacgcggtactattcctccttcgtgaatatggagagagatttggcaagcggactcataggaccactcctcatctgttacaaggaatctgtagaccagaggggtaaccagattatgagtgataaacgcaatgtgatcctttttagcgtcttcgacgagaaccggtcctggtacttgaccgagaatatacaaaggttccttcccaaccccgcaggcgttcagttggaagaccctgagtttcaggccagcaatattatgcactcaatcaacggctatgtgtttgatagtctccagctttctgtttgcctccatgaagtagcctattggtacatcttgtcaattggtgctcaaacagacttcctctccgtcttcttctccggctacacctttaagcacaagatggtgtatgaggacactctcacactctttccattttctggagaaaccgtgttcatgagcatggagaatccaggcctttggatcttgggttgccacaacagtgattttcgcaatcggggaatgactgctctcctcaaagtcagcagctgtgataagaacacaggcgactattacgaagattcttacgaggacataagtgcctacctggactccaagaataacgccattgagcccagatcattctcccagaatcctcccgtgcttaaaaggcatcagcgcgaaatcaccagaactactcttcagtctgatcaagaggagattgactatgacgacaccataagcgtggaaatgaagaaggaggatttcgatatctatgacgaagatgagaaccagtctccgcggagctttcagaagaagacgcgacactacttcattgcagcagtcgaaaggctttgggactacggtatgtcatcatcccctcatgtgttgcgcaatagagctcagagtggaagtgttccacagttcaagaaagtcgtctttcaagagtttacagatggcagcttcacacagcctctctatcggggcgagcttaacgaacatttgggactccttggtccctatatccgagccgaagtggaggacaacattatggttacctttaggaatcaagcctctcgcccctacagcttctactcctccctcatcagttatgaggaggatcagagacaaggcgctgaaccacggaagaactttgtgaaaccgaatgagacgaagacctacttctggaaagtacagcaccacatggcccccacaaaagacgaattcgattgcaaagcatgggcgtatttttcagacgttgacttggagaaagatgtacattcaggacttattggtcctttgttggtgtgtcacactaacactctcaatccagcccatggcaggcaggtgacagtccaggaattcgctcttttctttaccatctttgatgagaccaagtcctggtacttcacggaaaacatggagcgcaattgcagagccccctgtaacatacagatggaggaccctacctttaaggaaaattatcggttccacgcaatcaacggatacattcgtgatacactccctggccttgtgatggctcaggaccaacgaatcaggtggtacctcctcagcatgggttctaatgagaacatacactccattcacttttcaggacatgtgttcactgtccggaagaaagaagagtataagatggccctctacaatttgtatccaggcgtgtttgagaccgttgaaatgcttccctctaaagctggcatctggagagtagagtgcttgatcggagaacatcttcacgcaggtatgagcaccttgttcctcgtgtacagcaacaaatgtcagaacccacttggcatggccagtggacacattcgcgactttcagatcacagcatctggccagtatggacaatgggccccaaagttggctcgcctccattactccggtagcataaatgcgtggtccactaaagaacctttcagctggattaaggtcgatcttcttgcccccatgatcatccacggcattaagacacagggagcgaggcagaaattctcctccctgtacatctcacagttcattattatgtatagtttggacggcaagaagtggcaaacttatagaggtaacagtactggaacagacatggtgttcttcggcaacgttgatagctctggcatcaaacacaacatctttaatcctcccataatagctcggtacatcagattgcatccgacccactacagcattaggagtacactccgaatggagcttatgggttgcgacttgaattcctgttcaatgccactcggaatggagtctaaagccatctctgatgcacagataaccgccagtagctactttacgaacatgtttgctacgtggtcaccctctaaggcaaggcttcatttgcaaggccggtctaatgcctggagacctcaggtgaacaacccgaaagaatggctccaggtggactttcagaagaccatgaaagtaacaggtgtcactactcagggagttaagtccttggatactagcatgtatgtgaaggagttccttatttcctcatcacaagatggccaccagtggaccctcttctttcagaatggtaaggtcaaagtgtttcagggcaatcaagacagcttcacacccgtggtgaacagtcttgatcctccactcttgacacgataccttcgaatccatccacagtcttgggagcaccagattgcattgcgcatggaagtacttggatgcgaggctcaggacctctac

SEQ ID NO: 828 - protein, 1457 aa, synthetic construct
  REGION 1..1457: note = Variant of human B-domain deleted Factor VIII
MQIELSTCFFLCLLRFCFSATRRYYLGAVELSWDYMQSDLGELPVDARFPPRVPKSFPFNTSQVYKKTLFVEFTDHLFNIAKPRPPWMGLLGPTIQAEVYDTVVITLKNMASHPVSLHAVGVSYWKASEGAEYDDQTSQREKEDDKVFPGGSHTYVWQVLKENGPMASDPPCLTYSYLSHVDLVKDLNSGLIGALLVCREGSLAKEKTQTLHKFILLFAVFDEGKSWHSETKNSLMQDRDAASARAWPKMHTVNGYVNRTLPGLIGCHRKSVYWHVIGMGTTPEVHSIFLEGHTFLVRNHRQASLGISPITFLTAQTLLMDLGQFLLFCHIPSHQHDGMEAYVKVDSCPEEPQLRMKNNEEAEDYDDDLTDSEMDVVRFDDDNSPSIIQIRSVAKKHPKTWVHYIAAEEEDWDYAPLVLAPDDRSYKSQYLNNGPQRIGRKYKKVRFMAYTDETFKTREAIQHESGILGPLLYGEVGDTLLIIFKNQASRPYNIYPHGITDVRPLYSRRLPKGVKHLKDFPILPGEIFKYKWTVTVEDGPTKSDPRCLTRYYSSFVNMERDLASGLIGPLLICYKESVDQRGNQIMSDKRNVILFSVFDENRSWYLTENIQRFLPNPAGVQLEDPEFQASNIMHSINGYVFDSLQLSVCLHEVAYWYILSIGAQTDFLSVFFSGYTFKHKMVYEDTLTLFPFSGETVFMSMENPGLWILGCHNSDFRNRGMTALLKVSSCDKNTGDYYEDSYEDISAYLDSKNNAIEPRSFSQNPPVLKRHQREITRTTLQSDQEEIDYDDTISVEMKKEDFDIYDEDENQSPRSFQKKTRHYFIAAVERLWDYGMSSSPHVLRNRAQSGSVPQFKKVVFQEFTDGSFTQPLYRGELNEHLGLLGPYIRAEVEDNIMVTFRNQASRPYSFYSSLISYEEDQRQGAEPRKNFVKPNETKTYFWKVQHHMAPTKDEFDCKAWAYFSDVDLEKDVHSGLIGPLLVCHTNTLNPAHGRQVTVQEFALFFTIFDETKSWYFTENMERNCRAPCNIQMEDPTFKENYRFHAINGYIRDTLPGLVMAQDQRIRWYLLSMGSNENIHSIHFSGHVFTVRKKEEYKMALYNLYPGVFETVEMLPSKAGIWRVECLIGEHLHAGMSTLFLVYSNKCQNPLGMASGHIRDFQITASGQYGQWAPKLARLHYSGSINAWSTKEPFSWIKVDLLAPMIIHGIKTQGARQKFSSLYISQFIIMYSLDGKKWQTYRGNSTGTDMVFFGNVDSSGIKHNIFNPPIIARYIRLHPTHYSIRSTLRMELMGCDLNSCSMPLGMESKAISDAQITASSYFTNMFATWSPSKARLHLQGRSNAWRPQVNNPKEWLQVDFQKTMKVTGVTTQGVKSLDTSMYVKEFLISSSQDGHQWTLFFQNGKVKVFQGNQDSFTPVVNSLDPPLLTRYLRIHPQSWEHQIALRMEVLGCEAQDLY

SEQ ID NO: 829 - DNA, 4371 bp, synthetic construct
  misc_feature 1..4371: note = Variant of human B-domain deleted Factor VIII
  source 1..4371: mol_type = other DNA
atgcagattgaactgtctacctgcttcttcctctgtttgctgaggttctgctttagcgccactagacggtactaccttggcgctgtggagctgtcctgggactatatgcagagtgatttgggagagcttcccgtcgacgcacgatttcctcctcgcgttccaaagtcatttccctttaacacaagccaagtgtacaagaagacgctcttcgtcgaattcaccgatcacctgttcaatatcgccaaacccagaccaccatggatgggtcttttggggcctaccatacaagcggaggtgtatgacacagttgttatcactctcaagaacatggcttctcatccggtaagtcttcacgcagtgggcgtgtcctactggaaagcttcagaaggagccgagtatgatgatcagacatcccagagggagaaagaagacgacaaggtatttccaggtgggtctcatacctatgtgtggcaagtgctcaaagagaatggccctatggcaagcgatccgccgtgtttgacttacagctacctttcacacgttgacctcgtcaaggacctcaactccgggttgattggagccttgttggtatgcagggaaggatctcttgccaaagagaagacacagaccctccacaagtttatccttctctttgctgtgttcgatgagggcaaaagttggcatagcgaaacgaagaattccctcatgcaggatcgcgacgcagccagcgccagagcttggcccaagatgcacactgtgaacggatatgtcaataggacgcttcctggcttgattgggtgtcatcggaaaagtgtctactggcacgtgatcggaatggggacaacaccagaggtccactccatatttctcgaaggccataccttccttgttcgaaaccacagacaggcatccttggggatctctcccattacctttctcactgcccaaacgctccttatggacttgggtcagttccttctcttttgccatatcccgtcacaccagcatgatggtatggaagcttatgtgaaagtcgacagttgtcctgaggagccacagttgcgcatgaagaataatgaagaagccgaggattacgacgacgatctcaccgattctgagatggacgtggtgaggtttgatgacgacaactctccctccaccattcaaattcggagcgtggcgaagaaacaccccaagacttgggtccactatatagcggcggaagaggaggattgggattacgctcctcttgtattggcaccagatgaccgctcatacaaaagccagtacctcaacaacggaccgcagagaattggccggaagtataagaaagtgcgatttatggcctatacagacgaaacctttaagacaagggaggccatccagcatgagagtgggattttgggacctcttctttacggcgaagttggtgataccctcctcatcatcttcaagaatcaagcttctcgcccctataacatttacccacacgggatcactgacgttaggcctttgtatagcagaagacttcccaaaggcgtgaagcatctcaaagacttccccattttgccaggcgagatctttaagtacaaatggaccgtcacagtggaagatggaccgactaaatcagaccctcgatgccttacgcggtactattcctccttcgtgaatatggagagagatttggcaagcggactcataggaccactcctcatctgttacaaggaatctgtagaccagaggggtaaccagattatgagtgataaacgcaatgtgatcctttttagcgtcttcgacgagaaccggtcctggtacttgaccgagaatatacaaaggttccttcccaaccccgcaggcgttcagttggaagaccctgagtttcaggccagcaatattatgcactcaatcaacggctatgtgtttgatagtctccagctttctgtttgcctccatgaagtagcctattggtacatcttgtcaattggtgctcaaacagacttcctctccgtcttcttctccggctacacctttaagcacaagatggtgtatgaggacactctcacactctttccattttctggagaaaccgtgttcatgagcatggagaatccaggcctttggatcttgggttgccacaacagtgattttcgcaatcggggaatgactgctctcctcaaagtcagcagctgtgataagaacacaggcgactattacgaagattcttacgaggacataagtgcctacctggactccaagaataacgccattgagcccagatcattctcccagaatcctcccgtgcttaaaaggcatcagcgcgaaatcaccagaactactcttcagtctgatcaagaggagattgactatgacgacaccataagcgtggaaatgaagaaggaggatttcgatatctatgacgaagatgagaaccagtctccgcggagctttcagaagaagacgcgacactacttcattgcagcagtcgaaaggctttgggactacggtatgtcatcatcccctcatgtgttgcgcaatagagctcagagtggaagtgttccacagttcaagaaagtcgtctttcaagagtttacagatggcagcttcacacagcctctctatcggggcgagcttaacgaacatttgggactccttggtccctatatccgagccgaagtggaggacaacattatggttacctttaggaatcaagcctctcgcccctacagcttctactcctccctcatcagttatgaggaggatcagagacaaggcgctgaaccacggaagaactttgtgaaaccgaatgagacgaagacctacttctggaaagtacagcaccacatggcccccacaaaagacgaattcgattgcaaagcatgggcgtatttttcagacgttgacttggagaaagatgtacattcaggacttattggtcctttgttggtgtgtcacactaacactctcaatccagcccatggcaggcaggtgacagtccaggaattcgctcttttctttaccatctttgatgagaccaagtcctggtacttcacggaaaacatggagcgcaattgcagagccccctgtaacatacagatggaggaccctacctttaaggaaaattatcggttccacgcaatcaacggatacattaaggatacactccctggccttgtgatggctcaggaccaacgaatcaggtggtacctcctcagcatgggttctaatgagaacatacactccattcacttttcaggacatgtgttcactgtccggaagaaagaagagtataagatggccctctacaatttgtatccaggcgtgtttgagaccgttgaaatgcttccctctaaagctggcatctggagagtagagtgcttgatcggagaacatcttcacgcaggtatgagcaccttgttcctcgtgtacagcaacaaatgtcagaccccacttggcatggccagtggacacattcgcgactttcagatcacagcatctggccagtatggacaatgggccccaaagttggctcgcctccattactccggtagcataaatgcgtggtccactaaagaacctttcagctggattaaggtcgatcttcttgcccccatgatcatccacggcattaagacacagggagcgaggcagaaattctcctccctgtacatctcacagttcattattatgtatagtttggacggcaagaagtggcaaacttatagaggtaacagtactggaacagacatggtgttcttcggcaacgttgatagctctggcatcaaacacaacatctttaatcctcccataatagctcggtacatcagattgcatccgacccactacagcattaggagtacactccgaatggagcttatgggttgcgacttgaattcctgttcaatgccactcggaatggagtctaaagccatctctgatgcacagataaccgccagtagctactttacgaacatgtttgctacgtggtcaccctctaaggcaaggcttcatttgcaaggccggtctaatgcctggagacctcaggtgaacaacccgaaagaatggctccaggtggactttcagaagaccatgaaagtaacaggtgtcactactcagggagttaagtccttggatactagcatgtatgtgaaggagttccttatttcctcatcacaagatggccaccagtggaccctcttctttcagaatggtaaggtcaaagtgtttcagggcaatcaagacagcttcacacccgtggtgaacagtcttgatcctccactcttgacacgataccttcgaatccatccacagtcttgggagcaccagattgcattgcgcatggaagtacttggatgcgaggctcaggacctctac

SEQ ID NO: 830 - protein, 1457 aa, synthetic construct
  REGION 1..1457: note = Variant of human B-domain deleted Factor VIII
MQIELSTCFFLCLLRFCFSATRRYYLGAVELSWDYMQSDLGELPVDARFPPRVPKSFPFNTSQVYKKTLFVEFTDHLFNIAKPRPPWMGLLGPTIQAEVYDTVVITLKNMASHPVSLHAVGVSYWKASEGAEYDDQTSQREKEDDKVFPGGSHTYVWQVLKENGPMASDPPCLTYSYLSHVDLVKDLNSGLIGALLVCREGSLAKEKTQTLHKFILLFAVFDEGKSWHSETKNSLMQDRDAASARAWPKMHTVNGYVNRTLPGLIGCHRKSVYWHVIGMGTTPEVHSIFLEGHTFLVRNHRQASLGISPITFLTAQTLLMDLGQFLLFCHIPSHQHDGMEAYVKVDSCPEEPQLRMKNNEEAEDYDDDLTDSEMDVVRFDDDNSPSTIQIRSVAKKHPKTWVHYIAAEEEDWDYAPLVLAPDDRSYKSQYLNNGPQRIGRKYKKVRFMAYTDETFKTREAIQHESGILGPLLYGEVGDTLLIIFKNQASRPYNIYPHGITDVRPLYSRRLPKGVKHLKDFPILPGEIFKYKWTVTVEDGPTKSDPRCLTRYYSSFVNMERDLASGLIGPLLICYKESVDQRGNQIMSDKRNVILFSVFDENRSWYLTENIQRFLPNPAGVQLEDPEFQASNIMHSINGYVFDSLQLSVCLHEVAYWYILSIGAQTDFLSVFFSGYTFKHKMVYEDTLTLFPFSGETVFMSMENPGLWILGCHNSDFRNRGMTALLKVSSCDKNTGDYYEDSYEDISAYLDSKNNAIEPRSFSQNPPVLKRHQREITRTTLQSDQEEIDYDDTISVEMKKEDFDIYDEDENQSPRSFQKKTRHYFIAAVERLWDYGMSSSPHVLRNRAQSGSVPQFKKVVFQEFTDGSFTQPLYRGELNEHLGLLGPYIRAEVEDNIMVTFRNQASRPYSFYSSLISYEEDQRQGAEPRKNFVKPNETKTYFWKVQHHMAPTKDEFDCKAWAYFSDVDLEKDVHSGLIGPLLVCHTNTLNPAHGRQVTVQEFALFFTIFDETKSWYFTENMERNCRAPCNIQMEDPTFKENYRFHAINGYIKDTLPGLVMAQDQRIRWYLLSMGSNENIHSIHFSGHVFTVRKKEEYKMALYNLYPGVFETVEMLPSKAGIWRVECLIGEHLHAGMSTLFLVYSNKCQTPLGMASGHIRDFQITASGQYGQWAPKLARLHYSGSINAWSTKEPFSWIKVDLLAPMIIHGIKTQGARQKFSSLYISQFIIMYSLDGKKWQTYRGNSTGTDMVFFGNVDSSGIKHNIFNPPIIARYIRLHPTHYSIRSTLRMELMGCDLNSCSMPLGMESKAISDAQITASSYFTNMFATWSPSKARLHLQGRSNAWRPQVNNPKEWLQVDFQKTMKVTGVTTQGVKSLDTSMYVKEFLISSSQDGHQWTLFFQNGKVKVFQGNQDSFTPVVNSLDPPLLTRYLRIHPQSWEHQIALRMEVLGCEAQDLY

SEQ ID NO: 831 - DNA, 4371 bp, synthetic construct
  misc_feature 1..4371: note = Variant of human B-domain deleted Factor VIII
  source 1..4371: mol_type = other DNA
atgcagattgaactgtctacctgcttcttcctctgtttgctgaggttctgctttagcgccactagacggtactaccttggcgctgtggagctgtcctgggactatatgcagagtgatttgggagagcttcccgtcgacgcacgatttcctcctcgcgttccaaagtcatttccctttaacacaagcgtagtgtacaagaagacgctcttcgtcgaattcaccgatcacctgttcaatatcgccaaacccagaccaccatggatgggtcttttggggcctaccatacaagcggaggtgtatgacacagttgttatcactctcaagaacatggcttctcatccggtaagtcttcacgcagtgggcgtgtcctactggaaagcttcagaaggagccgagtatgatgatcagacatcccagagggagaaagaagacgacaaggtatttccaggtgggtctcatacctatgtgtggcaagtgctcaaagagaatggccctatggcaagcgatccgccgtgtttgacttacagctacctttcacacgttgacctcgtcaaggacctcaactccgggttgattggagccttgttggtatgcagggaaggatctcttgccaaagagaagacacagaccctccacaagtttatccttctctttgctgtgttcgatgagggcaaaagttggcatagcgaaacgaagaattccctcatgcaggatcgcgacgcagccagcgccagagcttggcccaagatgcacactgtgaacggatatgtcaataggacgcttcctggcttgattgggtgtcatcggaaaagtgtctactggcacgtgatcggaatggggacaacaccagaggtccactccatatttctcgaaggccataccttccttgttcgaaaccacagacaggcatccttggagatctctcccattacctttctcactgcccaaacgctccttatggacttgggtcagttccttctcttctgccatatcagctcacaccagcatgatggtatggaagcttatgtgaaagtcgacagttgtcctgaggagccacagttgcgcatgaagaataatgaagaagccgaggattacgacgacgatctcaccgattctgagatggacgtggtgaggtttgatgacgacaactctccctccaccattcaagctcggagcgtggcgaagaaacaccccaagacttgggtccactatatagcggcggaagaggaggattgggattacgctcctcttgtattggcaccagatgaccgctcatacaaaagccagtacctcaacaacggaccgcagagaattggccggaagtataagaaagtgcgatttatggcctatacagacgaaacctttaagacaagggaggccatccagcatgagagtgggattttgggacctcttctttacggcgaagttggtgataccctcctcatcatcttcaagaatcaagcttctcgcccctataacatttacccacacgggatcactgacgttaggcctttgtatagcagaagacttcccaaaggcgtgaagcatctcaaagacttccccattttgccaggcgagatctttaagtacaaatggaccgtcacagtggaagatggaccgactaaatcagaccctcgatgccttacgcggtactattcctccttcgtgaatatggagagagatttggcaagcggactcataggaccactcctcatctgttacaaggaatctgtagaccagaggggtaaccagattatgagtgataaacgcaatgtgatcctttttagcgtcttcgacgagaaccggtcctggtacttgaccgagaatatacaaaggttccttcccaaccccgcaggcgttcagttggaagaccctgagtttcaggccagcaatattatgcactcaatcaacggctatgtgtttgatagtctccagctttctgtttgcctccatgaagtagcctattggtacatcttgtcaattggtgctcaaacagacttcctctccgtcttcttctccggctacacctttaagcacaagatggtgtatgaggacactctcacactctttccattttctggagaaaccgtgttcatgagcatggagaatccaggcctttggatcttgggttgccacaacagtgattttcgcaatcggggaatgactgctctcctcaaagtcagcagctgtgataagaacacaggcgactattacgaagattcttacgaggacataagtgcctacctggactccaagaataacgccattgagcccagatcattctcccagaatcctcccgtgcttaaaaggcatcagcgcgaaatcaccagaactactcttcagtctgatcaagaggagattgactatgacgacaccataagcgtggaaatgaagaaggaggatttcgatatctatgacgaagatgagaaccagtctccgcggagctttcagaagaagacgcgacactacttcattgcagcagtcgaaaggctttgggactacggtatgtcatcatcccctcatgtgttgcgcaatagagctcagagtggaagtgttccacagttcaagaaagtcgtctttcaagagtttacagatggcagcttcacacagcctctctatcggggcgagcttaacgaacatttgggactccttggtccctatatccgagccgaagtggaggacaacattatggttacctttaggaatcaagcctctcgcccctacagcttctactcctccctcatcagttatgaggaggatcagagacaaggcgctgaaccacggaagaactttgtgaaaccgaatgagacgaagacctacttctggaaagtacagcaccacatggcccccacaaaagacgaattcgattgcaaagcatgggcgtatttttcagacgttgacttggagaaagatgtacattcaggacttattggtcctttgttggtgtgtcacactaacactctcaatccagcccatggcaggcaggtgacagtccaggaattcgctcttttctttaccatctttgatgagaccaagtcctggtacttcacggaaaacatggagcgcaattgcagagccccctgtaacatacagatggaggaccctacctttaaggaaaattatcggttccacgcaatcaacggatacattcgtgatacactccctggccttgtgatggctcaggaccaacgaatcaggtggtacctcctcagcatgggttctaatgagaacatacactccattcacttttcaggacatgtgttcactgtccggaagaaagaagagtataagatggccctctacaatttgtatccaggcgtgtttgagaccgttgaaatgcttccctctaaagctggcatctggagagtagagtgcttgatcggagaacatcttcacgcaggtatgagcaccttgttcctcgtgtacagcaacaaatgtcagaccccacttggcatggccagtggacacattcgcgactttcagatcacagcatctggccagtatggacaatgggccccaaagttggctcgcctccattactccggtagcataaatgcgtggtccactaaagaacctttcagctggattaaggtcgatcttcttgcccccatgatcatccacggcattaagacacagggagcgaggcagaaattctcctccctctacatctcacagttcattattatgtatagtttggacggcaagaagtggcaaacttatagaggtaacagtactggaacagacatggtgttcttcggcaacgttgatagctctggcatcaaacacaacatctttaatcctcccataatagctcggtacatcagattgcatccgacccactacagcattaggagtacactccgaatggagcttatgggttgcgacttgaattcctgttcaatgccactcggaatggagtctaaagccatctctgatgcacagataaccgccagtagctactttacgaacatgtttgctacgtggtcaccctctaaggcaaggcttcatttgcaaggccggtctaatgcctggagacctcaggtgaacaacccgaaagaatggctccaggtggactttcagaagaccatgaaagtaacaggtgtcactactcagggagttaagtccttggatactagcatgtatgtgaaggagttccttatttcctcatcacaagatggccaccagtggaccctcttctttcagaatggtaaggtcaaagtgtttcagggcaatcaagacagcttcacacccgtggtgaacagtcttgatcctccactcttgacacgataccttcgaatccatccacagtcttgggagcaccagattgcattgcgcatggaagtacttggatgcgaggctcaggacctctac

SEQ ID NO: 832 - protein, 1457 aa, synthetic construct
  REGION 1..1457: note = Variant of human B-domain deleted Factor VIII
MQIELSTCFFLCLLRFCFSATRRYYLGAVELSWDYMQSDLGELPVDARFPPRVPKSFPFNTSVVYKKTLFVEFTDHLFNIAKPRPPWMGLLGPTIQAEVYDTVVITLKNMASHPVSLHAVGVSYWKASEGAEYDDQTSQREKEDDKVFPGGSHTYVWQVLKENGPMASDPPCLTYSYLSHVDLVKDLNSGLIGALLVCREGSLAKEKTQTLHKFILLFAVFDEGKSWHSETKNSLMQDRDAASARAWPKMHTVNGYVNRTLPGLIGCHRKSVYWHVIGMGTTPEVHSIFLEGHTFLVRNHRQASLEISPITFLTAQTLLMDLGQFLLFCHISSHQHDGMEAYVKVDSCPEEPQLRMKNNEEAEDYDDDLTDSEMDVVRFDDDNSPSTIQARSVAKKHPKTWVHYIAAEEEDWDYAPLVLAPDDRSYKSQYLNNGPQRIGRKYKKVRFMAYTDETFKTREAIQHESGILGPLLYGEVGDTLLIIFKNQASRPYNIYPHGITDVRPLYSRRLPKGVKHLKDFPILPGEIFKYKWTVTVEDGPTKSDPRCLTRYYSSFVNMERDLASGLIGPLLICYKESVDQRGNQIMSDKRNVILFSVFDENRSWYLTENIQRFLPNPAGVQLEDPEFQASNIMHSINGYVFDSLQLSVCLHEVAYWYILSIGAQTDFLSVFFSGYTFKHKMVYEDTLTLFPFSGETVFMSMENPGLWILGCHNSDFRNRGMTALLKVSSCDKNTGDYYEDSYEDISAYLDSKNNAIEPRSFSQNPPVLKRHQREITRTTLQSDQEEIDYDDTISVEMKKEDFDIYDEDENQSPRSFQKKTRHYFIAAVERLWDYGMSSSPHVLRNRAQSGSVPQFKKVVFQEFTDGSFTQPLYRGELNEHLGLLGPYIRAEVEDNIMVTFRNQASRPYSFYSSLISYEEDQRQGAEPRKNFVKPNETKTYFWKVQHHMAPTKDEFDCKAWAYFSDVDLEKDVHSGLIGPLLVCHTNTLNPAHGRQVTVQEFALFFTIFDETKSWYFTENMERNCRAPCNIQMEDPTFKENYRFHAINGYIRDTLPGLVMAQDQRIRWYLLSMGSNENIHSIHFSGHVFTVRKKEEYKMALYNLYPGVFETVEMLPSKAGIWRVECLIGEHLHAGMSTLFLVYSNKCQTPLGMASGHIRDFQITASGQYGQWAPKLARLHYSGSINAWSTKEPFSWIKVDLLAPMIIHGIKTQGARQKFSSLYISQFIIMYSLDGKKWQTYRGNSTGTDMVFFGNVDSSGIKHNIFNPPIIARYIRLHPTHYSIRSTLRMELMGCDLNSCSMPLGMESKAISDAQITASSYFTNMFATWSPSKARLHLQGRSNAWRPQVNNPKEWLQVDFQKTMKVTGVTTQGVKSLDTSMYVKEFLISSSQDGHQWTLFFQNGKVKVFQGNQDSFTPVVNSLDPPLLTRYLRIHPQSWEHQIALRMEVLGCEAQDLY

SEQ ID NO: 833 - DNA, 4371 bp, synthetic construct
  misc_feature 1..4371: note = Variant of human B-domain deleted Factor VIII
  source 1..4371: mol_type = other DNA
atgcagattgaactgtctacctgcttcttcctctgtttgctgaggttctgctttagcgccactagacggtactaccttggcgctgtggagctgtcctgggactatatgcagagtgatttgggagagcttcccgtcgacgcacgatttcctcctcgcgttccaaagtcatttccctttaacacaagcgtagtgtacaagaagacgctcttcgtcgaattcaccgatcacctgttcaatatcgccaaacccagaccaccatggatgggtcttttggggcctaccatacaagcggaggtgtatgacacagttgttatcactctcaagaacatggcttctcatccggtaagtcttcacgcagtgggcgtgtcctactggaaagcttcagaaggagccgagtatgatgatcagacatcccagagggagaaagaagacgacaaggtatttccaggtgggtctcatacctatgtgtggcaagtgctcaaagagaatggccctatggcaagcgatccgccgtgtttgacttacagctacctttcacacgttgacctcgtcaaggccctcaactccgggttgattggagccttgttggtatgcagggaaggatctcttgccaaagagaagacacagaccctccacaagtttatccttctctttgctgtgttcgatgagggcaaaagttggcatagcgaaacgaagaattccctcatgcaggatcgcgacgcagccagcgccagagcttggcccaagatgcacactgtgaacggatatgtcaataggacgcttcctggcttgattgggtgtcatcggaaaagtgtctactggcacgtgatcggaatggggacaacaccagaggtccactccatatttctcgaaggccataccttccttgttcgaaaccacagacaggcatccttggggatctctcccattacctttctcactgcccaaacgctccttatggacttgggtcagttccttctcagttgccatatcccgtcacaccagcatgatggtatggaagcttatgtgaaagtcgacagttgtcctgaggagccacagttgcgcatgaagaataatgaagaagccgaggattacgacgacgatctcaccgattctgagatggacgtggtgaggtttgatgacgacaactctccctccatcattcaagctcggagcgtggcgaagaaacaccccaagacttgggtccactatatagcggcggaagaggaggattgggattacgctcctcttgtattggcaccagatgaccgctcatacaaaagccagtacctcaacaacggaccgcagagaattggccggaagtataagaaagtgcgatttatggcctatacagacgaaacctttaagacaagggaggccatccagcatgagagtgggattttgggacctcttctttacggcgaagttggtgataccctcctcatcatcttcaagaatcaagcttctcgcccctataacatttacccacacgggatcactgacgttaggcctttgtatagcagaagacttcccaaaggcgtgaagcatctcaaagacttccccattttgccaggcgagatctttaagtacaaatggaccgtcacagtggaagatggaccgactaaatcagaccctcgatgccttacgcggtactattcctccttcgtgaatatggagagagatttggcaagcggactcataggaccactcctcatctgttacaaggaatctgtagaccagaggggtaaccagattatgagtgataaacgcaatgtgatcctttttagcgtcttcgacgagaaccggtcctggtacttgaccgagaatatacaaaggttccttcccaaccccgcaggcgttcagttggaagaccctgagtttcaggccagcaatattatgcactcaatcaacggctatgtgtttgatagtctccagctttctgtttgcctccatgaagtagcctattggtacatcttgtcaattggtgctcaaacagacttcctctccgtcttcttctccggctacacctttaagcacaagatggtgtatgaggacactctcacactctttccattttctggagaaaccgtgttcatgagcatggagaatccaggcctttggatcttgggttgccacaacagtgattttcgcaatcggggaatgactgctctcctcaaagtcagcagctgtgataagaacacaggcgactattacgaagattcttacgaggacataagtgcctactttgactccaagaataacgccattgagcccagatcattctcccagaatcctcccgtgcttaaaaggcatcagcgcgaaatcaccagaactactcttcagtctgatcaagaggagattgactatgacgacaccataagcgtggaaatgaagaaggaggatttcgatatctatgacgaagatgagaaccagtctccgcggagctttcagaagaagacgcgacactacttcattgcagcagtcgaaaggctttgggactacggtatgtcatcatcccctcatgtgttgcgcaatagagctcagagtggaagtgttccacagttcaagaaagtcgtctttcaagagtttacagatggcagcttcacacagcctctctatcggggcgagcttaacgaacatttgggactccttggtccctatatccgagccgaagtggaggacaacattatggttacctttaggaatcaagcctctcgcccctacagcttctactcctccctcatcagttatgaggaggatcagagacaaggcgctgaaccacggaagaactttgtgaaaccgaatgagacgaagacctacttctggaaagtacagcaccacatggcccccacaaaagacgaattcgattgcaaagcatgggcgtatttttcagacgttgacttggagaaagatgtacattcaggacttattggtcctttgttggtgtgtcacactaacactctcaatccagcccatggcaggcaggtgacagtccaggaattcgctcttttctttaccatctttgatgagaccaagtcctggtacttcacggaaaacatggagcgcaattgcagagccccctgtaacatacagatggaggaccctacctttaaggaaaattatcggttccacgcaatcaacggatacattaaggatacactccctggccttgtgatggctcaggaccaacgaatcaggtggtacctcctcagcatgggttctaatgagaacatacactccattcacttttcaggacatgtgttcactgtccggaagaaagaagagtataagatggccctctacaatttgtatccaggcgtgtttgagaccgttgaaatgcttccctctaaagctggcatctggagagtagagtgcttgatcggagaacatcttcacgcaggtatgagcaccttgttcctcgtgtacagcaacaaatgtcagaacccacttggcatggccagtggacacattcgcgactttcagatcacagcatctggccagtatggacaatgggccccaaagttggctcgcctccattactccggtagcataaatgcgtggtccactaaagaacctgccagctggattaaggtcgatcttcttgcccccatgatcatccacggcattaagacacagggagcgaggcagaaattctcctccctgtacatctcacagttcattattatgtatagtttggacggcaagaagtggcaaacttatagaggtaacagtactggaacagacatggtgttcttcggcaacgttgatagctctggcatcaaacacaacatctttaatcctcccataatagctcggtacatcagattgcatccgacccactacagcattaggagtacactccgaatggagcttatgggttgcgacttgaattcctgttcaatgccactcggaatggagtctaaagccatctctgatgcacagataaccgccagtagctactttacgaacatgtttgctacgtggtcaccctctaaggcaaggcttcatttgcaaggccggtctaatgcctggagacctcaggtgaacaacccgaaagaatggctccaggtggactttcagaagaccatgaaagtaacaggtgtcactactcagggagttaagtccttggatactagcatgtatgtgaaggagttccttatttcctcatcacaagatggccaccagtggaccctcttctttcagaatggtaaggtcaaagtgtttcagggcaatcaagacagcttcacacccgtggtgaacagtcttgatcctccactcttgacacgataccttcgaatccatccacagtcttgggagcaccagattgcattgcgcatggaagtacttggatgcgaggctcaggacctctac

SEQ ID NO: 834 - protein, 1457 aa, synthetic construct
  REGION 1..1457: note = Variant of human B-domain deleted Factor VIII
MQIELSTCFFLCLLRFCFSATRRYYLGAVELSWDYMQSDLGELPVDARFPPRVPKSFPFNTSVVYKKTLFVEFTDHLFNIAKPRPPWMGLLGPTIQAEVYDTVVITLKNMASHPVSLHAVGVSYWKASEGAEYDDQTSQREKEDDKVFPGGSHTYVWQVLKENGPMASDPPCLTYSYLSHVDLVKALNSGLIGALLVCREGSLAKEKTQTLHKFILLFAVFDEGKSWHSETKNSLMQDRDAASARAWPKMHTVNGYVNRTLPGLIGCHRKSVYWHVIGMGTTPEVHSIFLEGHTFLVRNHRQASLGISPITFLTAQTLLMDLGQFLLSCHIPSHQHDGMEAYVKVDSCPEEPQLRMKNNEEAEDYDDDLTDSEMDVVRFDDDNSPSIIQARSVAKKHPKTWVHYIAAEEEDWDYAPLVLAPDDRSYKSQYLNNGPQRIGRKYKKVRFMAYTDETFKTREAIQHESGILGPLLYGEVGDTLLIIFKNQASRPYNIYPHGITDVRPLYSRRLPKGVKHLKDFPILPGEIFKYKWTVTVEDGPTKSDPRCLTRYYSSFVNMERDLASGLIGPLLICYKESVDQRGNQIMSDKRNVILFSVFDENRSWYLTENIQRFLPNPAGVQLEDPEFQASNIMHSINGYVFDSLQLSVCLHEVAYWYILSIGAQTDFLSVFFSGYTFKHKMVYEDTLTLFPFSGETVFMSMENPGLWILGCHNSDFRNRGMTALLKVSSCDKNTGDYYEDSYEDISAYFDSKNNAIEPRSFSQNPPVLKRHQREITRTTLQSDQEEIDYDDTISVEMKKEDFDIYDEDENQSPRSFQKKTRHYFIAAVERLWDYGMSSSPHVLRNRAQSGSVPQFKKVVFQEFTDGSFTQPLYRGELNEHLGLLGPYIRAEVEDNIMVTFRNQASRPYSFYSSLISYEEDQRQGAEPRKNFVKPNETKTYFWKVQHHMAPTKDEFDCKAWAYFSDVDLEKDVHSGLIGPLLVCHTNTLNPAHGRQVTVQEFALFFTIFDETKSWYFTENMERNCRAPCNIQMEDPTFKENYRFHAINGYIKDTLPGLVMAQDQRIRWYLLSMGSNENIHSIHFSGHVFTVRKKEEYKMALYNLYPGVFETVEMLPSKAGIWRVECLIGEHLHAGMSTLFLVYSNKCQNPLGMASGHIRDFQITASGQYGQWAPKLARLHYSGSINAWSTKEPASWIKVDLLAPMIIHGIKTQGARQKFSSLYISQFIIMYSLDGKKWQTYRGNSTGTDMVFFGNVDSSGIKHNIFNPPIIARYIRLHPTHYSIRSTLRMELMGCDLNSCSMPLGMESKAISDAQITASSYFTNMFATWSPSKARLHLQGRSNAWRPQVNNPKEWLQVDFQKTMKVTGVTTQGVKSLDTSMYVKEFLISSSQDGHQWTLFFQNGKVKVFQGNQDSFTPVVNSLDPPLLTRYLRIHPQSWEHQIALRMEVLGCEAQDLY

SEQ ID NO: 835 - DNA, 4371 bp, synthetic construct
  misc_feature 1..4371: note = Variant of human B-domain deleted Factor VIII
  source 1..4371: mol_type = other DNA
atgcagattgaactgtctacctgcttcttcctctgtttgctgaggttctgctttagcgccactagacggtactaccttggcgctgtggagctgtcctgggactatatgcagagtgatttgggagagcttcccgtcgacgcacgatttcctcctcgcgttccaaagtcatttccctttaacacaagcgtggtgtacaagaagacgctcttcgtcgaattcaccgatcacctgttcaatatcgccaaacccagaccaccatggatgggtcttttggggcctaccatacaagcggaggtgtatgacacagttgttatcactctcaagaacatggcttctcatccggtaagtcttcacgcagtgggcgtgtcctactggaaagcttcagaaggagccgagtatgatgatcagacatcccagagggagaaagaagacgacaaggtatttccaggtgggtctcatacctatgtgtggcaagtgctcaaagagaatggccctatggcaagcgatccgccgtgtttgacttacagctacctttcacacgttgacctcgtcaaggacctcaactccgggttgattggagccttgttggtatgcagggaaggatctcttgccaaagagaagacacagaccctccacaagtttatccttctctttgctgtgttcgatgagggcaaaagttggcatagcgaaacgaagaattccctcatgcaggatcgcgacgcagccagcgccagagcttggcccaagatgcacactgtgaacggatatgtcaataggacgcttcctggcttgattgggtgtcatcggaaaagtgtctactggcacgtgatcggaatggggacaacaccagaggtccactccatatttctcgaaggccataccttccttgttcgaaaccacagacaggcatccttggagatctctcccattacctttctcactgcccaaacgctccttatggacttgggtcagttccttctcttttgccatatctcgtcacaccagcatgatggtatggaagcttatgtgaaagtcgacagttgtcctgaggagccacagttgcgcatgaagaataatgaagaagccgaggattacgacgacgatctcaccgattctgagatggacgtggtgaggtttgatgacgacaactctccctccaccattcaagctcggagcgtggcgaagaaacaccccaagacttgggtccactatatagcggcggaagaggaggattgggattacgctcctcttgtattggcaccagatgaccgctcatacaaaagccagtacctcaacaacggaccgcagagaattggccggaagtataagaaagtgcgatttatggcctatacagacgaaacctttaagacaagggaggccatccagcatgagagtgggattttgggacctcttctttacggcgaagttggtgataccctcctcatcatcttcaagaatcaagcttctcgcccctataacatttacccacacgggatcactgacgttaggcctttgtatagcagaagacttcccaaaggcgtgaagcatctcaaagacttccccattttgccaggcgagatctttaagtacaaatggaccgtcacagtggaagatggaccgactaaatcagaccctcgatgccttacgcggtactattcctccttcgtgaatatggagagagatttggcaagcggactcataggaccactcctcatctgttacaaggaatctgtagaccagaggggtaaccagattatgagtgataaacgcaatgtgatcctttttagcgtcttcgacgagaaccggtcctggtacttgaccgagaatatacaaaggttccttcccaaccccgcaggcgttcagttggaagaccctgagtttcaggccagcaatattatgcactcaatcaacggctatgtgtttgatagtctccagctttctgtttgcctccatgaagtagcctattggtacatcttgtcaattggtgctcaaacagacttcctctccgtcttcttctccggctacacctttaagcacaagatggtgtatgaggacactctcacactctttccattttctggagaaaccgtgttcatgagcatggagaatccaggcctttggatcttgggttgccacaacagtgattttcgcaatcggggaatgactgctctcctcaaagtcagcagctgtgataagaacacaggcgactattacgaagattcttacgaggacataagtgcctacttggactccaagaataacgccccggagcccagatcattctcccagaatcctcccgtgcttaaaaggcatcagcgcgaaatcaccagaactactcttcagtctgatcaagaggagattgactatgacgacaccataagcgtggaaatgaagaaggaggatttcgatatctatgacgaagatgagaaccagtctccgcggagctttcagaagaagacgcgacactacttcattgcagcagtcgaaaggctttgggactacggtatgtcatcatcccctcatgtgttgcgcaatagagctcagagtggaagtgttccacagttcaagaaagtcgtctttcaagagtttacagatggcagcttcacacagcctctctatcggggcgagcttaacgaacatttgggactccttggtccctatatccgagccgaagtggaggacaacattatggttacctttaggaatcaagcctctcgcccctacagcttctactcctccctcatcagttatgaggaggatcagagacaaggcgctgaaccacggaagaactttgtgaaaccgaatgagacgaagacctacttctggaaagtacagcaccacatggcccccacaaaagacgaattcgattgcaaagcatgggcgtatttttcagacgttgacttggagaaagatgtacattcaggacttattggtcctttgttggtgtgtcacactaacactctcaatccagcccatggcaggcaggtgacagtccaggaattcgctcttttctttaccatctttgatgagaccaagtcctggtacttcacggaaaacatggagcgcaattgcagagccccctgtaacatacagatggaggaccctacctttaaggaaaattatcggttccacgcaatcaacggatacattcgtgatacactccctggccttgtgatggctcaggaccaacgaatcaggtggtacctcctcagcatgggttctaatgagaacatacactccattcacttttcaggacatgtgttcactgtccggaagaaagaagagtataagatggccctctacaatttgtatccaggcgtgtttgagaccgttgaaatgcttccctctaaagctggcatctggagagtagagtgcttgatcggagaacatcttcacgcaggtatgagcaccttgttcctcgtgtacagcaacaaatgtcagaccccacttggcatggccagtggacacattcgcgactttcagatcacagcatctggccagtatggacaatgggccccaaagttggctcgcctccattactccggtagcataaatgcgtggtccactaaagaacctttcagctggattaaggtcgatcttcttgcccccatgatcatccacggcattaagacacagggagcgaggcagaaattctcctccctgtacatctcacagttcattattatgtatagtttggacggcaagaagtggcaaacttatagaggtaacagtactggaacagacatggtgttcttcggcaacgttgatagctctggcatcaaacacaacatctttaatcctcccataatagctcggtacatcagattgcatccgacccactacagcattaggagtacactccgaatggagcttatgggttgcgacttgaattcctgttcaatgccactcggaatggagtctaaagccatctctgatgcacagataaccgccagtagctactttacgaacatgtttgctacgtggtcaccctctaaggcaaggcttcatttgcaaggccggtctaatgcctggagacctcaggtgaacaacccgaaagaatggctccaggtggactttcagaagaccatgaaagtaacaggtgtcactactcagggagttaagtccttggatactagcatgtatgtgaaggagttccttatttcctcatcacaagatggccaccagtggaccctcttctttcagaatggtaaggtcaaagtgtttcagggcaatcaagacagcttcacacccgtggtgaacagtcttgatcctccactcttgacacgataccttcgaatccatccacagtcttgggagcaccagattgcattgcgcatggaagtacttggatgcgaggctcaggacctctac

SEQ ID NO: 836 - protein, 1457 aa, synthetic construct
  REGION 1..1457: note = Variant of human B-domain deleted Factor VIII
MQIELSTCFFLCLLRFCFSATRRYYLGAVELSWDYMQSDLGELPVDARFPPRVPKSFPFNTSVVYKKTLFVEFTDHLFNIAKPRPPWMGLLGPTIQAEVYDTVVITLKNMASHPVSLHAVGVSYWKASEGAEYDDQTSQREKEDDKVFPGGSHTYVWQVLKENGPMASDPPCLTYSYLSHVDLVKDLNSGLIGALLVCREGSLAKEKTQTLHKFILLFAVFDEGKSWHSETKNSLMQDRDAASARAWPKMHTVNGYVNRTLPGLIGCHRKSVYWHVIGMGTTPEVHSIFLEGHTFLVRNHRQASLEISPITFLTAQTLLMDLGQFLLFCHISSHQHDGMEAYVKVDSCPEEPQLRMKNNEEAEDYDDDLTDSEMDVVRFDDDNSPSTIQARSVAKKHPKTWVHYIAAEEEDWDYAPLVLAPDDRSYKSQYLNNGPQRIGRKYKKVRFMAYTDETFKTREAIQHESGILGPLLYGEVGDTLLIIFKNQASRPYNIYPHGITDVRPLYSRRLPKGVKHLKDFPILPGEIFKYKWTVTVEDGPTKSDPRCLTRYYSSFVNMERDLASGLIGPLLICYKESVDQRGNQIMSDKRNVILFSVFDENRSWYLTENIQRFLPNPAGVQLEDPEFQASNIMHSINGYVFDSLQLSVCLHEVAYWYILSIGAQTDFLSVFFSGYTFKHKMVYEDTLTLFPFSGETVFMSMENPGLWILGCHNSDFRNRGMTALLKVSSCDKNTGDYYEDSYEDISAYLDSKNNAPEPRSFSQNPPVLKRHQREITRTTLQSDQEEIDYDDTISVEMKKEDFDIYDEDENQSPRSFQKKTRHYFIAAVERLWDYGMSSSPHVLRNRAQSGSVPQFKKVVFQEFTDGSFTQPLYRGELNEHLGLLGPYIRAEVEDNIMVTFRNQASRPYSFYSSLISYEEDQRQGAEPRKNFVKPNETKTYFWKVQHHMAPTKDEFDCKAWAYFSDVDLEKDVHSGLIGPLLVCHTNTLNPAHGRQVTVQEFALFFTIFDETKSWYFTENMERNCRAPCNIQMEDPTFKENYRFHAINGYIRDTLPGLVMAQDQRIRWYLLSMGSNENIHSIHFSGHVFTVRKKEEYKMALYNLYPGVFETVEMLPSKAGIWRVECLIGEHLHAGMSTLFLVYSNKCQTPLGMASGHIRDFQITASGQYGQWAPKLARLHYSGSINAWSTKEPFSWIKVDLLAPMIIHGIKTQGARQKFSSLYISQFIIMYSLDGKKWQTYRGNSTGTDMVFFGNVDSSGIKHNIFNPPIIARYIRLHPTHYSIRSTLRMELMGCDLNSCSMPLGMESKAISDAQITASSYFTNMFATWSPSKARLHLQGRSNAWRPQVNNPKEWLQVDFQKTMKVTGVTTQGVKSLDTSMYVKEFLISSSQDGHQWTLFFQNGKVKVFQGNQDSFTPVVNSLDPPLLTRYLRIHPQSWEHQIALRMEVLGCEAQDLY

SEQ ID NO: 837 - DNA, 4371 bp, synthetic construct
  misc_feature 1..4371: note = Variant of human B-domain deleted Factor VIII
  source 1..4371: mol_type = other DNA
atgcagattgaactgtctacctgcttcttcctctgtttgctgaggttctgctttagcgccactagacggtactaccttggcgctgtggagctgtcctgggactatatgcagagtgatttgggagagcttcccgtcgacgcacgatttcctcctcgcgttccaaagtcatttccctttaacacaagcgtggtgtacaagaagacgctcttcgtcgaattcaccgatcacctgttcaatatcgccaaacccagaccaccatggatgggtcttttggggcctaccatacaagcggaggtgtatgacacagttgttatcactctcaagaacatggcttctcatccggtaagtcttcacgcagtgggcgtgtcctactggaaagcttcagaaggagccgagtatgatgatcagacatcccagagggagaaagaagacgacaaggtatttccaggtgggtctcatacctatgtgtggcaagtgctcaaagagaatggccctatggcaagcgatccgccgtgtttgacttacagctacctttcacacgttgacctcgtcaaggacctcaactccgggttgattggagccttgttggtatgcagggaaggatctcttgccaaagagaagacacagaccctccacaagtttatccttctctttgctgtgttcgatgagggcaaaagttggcatagcgaaacgaagaattccctcatgcaggatcgcgacgcagccagcgccagagcttggcccaagatgcacactgtgaacggatatgtcaataggacgcttcctggcttgattgggtgtcatcggaaaagtgtctactggcacgtgatcggaatggggacaacaccagaggtccactccatatttctcgaaggccataccttccttgttcgaaaccacagacaggcatccttggggatctctcccattacctttctcactgcccaaacgctccttatggacttgggtcagttccttctcttctgccatatcagctcacaccagcatgatggtatggaagcttatgtgaaagtcgacagttgtcctgaggagccacagttgcgcatgaagaataatgaagaagccgaggattacgacgacgatctcaccgattctgagatggacgtggtgaggtttgatgacgacaactctccctccatcattcaagctcggagcgtggcgaagaaacaccccaagacttgggtccactatatagcggcggaagaggaggattgggattacgctcctcttgtattggcaccagatgaccgctcatacaaaagccagtacctcaacaacggaccgcagagaattggccggaagtataagaaagtgcgatttatggcctatacagacgaaacctttaagacaagggaggccatccagcatgagagtgggattttgggacctcttctttacggcgaagttggtgataccctcctcatcatcttcaagaatcaagcttctcgcccctataacatttacccacacgggatcactgacgttaggcctttgtatagcagaagacttcccaaaggcgtgaagcatctcaaagacttccccattttgccaggcgagatctttaagtacaaatggaccgtcacagtggaagatggaccgactaaatcagaccctcgatgccttacgcggtactattcctccttcgtgaatatggagagagatttggcaagcggactcataggaccactcctcatctgttacaaggaatctgtagaccagaggggtaaccagattatgagtgataaacgcaatgtgatcctttttagcgtcttcgacgagaaccggtcctggtacttgaccgagaatatacaaaggttccttcccaaccccgcaggcgttcagttggaagaccctgagtttcaggccagcaatattatgcactcaatcaacggctatgtgtttgatagtctccagctttctgtttgcctccatgaagtagcctattggtacatcttgtcaattggtgctcaaacagacttcctctccgtcttcttctccggctacacctttaagcacaagatggtgtatgaggacactctcacactctttccattttctggagaaaccgtgttcatgagcatggagaatccaggcctttggatcttgggttgccacaacagtgattttcgcaatcggggaatgactgctctcctcaaagtcagcagctgtgataagaacacaggcgactattacgaagattcttacgaggacataagtgcctacctggactccaagaataacgccattgagcccagatcattctcccagaatcctcccgtgcttaaaaggcatcagcgcgaaatcaccagaactactcttcagtctgatcaagaggagattgactatgacgacaccataagcgtggaaatgaagaaggaggatttcgatatctatgacgaagatgagaaccagtctccgcggagctttcagaagaagacgcgacactacttcattgcagcagtcgaaaggctttgggactacggtatgtcatcatcccctcatgtgttgcgcaatagagctcagagtggaagtgttccacagttcaagaaagtcgtctttcaagagtttacagatggcagcttcacacagcctctctatcggggcgagcttaacgaacatttgggactccttggtccctatatccgagccgaagtggaggacaacattatggttacctttaggaatcaagcctctcgcccctacagcttctactcctccctcatcagttatgaggaggatcagagacaaggcgctgaaccacggaagaactttgtgaaaccgaatgagacgaagacctacttctggaaagtacagcaccacatggcccccacaaaagacgaattcgattgcaaagcatgggcgtatttttcagacgttgacttggagaaagatgtacattcaggacttattggtcctttgttggtgtgtcacactaacactctcaatccagcccatggcaggcaggtgacagtccaggaattcgctcttttctttaccatctttgatgagaccaagtcctggtacttcacggaaaacatggagcgcaattgcagagccccctgtaacatacagatggaggaccctacctttaaggaaaattatcggttccacgcaatcaacggatacattcgtgatacactccctggccttgtgatggctcaggaccaacgaatcaggtggtacctcctcagcatgggttctaatgagaacatacactccattcacttttcaggacatgtgttcactgtccggaagaaagaagagtataagatggccctctacaatttgtatccaggcgtgtttgagaccgttgaaatgcttccctctaaagctggcatctggagagtagagtgcttgatcggagaacatcttcacgcaggtatgagcaccttgttcctcgtgtacagcaacaaatgtcagaccccacttggcatggccagtggacacattcgcgactttcagatcacagcatctggccagtatggacaatgggccccaaagttggctcgcctccattactccggtagcataaatgcgtggtccactaaagaacctttcagctggattaaggtcgatcttcttgcccccatgatcatccacggcattaagacacagggagcgaggcagaaattctcctccctctacatctcacagttcattattatgtatagtttggacggcaagaagtggcaaacttatagaggtaacagtactggaacagacatggtgttcttcggcaacgttgatagctctggcatcaaacacaacatctttaatcctcccataatagctcggtacatcagattgcatccgacccactacagcattaggagtacactccgaatggagcttatgggttgcgacttgaattcctgttcaatgccactcggaatggagtctaaagccatctctgatgcacagataaccgccagtagctactttacgaacatgtttgctacgtggtcaccctctaaggcaaggcttcatttgcaaggccggtctaatgcctggagacctcaggtgaacaacccgaaagaatggctccaggtggactttcagaagaccatgaaagtaacaggtgtcactactcagggagttaagtccttggatactagcatgtatgtgaaggagttccttatttcctcatcacaagatggccaccagtggaccctcttctttcagaatggtaaggtcaaagtgtttcagggcaatcaagacagcttcacacccgtggtgaacagtcttgatcctccactcttgacacgataccttcgaatccatccacagtcttgggagcaccagattgcattgcgcatggaagtacttggatgcgaggctcaggacctctac

SEQ ID NO: 838 - protein, 1457 aa, synthetic construct
  REGION 1..1457: note = Variant of human B-domain deleted Factor VIII
MQIELSTCFFLCLLRFCFSATRRYYLGAVELSWDYMQSDLGELPVDARFPPRVPKSFPFNTSVVYKKTLFVEFTDHLFNIAKPRPPWMGLLGPTIQAEVYDTVVITLKNMASHPVSLHAVGVSYWKASEGAEYDDQTSQREKEDDKVFPGGSHTYVWQVLKENGPMASDPPCLTYSYLSHVDLVKDLNSGLIGALLVCREGSLAKEKTQTLHKFILLFAVFDEGKSWHSETKNSLMQDRDAASARAWPKMHTVNGYVNRTLPGLIGCHRKSVYWHVIGMGTTPEVHSIFLEGHTFLVRNHRQASLGISPITFLTAQTLLMDLGQFLLFCHISSHQHDGMEAYVKVDSCPEEPQLRMKNNEEAEDYDDDLTDSEMDVVRFDDDNSPSIIQARSVAKKHPKTWVHYIAAEEEDWDYAPLVLAPDDRSYKSQYLNNGPQRIGRKYKKVRFMAYTDETFKTREAIQHESGILGPLLYGEVGDTLLIIFKNQASRPYNIYPHGITDVRPLYSRRLPKGVKHLKDFPILPGEIFKYKWTVTVEDGPTKSDPRCLTRYYSSFVNMERDLASGLIGPLLICYKESVDQRGNQIMSDKRNVILFSVFDENRSWYLTENIQRFLPNPAGVQLEDPEFQASNIMHSINGYVFDSLQLSVCLHEVAYWYILSIGAQTDFLSVFFSGYTFKHKMVYEDTLTLFPFSGETVFMSMENPGLWILGCHNSDFRNRGMTALLKVSSCDKNTGDYYEDSYEDISAYLDSKNNAIEPRSFSQNPPVLKRHQREITRTTLQSDQEEIDYDDTISVEMKKEDFDIYDEDENQSPRSFQKKTRHYFIAAVERLWDYGMSSSPHVLRNRAQSGSVPQFKKVVFQEFTDGSFTQPLYRGELNEHLGLLGPYIRAEVEDNIMVTFRNQASRPYSFYSSLISYEEDQRQGAEPRKNFVKPNETKTYFWKVQHHMAPTKDEFDCKAWAYFSDVDLEKDVHSGLIGPLLVCHTNTLNPAHGRQVTVQEFALFFTIFDETKSWYFTENMERNCRAPCNIQMEDPTFKENYRFHAINGYIRDTLPGLVMAQDQRIRWYLLSMGSNENIHSIHFSGHVFTVRKKEEYKMALYNLYPGVFETVEMLPSKAGIWRVECLIGEHLHAGMSTLFLVYSNKCQTPLGMASGHIRDFQITASGQYGQWAPKLARLHYSGSINAWSTKEPFSWIKVDLLAPMIIHGIKTQGARQKFSSLYISQFIIMYSLDGKKWQTYRGNSTGTDMVFFGNVDSSGIKHNIFNPPIIARYIRLHPTHYSIRSTLRMELMGCDLNSCSMPLGMESKAISDAQITASSYFTNMFATWSPSKARLHLQGRSNAWRPQVNNPKEWLQVDFQKTMKVTGVTTQGVKSLDTSMYVKEFLISSSQDGHQWTLFFQNGKVKVFQGNQDSFTPVVNSLDPPLLTRYLRIHPQSWEHQIALRMEVLGCEAQDLY

SEQ ID NO: 839 - DNA, 4371 bp, synthetic construct
  misc_feature 1..4371: note = Variant of human B-domain deleted Factor VIII
  source 1..4371: mol_type = other DNA
atgcagattgaactgtctacctgcttcttcctctgtttgctgaggttctgctttagcgccactagacggtactaccttggcgctgtggagctgtcctgggactatatgcagagtgatttgggagagcttcccgtcgacgcacgatttcctcctcgcgttccaaagtcatttccctttaacacaagcgtggtgtacaagaagacgctcttcgtcgaattcaccgatcacctgttcaatatcgccaaacccagaccaccatggatgggtcttttggggcctaccatacaagcggaggtgtatgacacagttgttatcactctcaagaacatggcttctcatccggtaagtcttcacgcagtgggcgtgtcctactggaaagcttcagaaggagccgagtatgatgatcagacatcccagagggagaaagaagacgacaaggtatttccaggtgggtctcatacctatgtgtggcaagtgctcaaagagaatggccctatggcaagcgatccgccgtgtttgacttacagctacctttcacacgttgacctcgtcaaggacctcaactccgggttgattggagccttgttggtatgcagggaaggatctcttgccaaagagaagacacagaccctccacaagtttatccttctctttgctgtgttcgatgagggcaaaagttggcatagcgaaacgaagaattccctcatgcaggatcgcgacgcagccagcgccagagcttggcccaagatgcacactgtgaacggatatgtcaataggacgcttcctggcttgattgggtgtcatcggaaaagtgtctactggcacgtgatcggaatggggacaacaccagaggtccactccatatttctcgaaggccataccttccttgttcgaaaccacagacaggcatccttggggatctctcccattacctttctcactgcccaaacgctccttatggacttgggtcagttccttctcttttgccatatcccgtcacaccagcatgatggtatggaagcttatgtgaaagtcgacagttgtcctgaggagccacagttgcgcatgaagaataatgaagaagccgaggattacgacgacgatctcaccgattctgagatggacgtggtgaggtttgatgacgacaactctccctccatcattcaagctcggagcgtggcgaagaaacaccccaagacttgggtccactatatagcggcggaagaggaggattgggattacgctcctcttgtattggcaccagatgaccgctcatacaaaagccagtacctcaacaacggaccgcagagaattggccggaagtataagaaagtgcgatttatggcctatacagacgaaacctttaagacaagggaggccatccagcatgagagtgggattttgggacctcttctttacggcgaagttggtgataccctcctcatcatcttcaagaatcaagcttctcgcccctataacatttacccacacgggatcactgacgttaggcctttgtatagcagaagacttcccaaaggcgtgaagcatctcaaagacttccccattttgccaggcgagatctttaagtacaaatggaccgtcacagtggaagatggaccgactaaatcagaccctcgatgccttacgcggtactattcctccttcgtgaatatggagagagatttggcaagcggactcataggaccactcctcatctgttacaaggaatctgtagaccagaggggtaaccagattatgagtgataaacgcaatgtgatcctttttagcgtcttcgacgagaaccggtcctggtacttgaccgagaatatacaaaggttccttcccaaccccgcaggcgttcagttggaagaccctgagtttcaggccagcaatattatgcactcaatcaacggctatgtgtttgatagtctccagctttctgtttgcctccatgaagtagcctattggtacatcttgtcaattggtgctcaaacagacttcctctccgtcttcttctccggctacacctttaagcacaagatggtgtatgaggacactctcacactctttccattttctggagaaaccgtgttcatgagcatggagaatccaggcctttggatcttgggttgccacaacagtgattttcgcaatcggggaatgactgctctcctcaaagtcagcagctgtgataagaacacaggcgactattacgaagattcttacgaggacataagtgcctactttgactccaagaataacgccattgagcccagatcattctcccagaatcctcccgtgcttaaaaggcatcagcgcgaaatcaccagaactactcttcagtctgatcaagaggagattgactatgacgacaccataagcgtggaaatgaagaaggaggatttcgatatctatgacgaagatgagaaccagtctccgcggagctttcagaagaagacgcgacactacttcattgcagcagtcgaaaggctttgggactacggtatgtcatcatcccctcatgtgttgcgcaatagagctcagagtggaagtgttccacagttcaagaaagtcgtctttcaagagtttacagatggcagcttcacacagcctctctatcggggcgagcttaacgaacatttgggactccttggtccctatatccgagccgaagtggaggacaacattatggttacctttaggaatcaagcctctcgcccctacagcttctactcctccctcatcagttatgaggaggatcagagacaaggcgctgaaccacggaagaactttgtgaaaccgaatgagacgaagacctacttctggaaagtacagcaccacatggcccccacaaaagacgaattcgattgcaaagcatgggcgtatttttcagacgttgacttggagaaagatgtacattcaggacttattggtcctttgttggtgtgtcacactaacactctcaatccagcccatggcaggcaggtgacagtccaggaattcgctcttttctttaccatctttgatgagaccaagtcctggtacttcacggaaaacatggagcgcaattgcagagccccctgtaacatacagatggaggaccctacctttaaggaaaattatcggttccacgcaatcaacggatacattatggatacactccctggccttgtgatggctcaggaccaacgaatcaggtggtacctcctcagcatgggttctaatgagaacatacactccattcacttttcaggacatgtgttcactgtccggaagaaagaagagtataagatggccctctacaatttgtatccaggcgtgtttgagaccgttgaaatgcttccctctaaagctggcatctggagagtagagtgcttgatcggagaacatcttcacgcaggtatgagcaccttgttcctcgtgtacagcaacaaatgtcagaccccacttggcatggccagtggacacattcgcgactttcagatcacagcatctggccagtatggacaatgggccccaaagttggctcgcctccattactccggtagcataaatgcgtggtccactaaagaacctttcagctggattaaggtcgatcttcttgcccccatgatcatccacggcattaagacacagggagcgaggcagaaattctcctccctctacatctcacagttcattattatgtatagtttggacggcaagaagtggcaaacttatagaggtaacagtactggaacagacatggtgttcttcggcaacgttgatagctctggcatcaaacacaacatctttaatcctcccataatagctcggtacatcagattgcatccgacccactacagcattaggagtacactccgaatggagcttatgggttgcgacttgaattcctgttcaatgccactcggaatggagtctaaagccatctctgatgcacagataaccgccagtagctactttacgaacatgtttgctacgtggtcaccctctaaggcaaggcttcatttgcaaggccggtctaatgcctggagacctcaggtgaacaacccgaaagaatggctccaggtggactttcagaagaccatgaaagtaacaggtgtcactactcagggagttaagtccttggatactagcatgtatgtgaaggagttccttatttcctcatcacaagatggccaccagtggaccctcttctttcagaatggtaaggtcaaagtgtttcagggcaatcaagacagcttcacacccgtggtgaacagtcttgatcctccactcttgacacgataccttcgaatccatccacagtcttgggagcaccagattgcattgcgcatggaagtacttggatgcgaggctcaggacctctac

SEQ ID NO: 840 - protein, 1457 aa, synthetic construct
  REGION 1..1457: note = Variant of human B-domain deleted Factor VIII
MQIELSTCFFLCLLRFCFSATRRYYLGAVELSWDYMQSDLGELPVDARFPPRVPKSFPFNTSVVYKKTLFVEFTDHLFNIAKPRPPWMGLLGPTIQAEVYDTVVITLKNMASHPVSLHAVGVSYWKASEGAEYDDQTSQREKEDDKVFPGGSHTYVWQVLKENGPMASDPPCLTYSYLSHVDLVKDLNSGLIGALLVCREGSLAKEKTQTLHKFILLFAVFDEGKSWHSETKNSLMQDRDAASARAWPKMHTVNGYVNRTLPGLIGCHRKSVYWHVIGMGTTPEVHSIFLEGHTFLVRNHRQASLGISPITFLTAQTLLMDLGQFLLFCHIPSHQHDGMEAYVKVDSCPEEPQLRMKNNEEAEDYDDDLTDSEMDVVRFDDDNSPSIIQARSVAKKHPKTWVHYIAAEEEDWDYAPLVLAPDDRSYKSQYLNNGPQRIGRKYKKVRFMAYTDETFKTREAIQHESGILGPLLYGEVGDTLLIIFKNQASRPYNIYPHGITDVRPLYSRRLPKGVKHLKDFPILPGEIFKYKWTVTVEDGPTKSDPRCLTRYYSSFVNMERDLASGLIGPLLICYKESVDQRGNQIMSDKRNVILFSVFDENRSWYLTENIQRFLPNPAGVQLEDPEFQASNIMHSINGYVFDSLQLSVCLHEVAYWYILSIGAQTDFLSVFFSGYTFKHKMVYEDTLTLFPFSGETVFMSMENPGLWILGCHNSDFRNRGMTALLKVSSCDKNTGDYYEDSYEDISAYFDSKNNAIEPRSFSQNPPVLKRHQREITRTTLQSDQEEIDYDDTISVEMKKEDFDIYDEDENQSPRSFQKKTRHYFIAAVERLWDYGMSSSPHVLRNRAQSGSVPQFKKVVFQEFTDGSFTQPLYRGELNEHLGLLGPYIRAEVEDNIMVTFRNQASRPYSFYSSLISYEEDQRQGAEPRKNFVKPNETKTYFWKVQHHMAPTKDEFDCKAWAYFSDVDLEKDVHSGLIGPLLVCHTNTLNPAHGRQVTVQEFALFFTIFDETKSWYFTENMERNCRAPCNIQMEDPTFKENYRFHAINGYIMDTLPGLVMAQDQRIRWYLLSMGSNENIHSIHFSGHVFTVRKKEEYKMALYNLYPGVFETVEMLPSKAGIWRVECLIGEHLHAGMSTLFLVYSNKCQTPLGMASGHIRDFQITASGQYGQWAPKLARLHYSGSINAWSTKEPFSWIKVDLLAPMIIHGIKTQGARQKFSSLYISQFIIMYSLDGKKWQTYRGNSTGTDMVFFGNVDSSGIKHNIFNPPIIARYIRLHPTHYSIRSTLRMELMGCDLNSCSMPLGMESKAISDAQITASSYFTNMFATWSPSKARLHLQGRSNAWRPQVNNPKEWLQVDFQKTMKVTGVTTQGVKSLDTSMYVKEFLISSSQDGHQWTLFFQNGKVKVFQGNQDSFTPVVNSLDPPLLTRYLRIHPQSWEHQIALRMEVLGCEAQDLY

SEQ ID NO: 841 - DNA, 4371 bp, synthetic construct
  misc_feature 1..4371: note = Variant of human B-domain deleted Factor VIII
  source 1..4371: mol_type = other DNA
atgcagattgaactgtctacctgcttcttcctctgtttgctgaggttctgctttagcgccactagacggtactaccttggcgctgtggagctgtcctgggactatatgcagagtgatttgggagagcttcccgtcgacgcacgatttcctcctcgcgttccaaagtcatttccctttaacacaagcgtggtgtacaagaagacgctcttcgtcgaattcaccgatcacctgttcaatatcgccaaacccagaccaccatggatgggtcttttggggcctaccatacaagcggaggtgtatgacacagttgttatcactctcaagaacatggcttctcatccggtaagtcttcacgcagtgggcgtgtcctactggaaagcttcagaaggagccgagtatgatgatcagacatcccagagggagaaagaagacgacaaggtatttccaggtgggtctcatacctatgtgtggcaagtgctcaaagagaatggccctatggcaagcgatccgccgtgtttgacttacagctacctttcacacgttgacctcgtcaaggacctcaactccgggttgattggagccttgttggtatgcagggaaggatctcttgccaaagagaagacacagaccctccacaagtttatccttctctttgctgtgttcgatgagggcaaaagttggcatagcgaaacgaagaattccctcatgcaggatcgcgacgcagccagcgccagagcttggcccaagatgcacactgtgaacggatatgtcaataggacgcttcctggcttgattgggtgtcatcggaaaagtgtctactggcacgtgatcggaatggggacaacaccagaggtccactccatatttctcgaaggccataccttccttgttcgaaaccacagacaggcatccttggggatctctcccattacctttctcactgcccaaacgctccttatggacttgggtcagttccttctcttctgccatatcagctcacaccagcatgatggtatggaagcttatgtgaaagtcgacagttgtcctgaggagccacagttgcgcatgaagaataatgaagaagccgaggattacgacgacgatctcaccgattctgagatggacgtggtgaggtttgatgacgacaactctccctcccgcattcaagctcggagcgtggcgaagaaacaccccaagacttgggtccactatatagcggcggaagaggaggattgggattacgctcctcttgtattggcaccagatgaccgctcatacaaaagccagtacctcaacaacggaccgcagagaattggccggaagtataagaaagtgcgatttatggcctatacagacgaaacctttaagacaagggaggccatccagcatgagagtgggattttgggacctcttctttacggcgaagttggtgataccctcctcatcatcttcaagaatcaagcttctcgcccctataacatttacccacacgggatcactgacgttaggcctttgtatagcagaagacttcccaaaggcgtgaagcatctcaaagacttccccattttgccaggcgagatctttaagtacaaatggaccgtcacagtggaagatggaccgactaaatcagaccctcgatgccttacgcggtactattcctccttcgtgaatatggagagagatttggcaagcggactcataggaccactcctcatctgttacaaggaatctgtagaccagaggggtaaccagattatgagtgataaacgcaatgtgatcctttttagcgtcttcgacgagaaccggtcctggtacttgaccgagaatatacaaaggttccttcccaaccccgcaggcgttcagttggaagaccctgagtttcaggccagcaatattatgcactcaatcaacggctatgtgtttgatagtctccagctttctgtttgcctccatgaagtagcctattggtacatcttgtcaattggtgctcaaacagacttcctctccgtcttcttctccggctacacctttaagcacaagatggtgtatgaggacactctcacactctttccattttctggagaaaccgtgttcatgagcatggagaatccaggcctttggatcttgggttgccacaacagtgattttcgcaatcggggaatgactgctctcctcaaagtcagcagctgtgataagaacacaggcgactattacgaagattcttacgaggacataagtgcctacctggactccaagaataacgccattgagcccagatcattctcccagaatcctcccgtgcttaaaaggcatcagcgcgaaatcaccagaactactcttcagtctgatcaagaggagattgactatgacgacaccataagcgtggaaatgaagaaggaggatttcgatatctatgacgaagatgagaaccagtctccgcggagctttcagaagaagacgcgacactacttcattgcagcagtcgaaaggctttgggactacggtatgtcatcatcccctcatgtgttgcgcaatagagctcagagtggaagtgttccacagttcaagaaagtcgtctttcaagagtttacagatggcagcttcacacagcctctctatcggggcgagcttaacgaacatttgggactccttggtccctatatccgagccgaagtggaggacaacattatggttacctttaggaatcaagcctctcgcccctacagcttctactcctccctcatcagttatgaggaggatcagagacaaggcgctgaaccacggaagaactttgtgaaaccgaatgagacgaagacctacttctggaaagtacagcaccacatggcccccacaaaagacgaattcgattgcaaagcatgggcgtatttttcagacgttgacttggagaaagatgtacattcaggacttattggtcctttgttggtgtgtcacactaacactctcaatccagcccatggcaggcaggtgacagtccaggaattcgctcttttctttaccatctttgatgagaccaagtcctggtacttcacggaaaacatggagcgcaattgcagagccccctgtaacatacagatggaggaccctacctttaaggaaaattatcggttccacgcaatcaacggatacattatggatacactccctggccttgtgatggctcaggaccaacgaatcaggtggtacctcctcagcatgggttctaatgagaacatacactccattcacttttcaggacatgtgttcactgtccggaagaaagaagagtataagatggccctctacaatttgtatccaggcgtgtttgagaccgttgaaatgcttccctctaaagctggcatctggagagtagagtgcttgatcggagaacatcttcacgcaggtatgagcaccttgttcctcgtgtacagcaacaaatgtcagaacccacttggcatggccagtggacacattcgcgactttcagatcacagcatctggccagtatggacaatgggccccaaagttggctcgcctccattactccggtagcataaatgcgtggtccactaaagaacctttcagctggattaaggtcgatcttcttgcccccatgatcatccacggcattaagacacagggagcgaggcagaaattctcctccctgtacatctcacagttcattattatgtatagtttggacggcaagaagtggcaaacttatagaggtaacagtactggaacagacatggtgttcttcggcaacgttgatagctctggcatcaaacacaacatctttaatcctcccataatagctcggtacatcagattgcatccgacccactacagcattaggagtacactccgaatggagcttatgggttgcgacttgaattcctgttcaatgccactcggaatggagtctaaagccatctctgatgcacagataaccgccagtagctactttacgaacatgtttgctacgtggtcaccctctaaggcaaggcttcatttgcaaggccggtctaatgcctggagacctcaggtgaacaacccgaaagaatggctccaggtggactttcagaagaccatgaaagtaacaggtgtcactactcagggagttaagtccttggatactagcatgtatgtgaaggagttccttatttcctcatcacaagatggccaccagtggaccctcttctttcagaatggtaaggtcaaagtgtttcagggcaatcaagacagcttcacacccgtggtgaacagtcttgatcctccactcttgacacgataccttcgaatccatccacagtcttgggagcaccagattgcattgcgcatggaagtacttggatgcgaggctcaggacctctac

SEQ ID NO: 842 - protein, 1457 aa, synthetic construct
  REGION 1..1457: note = Variant of human B-domain deleted Factor VIII
MQIELSTCFFLCLLRFCFSATRRYYLGAVELSWDYMQSDLGELPVDARFPPRVPKSFPFNTSVVYKKTLFVEFTDHLFNIAKPRPPWMGLLGPTIQAEVYDTVVITLKNMASHPVSLHAVGVSYWKASEGAEYDDQTSQREKEDDKVFPGGSHTYVWQVLKENGPMASDPPCLTYSYLSHVDLVKDLNSGLIGALLVCREGSLAKEKTQTLHKFILLFAVFDEGKSWHSETKNSLMQDRDAASARAWPKMHTVNGYVNRTLPGLIGCHRKSVYWHVIGMGTTPEVHSIFLEGHTFLVRNHRQASLGISPITFLTAQTLLMDLGQFLLFCHISSHQHDGMEAYVKVDSCPEEPQLRMKNNEEAEDYDDDLTDSEMDVVRFDDDNSPSRIQARSVAKKHPKTWVHYIAAEEEDWDYAPLVLAPDDRSYKSQYLNNGPQRIGRKYKKVRFMAYTDETFKTREAIQHESGILGPLLYGEVGDTLLIIFKNQASRPYNIYPHGITDVRPLYSRRLPKGVKHLKDFPILPGEIFKYKWTVTVEDGPTKSDPRCLTRYYSSFVNMERDLASGLIGPLLICYKESVDQRGNQIMSDKRNVILFSVFDENRSWYLTENIQRFLPNPAGVQLEDPEFQASNIMHSINGYVFDSLQLSVCLHEVAYWYILSIGAQTDFLSVFFSGYTFKHKMVYEDTLTLFPFSGETVFMSMENPGLWILGCHNSDFRNRGMTALLKVSSCDKNTGDYYEDSYEDISAYLDSKNNAIEPRSFSQNPPVLKRHQREITRTTLQSDQEEIDYDDTISVEMKKEDFDIYDEDENQSPRSFQKKTRHYFIAAVERLWDYGMSSSPHVLRNRAQSGSVPQFKKVVFQEFTDGSFTQPLYRGELNEHLGLLGPYIRAEVEDNIMVTFRNQASRPYSFYSSLISYEEDQRQGAEPRKNFVKPNETKTYFWKVQHHMAPTKDEFDCKAWAYFSDVDLEKDVHSGLIGPLLVCHTNTLNPAHGRQVTVQEFALFFTIFDETKSWYFTENMERNCRAPCNIQMEDPTFKENYRFHAINGYIMDTLPGLVMAQDQRIRWYLLSMGSNENIHSIHFSGHVFTVRKKEEYKMALYNLYPGVFETVEMLPSKAGIWRVECLIGEHLHAGMSTLFLVYSNKCQNPLGMASGHIRDFQITASGQYGQWAPKLARLHYSGSINAWSTKEPFSWIKVDLLAPMIIHGIKTQGARQKFSSLYISQFIIMYSLDGKKWQTYRGNSTGTDMVFFGNVDSSGIKHNIFNPPIIARYIRLHPTHYSIRSTLRMELMGCDLNSCSMPLGMESKAISDAQITASSYFTNMFATWSPSKARLHLQGRSNAWRPQVNNPKEWLQVDFQKTMKVTGVTTQGVKSLDTSMYVKEFLISSSQDGHQWTLFFQNGKVKVFQGNQDSFTPVVNSLDPPLLTRYLRIHPQSWEHQIALRMEVLGCEAQDLY

SEQ ID NO: 843 - DNA, 4371 bp, synthetic construct
  misc_feature 1..4371: note = Variant of human B-domain deleted Factor VIII
  source 1..4371: mol_type = other DNA
atgcagattgaactgtctacctgcttcttcctctgtttgctgaggttctgctttagcgccactagacggtactaccttggcgctgtggagctgtcctgggactatatgcagagtgatttgggagagcttcccgtcgacgcacgatttcctcctcgcgttccaaagtcatttccctttaacacaagcgtggtgtacaagaagacgctcttcgtcgaattcaccgatcacctgttcaatatcgccaaacccagaccaccatggatgggtcttttggggcctaccatacaagcggaggtgtatgacacagttgttatcactctcaagaacatggcttctcatccggtaagtcttcacgcagtgggcgtgtcctactggaaagcttcagaaggagccgagtatgatgatcagacatcccagagggagaaagaagacgacaaggtatttccaggtgggtctcatacctatgtgtggcaagtgctcaaagagaatggccctatggcaagcgatccgccgtgtttgacttacagctacctttcacacgttgacctcgtcaaggacctcaactccgggttgattggagccttgttggtatgcagggaaggatctcttgccaaagagaagacacagaccctccacaagtttatccttctctttgctgtgttcgatgagggcaaaagttggcatagcgaaacgaagaattccctcatgcaggatcgcgacgcagccagcgccagagcttggcccaagatgcacactgtgaacggatatgtcaataggacgcttcctggcttgattgggtgtcatcggaaaagtgtctactggcacgtgatcggaatggggacaacaccagaggtccactccatatttctcgaaggccataccttccttgttcgaaaccacagacaggcatccttggggatctctcccattacctttctcactgcccaaacgctccttatggacttgggtcagttccttctcagttgccatatcccgtcacaccagcatgatggtatggaagcttatgtgaaagtcgacagttgtcctgaggagccacagttgcgcatgaagaataatgaagaagccgaggattacgacgacgatctcaccgattctgagatggacgtggtgaggtttgatgacgacaactctccctccaccattcaagctcggagcgtggcgaagaaacaccccaagacttgggtccactatatagcggcggaagaggaggattgggattacgctcctcttgtattggcaccagatgaccgctcatacaaaagccagtacctcaacaacggaccgcagagaattggccggaagtataagaaagtgcgatttatggcctatacagacgaaacctttaagacaagggaggccatccagcatgagagtgggattttgggacctcttctttacggcgaagttggtgataccctcctcatcatcttcaagaatcaagcttctcgcccctataacatttacccacacgggatcactgacgttaggcctttgtatagcagaagacttcccaaaggcgtgaagcatctcaaagacttccccattttgccaggcgagatctttaagtacaaatggaccgtcacagtggaagatggaccgactaaatcagaccctcgatgccttacgcggtactattcctccttcgtgaatatggagagagatttggcaagcggactcataggaccactcctcatctgttacaaggaatctgtagaccagaggggtaaccagattatgagtgataaacgcaatgtgatcctttttagcgtcttcgacgagaaccggtcctggtacttgaccgagaatatacaaaggttccttcccaaccccgcaggcgttcagttggaagaccctgagtttcaggccagcaatattatgcactcaatcaacggctatgtgtttgatagtctccagctttctgtttgcctccatgaagtagcctattggtacatcttgtcaattggtgctcaaacagacttcctctccgtcttcttctccggctacacctttaagcacaagatggtgtatgaggacactctcacactctttccattttctggagaaaccgtgttcatgagcatggagaatccaggcctttggatcttgggttgccacaacagtgattttcgcaatcggggaatgactgctctcctcaaagtcagcagctgtgataagaacacaggcgactattacgaagattcttacgaggacataagtgcctactttgactccaagaataacgccattgagcccagatcattctcccagaatcctcccgtgcttaaaaggcatcagcgcgaaatcaccagaactactcttcagtctgatcaagaggagattgactatgacgacaccataagcgtggaaatgaagaaggaggatttcgatatctatgacgaagatgagaaccagtctccgcggagctttcagaagaagacgcgacactacttcattgcagcagtcgaaaggctttgggactacggtatgtcatcatcccctcatgtgttgcgcaatagagctcagagtggaagtgttccacagttcaagaaagtcgtctttcaagagtttacagatggcagcttcacacagcctctctatcggggcgagcttaacgaacatttgggactccttggtccctatatccgagccgaagtggaggacaacattatggttacctttaggaatcaagcctctcgcccctacagcttctactcctccctcatcagttatgaggaggatcagagacaaggcgctgaaccacggaagaactttgtgaaaccgaatgagacgaagacctacttctggaaagtacagcaccacatggcccccacaaaagacgaattcgattgcaaagcatgggcgtatttttcagacgttgacttggagaaagatgtacattcaggacttattggtcctttgttggtgtgtcacactaacactctcaatccagcccatggcaggcaggtgacagtccaggaattcgctcttttctttaccatctttgatgagaccaagtcctggtacttcacggaaaacatggagcgcaattgcagagccccctgtaacatacagatggaggaccctacctttaaggaaaattatcggttccacgcaatcaacggatacattcgtgatacactccctggccttgtgatggctcaggaccaacgaatcaggtggtacctcctcagcatgggttctaatgagaacatacactccattcacttttcaggacatgtgttcactgtccggaagaaagaagagtataagatggccctctacaatttgtatccaggcgtgtttgagaccgttgaaatgcttccctctaaagctggcatctggagagtagagtgcttgatcggagaacatcttcacgcaggtatgagcaccttgttcctcgtgtacagcaacaaatgtcagaacccacttggcatggccagtggacacattcgcgactttcagatcacagcatctggccagtatggacaatgggccccaaagttggctcgcctccattactccggtagcataaatgcgtggtccactaaagaacctgccagctggattaaggtcgatcttcttgcccccatgatcatccacggcattaagacacagggagcgaggcagaaattctcctccctgtacatctcacagttcattattatgtatagtttggacggcaagaagtggcaaacttatagaggtaacagtactggaacagacatggtgttcttcggcaacgttgatagctctggcatcaaacacaacatctttaatcctcccataatagctcggtacatcagattgcatccgacccactacagcattaggagtacactccgaatggagcttatgggttgcgacttgaattcctgttcaatgccactcggaatggagtctaaagccatctctgatgcacagataaccgccagtagctactttacgaacatgtttgctacgtggtcaccctctaaggcaaggcttcatttgcaaggccggtctaatgcctggagacctcaggtgaacaacccgaaagaatggctccaggtggactttcagaagaccatgaaagtaacaggtgtcactactcagggagttaagtccttggatactagcatgtatgtgaaggagttccttatttcctcatcacaagatggccaccagtggaccctcttctttcagaatggtaaggtcaaagtgtttcagggcaatcaagacagcttcacacccgtggtgaacagtcttgatcctccactcttgacacgataccttcgaatccatccacagtcttgggagcaccagattgcattgcgcatggaagtacttggatgcgaggctcaggacctctac

SEQ ID NO: 844 - protein, 1457 aa, synthetic construct
  REGION 1..1457: note = Variant of human B-domain deleted Factor VIII
MQIELSTCFFLCLLRFCFSATRRYYLGAVELSWDYMQSDLGELPVDARFPPRVPKSFPFNTSVVYKKTLFVEFTDHLFNIAKPRPPWMGLLGPTIQAEVYDTVVITLKNMASHPVSLHAVGVSYWKASEGAEYDDQTSQREKEDDKVFPGGSHTYVWQVLKENGPMASDPPCLTYSYLSHVDLVKDLNSGLIGALLVCREGSLAKEKTQTLHKFILLFAVFDEGKSWHSETKNSLMQDRDAASARAWPKMHTVNGYVNRTLPGLIGCHRKSVYWHVIGMGTTPEVHSIFLEGHTFLVRNHRQASLGISPITFLTAQTLLMDLGQFLLSCHIPSHQHDGMEAYVKVDSCPEEPQLRMKNNEEAEDYDDDLTDSEMDVVRFDDDNSPSTIQARSVAKKHPKTWVHYIAAEEEDWDYAPLVLAPDDRSYKSQYLNNGPQRIGRKYKKVRFMAYTDETFKTREAIQHESGILGPLLYGEVGDTLLIIFKNQASRPYNIYPHGITDVRPLYSRRLPKGVKHLKDFPILPGEIFKYKWTVTVEDGPTKSDPRCLTRYYSSFVNMERDLASGLIGPLLICYKESVDQRGNQIMSDKRNVILFSVFDENRSWYLTENIQRFLPNPAGVQLEDPEFQASNIMHSINGYVFDSLQLSVCLHEVAYWYILSIGAQTDFLSVFFSGYTFKHKMVYEDTLTLFPFSGETVFMSMENPGLWILGCHNSDFRNRGMTALLKVSSCDKNTGDYYEDSYEDISAYFDSKNNAIEPRSFSQNPPVLKRHQREITRTTLQSDQEEIDYDDTISVEMKKEDFDIYDEDENQSPRSFQKKTRHYFIAAVERLWDYGMSSSPHVLRNRAQSGSVPQFKKVVFQEFTDGSFTQPLYRGELNEHLGLLGPYIRAEVEDNIMVTFRNQASRPYSFYSSLISYEEDQRQGAEPRKNFVKPNETKTYFWKVQHHMAPTKDEFDCKAWAYFSDVDLEKDVHSGLIGPLLVCHTNTLNPAHGRQVTVQEFALFFTIFDETKSWYFTENMERNCRAPCNIQMEDPTFKENYRFHAINGYIRDTLPGLVMAQDQRIRWYLLSMGSNENIHSIHFSGHVFTVRKKEEYKMALYNLYPGVFETVEMLPSKAGIWRVECLIGEHLHAGMSTLFLVYSNKCQNPLGMASGHIRDFQITASGQYGQWAPKLARLHYSGSINAWSTKEPASWIKVDLLAPMIIHGIKTQGARQKFSSLYISQFIIMYSLDGKKWQTYRGNSTGTDMVFFGNVDSSGIKHNIFNPPIIARYIRLHPTHYSIRSTLRMELMGCDLNSCSMPLGMESKAISDAQITASSYFTNMFATWSPSKARLHLQGRSNAWRPQVNNPKEWLQVDFQKTMKVTGVTTQGVKSLDTSMYVKEFLISSSQDGHQWTLFFQNGKVKVFQGNQDSFTPVVNSLDPPLLTRYLRIHPQSWEHQIALRMEVLGCEAQDLY

SEQ ID NO: 845 - DNA, 4371 bp, synthetic construct
  misc_feature 1..4371: note = Variant of human B-domain deleted Factor VIII
  source 1..4371: mol_type = other DNA
atgcagattgaactgtctacctgcttcttcctctgtttgctgaggttctgctttagcgccactagacggtactaccttggcgctgtggagctgtcctgggactatatgcagagtgatttgggagagcttcccgtcgacgcacgatttcctcctcgcgttccaaagtcatttccctttaacacaagcgtggtgtacaagaagacgctcttcgtcgaattcaccgatcacctgttcaatatcgccaaacccagaccaccatggatgggtcttttggggcctaccatacaagcggaggtgtatgacacagttgttatcactctcaagaacatggcttctcatccggtaagtcttcacgcagtgggcgtgtcctactggaaagcttcagaaggagccgagtatgatgatcagacatcccagagggagaaagaagacgacaaggtatttccaggtgggtctcatacctatgtgtggcaagtgctcaaagagaatggccctatggcaagcgatccgccgtgtttgacttacagctacctttcacacgttgacctcgtcaaggacctcaactccgggttgattggagccttgttggtatgcagggaaggatctcttgccaaagagaagacacagaccctccacaagtttatccttctctttgctgtgttcgatgagggcaaaagttggcatagcgaaacgaagaattccctcatgcaggatcgcgacgcagccagcgccagagcttggcccaagatgcacactgtgaacggatatgtcaataggacgcttcctggcttgattgggtgtcatcggaaaagtgtctactggcacgtgatcggaatggggacaacaccagaggtccactccatatttctcgaaggccataccttccttgttcgaaaccacagacaggcatccttggagatctctcccattacctttctcactgcccaaacgctccttatggacttgggtcagttccttctcttttgccatatcccgtcacaccagcatgatggtatggaagcttatgtgaaagtcgacagttgtcctgaggagccacagttgcgcatgaagaataatgaagaagccgaggattacgacgacgatctcaccgattctgagatggacgtggtgaggtttgatgacgacaactctccctcccgcattcaagctcggagcgtggcgaagaaacaccccaagacttgggtccactatatagcggcggaagaggaggattgggattacgctcctcttgtattggcaccagatgaccgctcatacaaaagccagtacctcaacaacggaccgcagagaattggccggaagtataagaaagtgcgatttatggcctatacagacgaaacctttaagacaagggaggccatccagcatgagagtgggattttgggacctcttctttacggcgaagttggtgataccctcctcatcatcttcaagaatcaagcttctcgcccctataacatttacccacacgggatcactgacgttaggcctttgtatagcagaagacttcccaaaggcgtgaagcatctcaaagacttccccattttgccaggcgagatctttaagtacaaatggaccgtcacagtggaagatggaccgactaaatcagaccctcgatgccttacgcggtactattcctccttcgtgaatatggagagagatttggcaagcggactcataggaccactcctcatctgttacaaggaatctgtagaccagaggggtaaccagattatgagtgataaacgcaatgtgatcctttttagcgtcttcgacgagaaccggtcctggtacttgaccgagaatatacaaaggttccttcccaaccccgcaggcgttcagttggaagaccctgagtttcaggccagcaatattatgcactcaatcaacggctatgtgtttgatagtctccagctttctgtttgcctccatgaagtagcctattggtacatcttgtcaattggtgctcaaacagacttcctctccgtcttcttctccggctacacctttaagcacaagatggtgtatgaggacactctcacactctttccattttctggagaaaccgtgttcatgagcatggagaatccaggcctttggatcttgggttgccacaacagtgattttcgcaatcggggaatgactgctctcctcaaagtcagcagctgtgataagaacacaggcgactattacgaagattcttacgaggacataagtgcctactttgactccaagaataacgccattgagcccagatcattctcccagaatcctcccgtgcttaaaaggcatcagcgcgaaatcaccagaactactcttcagtctgatcaagaggagattgactatgacgacaccataagcgtggaaatgaagaaggaggatttcgatatctatgacgaagatgagaaccagtctccgcggagctttcagaagaagacgcgacactacttcattgcagcagtcgaaaggctttgggactacggtatgtcatcatcccctcatgtgttgcgcaatagagctcagagtggaagtgttccacagttcaagaaagtcgtctttcaagagtttacagatggcagcttcacacagcctctctatcggggcgagcttaacgaacatttgggactccttggtccctatatccgagccgaagtggaggacaacattatggttacctttaggaatcaagcctctcgcccctacagcttctactcctccctcatcagttatgaggaggatcagagacaaggcgctgaaccacggaagaactttgtgaaaccgaatgagacgaagacctacttctggaaagtacagcaccacatggcccccacaaaagacgaattcgattgcaaagcatgggcgtatttttcagacgttgacttggagaaagatgtacattcaggacttattggtcctttgttggtgtgtcacactaacactctcaatccagcccatggcaggcaggtgacagtccaggaattcgctcttttctttaccatctttgatgagaccaagtcctggtacttcacggaaaacatggagcgcaattgcagagccccctgtaacatacagatggaggaccctacctttaaggaaaattatcggttccacgcaatcaacggatacattatggatacactccctggccttgtgatggctcaggaccaacgaatcaggtggtacctcctcagcatgggttctaatgagaacatacactccattcacttttcaggacatgtgttcactgtccggaagaaagaagagtataagatggccctctacaatttgtatccaggcgtgtttgagaccgttgaaatgcttccctctaaagctggcatctggagagtagagtgcttgatcggagaacatcttcacgcaggtatgagcaccttgttcctcgtgtacagcaacaaatgtcagaacccacttggcatggccagtggacacattcgcgactttcagatcacagcatctggccagtatggacaatgggccccaaagttggctcgcctccattactccggtagcataaatgcgtggtccactaaagaacctttcagctggattaaggtcgatcttcttgcccccatgatcatccacggcattaagacacagggagcgaggcagaaattctcctccctctacatctcacagttcattattatgtatagtttggacggcaagaagtggcaaacttatagaggtaacagtactggaacagacatggtgttcttcggcaacgttgatagctctggcatcaaacacaacatctttaatcctcccataatagctcggtacatcagattgcatccgacccactacagcattaggagtacactccgaatggagcttatgggttgcgacttgaattcctgttcaatgccactcggaatggagtctaaagccatctctgatgcacagataaccgccagtagctactttacgaacatgtttgctacgtggtcaccctctaaggcaaggcttcatttgcaaggccggtctaatgcctggagacctcaggtgaacaacccgaaagaatggctccaggtggactttcagaagaccatgaaagtaacaggtgtcactactcagggagttaagtccttggatactagcatgtatgtgaaggagttccttatttcctcatcacaagatggccaccagtggaccctcttctttcagaatggtaaggtcaaagtgtttcagggcaatcaagacagcttcacacccgtggtgaacagtcttgatcctccactcttgacacgataccttcgaatccatccacagtcttgggagcaccagattgcattgcgcatggaagtacttggatgcgaggctcaggacctctac

SEQ ID NO: 846 - protein, 1457 aa, synthetic construct
  REGION 1..1457: note = Variant of human B-domain deleted Factor VIII
MQIELSTCFFLCLLRFCFSATRRYYLGAVELSWDYMQSDLGELPVDARFPPRVPKSFPFNTSVVYKKTLFVEFTDHLFNIAKPRPPWMGLLGPTIQAEVYDTVVITLKNMASHPVSLHAVGVSYWKASEGAEYDDQTSQREKEDDKVFPGGSHTYVWQVLKENGPMASDPPCLTYSYLSHVDLVKDLNSGLIGALLVCREGSLAKEKTQTLHKFILLFAVFDEGKSWHSETKNSLMQDRDAASARAWPKMHTVNGYVNRTLPGLIGCHRKSVYWHVIGMGTTPEVHSIFLEGHTFLVRNHRQASLEISPITFLTAQTLLMDLGQFLLFCHIPSHQHDGMEAYVKVDSCPEEPQLRMKNNEEAEDYDDDLTDSEMDVVRFDDDNSPSRIQARSVAKKHPKTWVHYIAAEEEDWDYAPLVLAPDDRSYKSQYLNNGPQRIGRKYKKVRFMAYTDETFKTREAIQHESGILGPLLYGEVGDTLLIIFKNQASRPYNIYPHGITDVRPLYSRRLPKGVKHLKDFPILPGEIFKYKWTVTVEDGPTKSDPRCLTRYYSSFVNMERDLASGLIGPLLICYKESVDQRGNQIMSDKRNVILFSVFDENRSWYLTENIQRFLPNPAGVQLEDPEFQASNIMHSINGYVFDSLQLSVCLHEVAYWYILSIGAQTDFLSVFFSGYTFKHKMVYEDTLTLFPFSGETVFMSMENPGLWILGCHNSDFRNRGMTALLKVSSCDKNTGDYYEDSYEDISAYFDSKNNAIEPRSFSQNPPVLKRHQREITRTTLQSDQEEIDYDDTISVEMKKEDFDIYDEDENQSPRSFQKKTRHYFIAAVERLWDYGMSSSPHVLRNRAQSGSVPQFKKVVFQEFTDGSFTQPLYRGELNEHLGLLGPYIRAEVEDNIMVTFRNQASRPYSFYSSLISYEEDQRQGAEPRKNFVKPNETKTYFWKVQHHMAPTKDEFDCKAWAYFSDVDLEKDVHSGLIGPLLVCHTNTLNPAHGRQVTVQEFALFFTIFDETKSWYFTENMERNCRAPCNIQMEDPTFKENYRFHAINGYIMDTLPGLVMAQDQRIRWYLLSMGSNENIHSIHFSGHVFTVRKKEEYKMALYNLYPGVFETVEMLPSKAGIWRVECLIGEHLHAGMSTLFLVYSNKCQNPLGMASGHIRDFQITASGQYGQWAPKLARLHYSGSINAWSTKEPFSWIKVDLLAPMIIHGIKTQGARQKFSSLYISQFIIMYSLDGKKWQTYRGNSTGTDMVFFGNVDSSGIKHNIFNPPIIARYIRLHPTHYSIRSTLRMELMGCDLNSCSMPLGMESKAISDAQITASSYFTNMFATWSPSKARLHLQGRSNAWRPQVNNPKEWLQVDFQKTMKVTGVTTQGVKSLDTSMYVKEFLISSSQDGHQWTLFFQNGKVKVFQGNQDSFTPVVNSLDPPLLTRYLRIHPQSWEHQIALRMEVLGCEAQDLY

SEQ ID NO: 847 - DNA, 4371 bp, synthetic construct
  misc_feature 1..4371: note = Variant of human B-domain deleted Factor VIII
  source 1..4371: mol_type = other DNA
atgcagattgaactgtctacctgcttcttcctctgtttgctgaggttctgctttagcgccactagacggtactaccttggcgctgtggagctgtcctgggactatatgcagagtgatttgggagagcttcccgtcgacgcacgatttcctcctcgcgttccaaagtcatttccctttaacacaagcgtggtgtacaagaagacgctcttcgtcgaattcaccgatcacctgttcaatatcgccaaacccagaccaccatggatgggtcttttggggcctaccatacaagcggaggtgtatgacacagttgttatcactctcaagaacatggcttctcatccggtaagtcttcacgcagtgggcgtgtcctactggaaagcttcagaaggagccgagtatgatgatcagacatcccagagggagaaagaagacgacaaggtatttccaggtgggtctcatacctatgtgtggcaagtgctcaaagagaatggccctatggcaagcgatccgccgtgtttgacttacagctacctttcacacgttgacctcgtcaaggacctcaactccgggttgattggagccttgttggtatgcagggaaggatctcttgccaaagagaagacacagaccctccacaagtttatccttctctttgctgtgttcgatgagggcaaaagttggcatagcgaaacgaagaattccctcatgcaggatcgcgacgcagccagcgccagagcttggcccaagatgcacactgtgaacggatatgtcaataggacgcttcctggcttgattgggtgtcatcggaaaagtgtctactggcacgtgatcggaatggggacaacaccagaggtccactccatatttctcgaaggccataccttccttgttcgaaaccacagacaggcatccttggagatctctcccattacctttctcactgcccaaacgctccttatggacttgggtcagttccttctcttttgccatatctcgtcacaccagcatgatggtatggaagcttatgtgaaagtcgacagttgtcctgaggagccacagttgcgcatgaagaataatgaagaagccgaggattacgacgacgatctcaccgattctgagatggacgtggtgaggtttgatgacgacaactctccctcccgcattcaagctcggagcgtggcgaagaaacaccccaagacttgggtccactatatagcggcggaagaggaggattgggattacgctcctcttgtattggcaccagatgaccgctcatacaaaagccagtacctcaacaacggaccgcagagaattggccggaagtataagaaagtgcgatttatggcctatacagacgaaacctttaagacaagggaggccatccagcatgagagtgggattttgggacctcttctttacggcgaagttggtgataccctcctcatcatcttcaagaatcaagcttctcgcccctataacatttacccacacgggatcactgacgttaggcctttgtatagcagaagacttcccaaaggcgtgaagcatctcaaagacttccccattttgccaggcgagatctttaagtacaaatggaccgtcacagtggaagatggaccgactaaatcagaccctcgatgccttacgcggtactattcctccttcgtgaatatggagagagatttggcaagcggactcataggaccactcctcatctgttacaaggaatctgtagaccagaggggtaaccagattatgagtgataaacgcaatgtgatcctttttagcgtcttcgacgagaaccggtcctggtacttgaccgagaatatacaaaggttccttcccaaccccgcaggcgttcagttggaagaccctgagtttcaggccagcaatattatgcactcaatcaacggctatgtgtttgatagtctccagctttctgtttgcctccatgaagtagcctattggtacatcttgtcaattggtgctcaaacagacttcctctccgtcttcttctccggctacacctttaagcacaagatggtgtatgaggacactctcacactctttccattttctggagaaaccgtgttcatgagcatggagaatccaggcctttggatcttgggttgccacaacagtgattttcgcaatcggggaatgactgctctcctcaaagtcagcagctgtgataagaacacaggcgactattacgaagattcttacgaggacataagtgcctactttgactccaagaataacgccattgagcccagatcattctcccagaatcctcccgtgcttaaaaggcatcagcgcgaaatcaccagaactactcttcagtctgatcaagaggagattgactatgacgacaccataagcgtggaaatgaagaaggaggatttcgatatctatgacgaagatgagaaccagtctccgcggagctttcagaagaagacgcgacactacttcattgcagcagtcgaaaggctttgggactacggtatgtcatcatcccctcatgtgttgcgcaatagagctcagagtggaagtgttccacagttcaagaaagtcgtctttcaagagtttacagatggcagcttcacacagcctctctatcggggcgagcttaacgaacatttgggactccttggtccctatatccgagccgaagtggaggacaacattatggttacctttaggaatcaagcctctcgcccctacagcttctactcctccctcatcagttatgaggaggatcagagacaaggcgctgaaccacggaagaactttgtgaaaccgaatgagacgaagacctacttctggaaagtacagcaccacatggcccccacaaaagacgaattcgattgcaaagcatgggcgtatttttcagacgttgacttggagaaagatgtacattcaggacttattggtcctttgttggtgtgtcacactaacactctcaatccagcccatggcaggcaggtgacagtccaggaattcgctcttttctttaccatctttgatgagaccaagtcctggtacttcacggaaaacatggagcgcaattgcagagccccctgtaacatacagatggaggaccctacctttaaggaaaattatcggttccacgcaatcaacggatacattatggatacactccctggccttgtgatggctcaggaccaacgaatcaggtggtacctcctcagcatgggttctaatgagaacatacactccattcacttttcaggacatgtgttcactgtccggaagaaagaagagtataagatggccctctacaatttgtatccaggcgtgtttgagaccgttgaaatgcttccctctaaagctggcatctggagagtagagtgcttgatcggagaacatcttcacgcaggtatgagcaccttgttcctcgtgtacagcaacaaatgtcagaccccacttggcatggccagtggacacattcgcgactttcagatcacagcatctggccagtatggacaatgggccccaaagttggctcgcctccattactccggtagcataaatgcgtggtccactaaagaacctttcagctggattaaggtcgatcttcttgcccccatgatcatccacggcattaagacacagggagcgaggcagaaattctcctccctgtacatctcacagttcattattatgtatagtttggacggcaagaagtggcaaacttatagaggtaacagtactggaacagacatggtgttcttcggcaacgttgatagctctggcatcaaacacaacatctttaatcctcccataatagctcggtacatcagattgcatccgacccactacagcattaggagtacactccgaatggagcttatgggttgcgacttgaattcctgttcaatgccactcggaatggagtctaaagccatctctgatgcacagataaccgccagtagctactttacgaacatgtttgctacgtggtcaccctctaaggcaaggcttcatttgcaaggccggtctaatgcctggagacctcaggtgaacaacccgaaagaatggctccaggtggactttcagaagaccatgaaagtaacaggtgtcactactcagggagttaagtccttggatactagcatgtatgtgaaggagttccttatttcctcatcacaagatggccaccagtggaccctcttctttcagaatggtaaggtcaaagtgtttcagggcaatcaagacagcttcacacccgtggtgaacagtcttgatcctccactcttgacacgataccttcgaatccatccacagtcttgggagcaccagattgcattgcgcatggaagtacttggatgcgaggctcaggacctctac

SEQ ID NO: 848 - protein, 1457 aa, synthetic construct
  REGION 1..1457: note = Variant of human B-domain deleted Factor VIII
MQIELSTCFFLCLLRFCFSATRRYYLGAVELSWDYMQSDLGELPVDARFPPRVPKSFPFNTSVVYKKTLFVEFTDHLFNIAKPRPPWMGLLGPTIQAEVYDTVVITLKNMASHPVSLHAVGVSYWKASEGAEYDDQTSQREKEDDKVFPGGSHTYVWQVLKENGPMASDPPCLTYSYLSHVDLVKDLNSGLIGALLVCREGSLAKEKTQTLHKFILLFAVFDEGKSWHSETKNSLMQDRDAASARAWPKMHTVNGYVNRTLPGLIGCHRKSVYWHVIGMGTTPEVHSIFLEGHTFLVRNHRQASLEISPITFLTAQTLLMDLGQFLLFCHISSHQHDGMEAYVKVDSCPEEPQLRMKNNEEAEDYDDDLTDSEMDVVRFDDDNSPSRIQARSVAKKHPKTWVHYIAAEEEDWDYAPLVLAPDDRSYKSQYLNNGPQRIGRKYKKVRFMAYTDETFKTREAIQHESGILGPLLYGEVGDTLLIIFKNQASRPYNIYPHGITDVRPLYSRRLPKGVKHLKDFPILPGEIFKYKWTVTVEDGPTKSDPRCLTRYYSSFVNMERDLASGLIGPLLICYKESVDQRGNQIMSDKRNVILFSVFDENRSWYLTENIQRFLPNPAGVQLEDPEFQASNIMHSINGYVFDSLQLSVCLHEVAYWYILSIGAQTDFLSVFFSGYTFKHKMVYEDTLTLFPFSGETVFMSMENPGLWILGCHNSDFRNRGMTALLKVSSCDKNTGDYYEDSYEDISAYFDSKNNAIEPRSFSQNPPVLKRHQREITRTTLQSDQEEIDYDDTISVEMKKEDFDIYDEDENQSPRSFQKKTRHYFIAAVERLWDYGMSSSPHVLRNRAQSGSVPQFKKVVFQEFTDGSFTQPLYRGELNEHLGLLGPYIRAEVEDNIMVTFRNQASRPYSFYSSLISYEEDQRQGAEPRKNFVKPNETKTYFWKVQHHMAPTKDEFDCKAWAYFSDVDLEKDVHSGLIGPLLVCHTNTLNPAHGRQVTVQEFALFFTIFDETKSWYFTENMERNCRAPCNIQMEDPTFKENYRFHAINGYIMDTLPGLVMAQDQRIRWYLLSMGSNENIHSIHFSGHVFTVRKKEEYKMALYNLYPGVFETVEMLPSKAGIWRVECLIGEHLHAGMSTLFLVYSNKCQTPLGMASGHIRDFQITASGQYGQWAPKLARLHYSGSINAWSTKEPFSWIKVDLLAPMIIHGIKTQGARQKFSSLYISQFIIMYSLDGKKWQTYRGNSTGTDMVFFGNVDSSGIKHNIFNPPIIARYIRLHPTHYSIRSTLRMELMGCDLNSCSMPLGMESKAISDAQITASSYFTNMFATWSPSKARLHLQGRSNAWRPQVNNPKEWLQVDFQKTMKVTGVTTQGVKSLDTSMYVKEFLISSSQDGHQWTLFFQNGKVKVFQGNQDSFTPVVNSLDPPLLTRYLRIHPQSWEHQIALRMEVLGCEAQDLY

SEQ ID NO: 849 - DNA, 4371 bp, synthetic construct
  misc_feature 1..4371: note = Variant of human B-domain deleted Factor VIII
  source 1..4371: mol_type = other DNA
atgcagattgaactgtctacctgcttcttcctctgtttgctgaggttctgctttagcgccactagacggtactaccttggcgctgtggagctgtcctgggactatatgcagagtgatttgggagagcttcccgtcgacgcacgatttcctcctcgcgttccaaagtcatttccctttaacacaagcgtagtgtacaagaagacgctcttcgtcgaattcaccgatcacctgttcaatatcgccaaacccagaccaccatggatgggtcttttggggcctaccatacaagcggaggtgtatgacacagttgttatcactctcaagaacatggcttctcatccggtaagtcttcacgcagtgggcgtgtcctactggaaagcttcagaaggagccgagtatgatgatcagacatcccagagggagaaagaagacgacaaggtatttccaggtgggtctcatacctatgtgtggcaagtgctcaaagagaatggccctatggcaagcgatccgccgtgtttgacttacagctacctttcacacgttgacctcgtcaaggacctcaactccgggttgattggagccttgttggtatgcagggaaggatctcttgccaaagagaagacacagaccctccacaagtttatccttctctttgctgtgttcgatgagggcaaaagttggcatagcgaaacgaagaattccctcatgcaggatcgcgacgcagccagcgccagagcttggcccaagatgcacactgtgaacggatatgtcaataggacgcttcctggcttgattgggtgtcatcggaaaagtgtctactggcacgtgatcggaatggggacaacaccagaggtccactccatatttctcgaaggccataccttccttgttcgaaaccacagacaggcatccttggggatctctcccattacctttctcactgcccaaacgctccttatggacttgggtcagttccttctcttttgccatatctcgtcacaccagcatgatggtatggaagcttatgtgaaagtcgacagttgtcctgaggagccacagttgcgcatgaagaataatgaagaagccgaggattacgacgacgatctcaccgattctgagatggacgtggtgaggtttgatgacgacaactctccctccaccattcaaattcggagcgtggcgaagaaacaccccaagacttgggtccactatatagcggcggaagaggaggattgggattacgctcctcttgtattggcaccagatgaccgctcatacaaaagccagtacctcaacaacggaccgcagagaattggccggaagtataagaaagtgcgatttatggcctatacagacgaaacctttaagacaagggaggccatccagcatgagagtgggattttgggacctcttctttacggcgaagttggtgataccctcctcatcatcttcaagaatcaagcttctcgcccctataacatttacccacacgggatcactgacgttaggcctttgtatagcagaagacttcccaaaggcgtgaagcatctcaaagacttccccattttgccaggcgagatctttaagtacaaatggaccgtcacagtggaagatggaccgactaaatcagaccctcgatgccttacgcggtactattcctccttcgtgaatatggagagagatttggcaagcggactcataggaccactcctcatctgttacaaggaatctgtagaccagaggggtaaccagattatgagtgataaacgcaatgtgatcctttttagcgtcttcgacgagaaccggtcctggtacttgaccgagaatatacaaaggttccttcccaaccccgcaggcgttcagttggaagaccctgagtttcaggccagcaatattatgcactcaatcaacggctatgtgtttgatagtctccagctttctgtttgcctccatgaagtagcctattggtacatcttgtcaattggtgctcaaacagacttcctctccgtcttcttctccggctacacctttaagcacaagatggtgtatgaggacactctcacactctttccattttctggagaaaccgtgttcatgagcatggagaatccaggcctttggatcttgggttgccacaacagtgattttcgcaatcggggaatgactgctctcctcaaagtcagcagctgtgataagaacacaggcgactattacgaagattcttacgaggacataagtgcctactttgactccaagaataacgccattgagcccagatcattctcccagaatcctcccgtgcttaaaaggcatcagcgcgaaatcaccagaactactcttcagtctgatcaagaggagattgactatgacgacaccataagcgtggaaatgaagaaggaggatttcgatatctatgacgaagatgagaaccagtctccgcggagctttcagaagaagacgcgacactacttcattgcagcagtcgaaaggctttgggactacggtatgtcatcatcccctcatgtgttgcgcaatagagctcagagtggaagtgttccacagttcaagaaagtcgtctttcaagagtttacagatggcagcttcacacagcctctctatcggggcgagcttaacgaacatttgggactccttggtccctatatccgagccgaagtggaggacaacattatggttacctttaggaatcaagcctctcgcccctacagcttctactcctccctcatcagttatgaggaggatcagagacaaggcgctgaaccacggaagaactttgtgaaaccgaatgagacgaagacctacttctggaaagtacagcaccacatggcccccacaaaagacgaattcgattgcaaagcatgggcgtatttttcagacgttgacttggagaaagatgtacattcaggacttattggtcctttgttggtgtgtcacactaacactctcaatccagcccatggcaggcaggtgacagtccaggaattcgctcttttctttaccatctttgatgagaccaagtcctggtacttcacggaaaacatggagcgcaattgcagagccccctgtaacatacagatggaggaccctacctttaaggaaaattatcggttccacgcaatcaacggatacattaaggatacactccctggccttgtgatggctcaggaccaacgaatcaggtggtacctcctcagcatgggttctaatgagaacatacactccattcacttttcaggacatgtgttcactgtccggaagaaagaagagtataagatggccctctacaatttgtatccaggcgtgtttgagaccgttgaaatgcttccctctaaagctggcatctggagagtagagtgcttgatcggagaacatcttcacgcaggtatgagcaccttgttcctcgtgtacagcaacaaatgtcagaacccacttggcatggccagtggacacattcgcgactttcagatcacagcatctggccagtatggacaatgggccccaaagttggctcgcctccattactccggtagcataaatgcgtggtccactaaagaacctttcagctggattaaggtcgatcttcttgcccccatgatcatccacggcattaagacacagggagcgaggcagaaattctcctccctgtacatctcacagttcattattatgtatagtttggacggcaagaagtggcaaacttatagaggtaacagtactggaacagacatggtgttcttcggcaacgttgatagctctggcatcaaacacaacatctttaatcctcccataatagctcggtacatcagattgcatccgacccactacagcattaggagtacactccgaatggagcttatgggttgcgacttgaattcctgttcaatgccactcggaatggagtctaaagccatctctgatgcacagataaccgccagtagctactttacgaacatgtttgctacgtggtcaccctctaaggcaaggcttcatttgcaaggccggtctaatgcctggagacctcaggtgaacaacccgaaagaatggctccaggtggactttcagaagaccatgaaagtaacaggtgtcactactcagggagttaagtccttggatactagcatgtatgtgaaggagttccttatttcctcatcacaagatggccaccagtggaccctcttctttcagaatggtaaggtcaaagtgtttcagggcaatcaagacagcttcacacccgtggtgaacagtcttgatcctccactcttgacacgataccttcgaatccatccacagtcttgggagcaccagattgcattgcgcatggaagtacttggatgcgaggctcaggacctctac

SEQ ID NO: 850 - protein, 1457 aa, synthetic construct
  REGION 1..1457: note = Variant of human B-domain deleted Factor VIII
MQIELSTCFFLCLLRFCFSATRRYYLGAVELSWDYMQSDLGELPVDARFPPRVPKSFPFNTSVVYKKTLFVEFTDHLFNIAKPRPPWMGLLGPTIQAEVYDTVVITLKNMASHPVSLHAVGVSYWKASEGAEYDDQTSQREKEDDKVFPGGSHTYVWQVLKENGPMASDPPCLTYSYLSHVDLVKDLNSGLIGALLVCREGSLAKEKTQTLHKFILLFAVFDEGKSWHSETKNSLMQDRDAASARAWPKMHTVNGYVNRTLPGLIGCHRKSVYWHVIGMGTTPEVHSIFLEGHTFLVRNHRQASLGISPITFLTAQTLLMDLGQFLLFCHISSHQHDGMEAYVKVDSCPEEPQLRMKNNEEAEDYDDDLTDSEMDVVRFDDDNSPSTIQIRSVAKKHPKTWVHYIAAEEEDWDYAPLVLAPDDRSYKSQYLNNGPQRIGRKYKKVRFMAYTDETFKTREAIQHESGILGPLLYGEVGDTLLIIFKNQASRPYNIYPHGITDVRPLYSRRLPKGVKHLKDFPILPGEIFKYKWTVTVEDGPTKSDPRCLTRYYSSFVNMERDLASGLIGPLLICYKESVDQRGNQIMSDKRNVILFSVFDENRSWYLTENIQRFLPNPAGVQLEDPEFQASNIMHSINGYVFDSLQLSVCLHEVAYWYILSIGAQTDFLSVFFSGYTFKHKMVYEDTLTLFPFSGETVFMSMENPGLWILGCHNSDFRNRGMTALLKVSSCDKNTGDYYEDSYEDISAYFDSKNNAIEPRSFSQNPPVLKRHQREITRTTLQSDQEEIDYDDTISVEMKKEDFDIYDEDENQSPRSFQKKTRHYFIAAVERLWDYGMSSSPHVLRNRAQSGSVPQFKKVVFQEFTDGSFTQPLYRGELNEHLGLLGPYIRAEVEDNIMVTFRNQASRPYSFYSSLISYEEDQRQGAEPRKNFVKPNETKTYFWKVQHHMAPTKDEFDCKAWAYFSDVDLEKDVHSGLIGPLLVCHTNTLNPAHGRQVTVQEFALFFTIFDETKSWYFTENMERNCRAPCNIQMEDPTFKENYRFHAINGYIKDTLPGLVMAQDQRIRWYLLSMGSNENIHSIHFSGHVFTVRKKEEYKMALYNLYPGVFETVEMLPSKAGIWRVECLIGEHLHAGMSTLFLVYSNKCQNPLGMASGHIRDFQITASGQYGQWAPKLARLHYSGSINAWSTKEPFSWIKVDLLAPMIIHGIKTQGARQKFSSLYISQFIIMYSLDGKKWQTYRGNSTGTDMVFFGNVDSSGIKHNIFNPPIIARYIRLHPTHYSIRSTLRMELMGCDLNSCSMPLGMESKAISDAQITASSYFTNMFATWSPSKARLHLQGRSNAWRPQVNNPKEWLQVDFQKTMKVTGVTTQGVKSLDTSMYVKEFLISSSQDGHQWTLFFQNGKVKVFQGNQDSFTPVVNSLDPPLLTRYLRIHPQSWEHQIALRMEVLGCEAQDLY

SEQ ID NO: 851 - DNA, 4371 bp, synthetic construct
  misc_feature 1..4371: note = Variant of human B-domain deleted Factor VIII
  source 1..4371: mol_type = other DNA
atgcagattgaactgtctacctgcttcttcctctgtttgctgaggttctgctttagcgccactagacggtactaccttggcgctgtggagctgtcctgggactatatgcagagtgatttgggagagcttcccgtcgacgcacgatttcctcctcgcgttccaaagtcatttccctttaacacaagcgtggtgtacaagaagacgctcttcgtcgaattcaccgatcacctgttcaatatcgccaaacccagaccaccatggatgggtcttttggggcctaccatacaagcggaggtgtatgacacagttgttatcactctcaagaacatggcttctcatccggtaagtcttcacgcagtgggcgtgtcctactggaaagcttcagaaggagccgagtatgatgatcagacatcccagagggagaaagaagacgacaaggtatttccaggtgggtctcatacctatgtgtggcaagtgctcaaagagaatggccctatggcaagcgatccgccgtgtttgacttacagctacctttcacacgttgacctcgtcaaggacctcaactccgggttgattggagccttgttggtatgcagggaaggatctcttgccaaagagaagacacagaccctccacaagtttatccttctctttgctgtgttcgatgagggcaaaagttggcatagcgaaacgaagaattccctcatgcaggatcgcgacgcagccagcgccagagcttggcccaagatgcacactgtgaacggatatgtcaataggacgcttcctggcttgattgggtgtcatcggaaaagtgtctactggcacgtgatcggaatggggacaacaccagaggtccactccatatttctcgaaggccataccttccttgttcgaaaccacagacaggcatccttggagatctctcccattacctttctcactgcccaaacgctccttatggacttgggtcagttccttctcttctgccatatcagctcacaccagcatgatggtatggaagcttatgtgaaagtcgacagttgtcctgaggagccacagttgcgcatgaagaataatgaagaagccgaggattacgacgacgatctcaccgattctgagatggacgtggtgaggtttgatgacgacaactctccctcccgcattcaaattcggagcgtggcgaagaaacaccccaagacttgggtccactatatagcggcggaagaggaggattgggattacgctcctcttgtattggcaccagatgaccgctcatacaaaagccagtacctcaacaacggaccgcagagaattggccggaagtataagaaagtgcgatttatggcctatacagacgaaacctttaagacaagggaggccatccagcatgagagtgggattttgggacctcttctttacggcgaagttggtgataccctcctcatcatcttcaagaatcaagcttctcgcccctataacatttacccacacgggatcactgacgttaggcctttgtatagcagaagacttcccaaaggcgtgaagcatctcaaagacttccccattttgccaggcgagatctttaagtacaaatggaccgtcacagtggaagatggaccgactaaatcagaccctcgatgccttacgcggtactattcctccttcgtgaatatggagagagatttggcaagcggactcataggaccactcctcatctgttacaaggaatctgtagaccagaggggtaaccagattatgagtgataaacgcaatgtgatcctttttagcgtcttcgacgagaaccggtcctggtacttgaccgagaatatacaaaggttccttcccaaccccgcaggcgttcagttggaagaccctgagtttcaggccagcaatattatgcactcaatcaacggctatgtgtttgatagtctccagctttctgtttgcctccatgaagtagcctattggtacatcttgtcaattggtgctcaaacagacttcctctccgtcttcttctccggctacacctttaagcacaagatggtgtatgaggacactctcacactctttccattttctggagaaaccgtgttcatgagcatggagaatccaggcctttggatcttgggttgccacaacagtgattttcgcaatcggggaatgactgctctcctcaaagtcagcagctgtgataagaacacaggcgactattacgaagattcttacgaggacataagtgcctactttgactccaagaataacgccattgagcccagatcattctcccagaatcctcccgtgcttaaaaggcatcagcgcgaaatcaccagaactactcttcagtctgatcaagaggagattgactatgacgacaccataagcgtggaaatgaagaaggaggatttcgatatctatgacgaagatgagaaccagtctccgcggagctttcagaagaagacgcgacactacttcattgcagcagtcgaaaggctttgggactacggtatgtcatcatcccctcatgtgttgcgcaatagagctcagagtggaagtgttccacagttcaagaaagtcgtctttcaagagtttacagatggcagcttcacacagcctctctatcggggcgagcttaacgaacatttgggactccttggtccctatatccgagccgaagtggaggacaacattatggttacctttaggaatcaagcctctcgcccctacagcttctactcctccctcatcagttatgaggaggatcagagacaaggcgctgaaccacggaagaactttgtgaaaccgaatgagacgaagacctacttctggaaagtacagcaccacatggcccccacaaaagacgaattcgattgcaaagcatgggcgtatttttcagacgttgacttggagaaagatgtacattcaggacttattggtcctttgttggtgtgtcacactaacactctcaatccagcccatggcaggcaggtgacagtccaggaattcgctcttttctttaccatctttgatgagaccaagtcctggtacttcacggaaaacatggagcgcaattgcagagccccctgtaacatacagatggaggaccctacctttaaggaaaattatcggttccacgcaatcaacggatacattatggatacactccctggccttgtgatggctcaggaccaacgaatcaggtggtacctcctcagcatgggttctaatgagaacatacactccattcacttttcaggacatgtgttcactgtccggaagaaagaagagtataagatggccctctacaatttgtatccaggcgtgtttgagaccgttgaaatgcttccctctaaagctggcatctggagagtagagtgcttgatcggagaacatcttcacgcaggtatgagcaccttgttcctcgtgtacagcaacaaatgtcagaccccacttggcatggccagtggacacattcgcgactttcagatcacagcatctggccagtatggacaatgggccccaaagttggctcgcctccattactccggtagcataaatgcgtggtccactaaagaacctttcagctggattaaggtcgatcttcttgcccccatgatcatccacggcattaagacacagggagcgaggcagaaattctcctccctgtacatctcacagttcattattatgtatagtttggacggcaagaagtggcaaacttatagaggtaacagtactggaacagacatggtgttcttcggcaacgttgatagctctggcatcaaacacaacatctttaatcctcccataatagctcggtacatcagattgcatccgacccactacagcattaggagtacactccgaatggagcttatgggttgcgacttgaattcctgttcaatgccactcggaatggagtctaaagccatctctgatgcacagataaccgccagtagctactttacgaacatgtttgctacgtggtcaccctctaaggcaaggcttcatttgcaaggccggtctaatgcctggagacctcaggtgaacaacccgaaagaatggctccaggtggactttcagaagaccatgaaagtaacaggtgtcactactcagggagttaagtccttggatactagcatgtatgtgaaggagttccttatttcctcatcacaagatggccaccagtggaccctcttctttcagaatggtaaggtcaaagtgtttcagggcaatcaagacagcttcacacccgtggtgaacagtcttgatcctccactcttgacacgataccttcgaatccatccacagtcttgggagcaccagattgcattgcgcatggaagtacttggatgcgaggctcaggacctctac

SEQ ID NO: 852 - protein, 1457 aa, synthetic construct
  REGION 1..1457: note = Variant of human B-domain deleted Factor VIII
MQIELSTCFFLCLLRFCFSATRRYYLGAVELSWDYMQSDLGELPVDARFPPRVPKSFPFNTSVVYKKTLFVEFTDHLFNIAKPRPPWMGLLGPTIQAEVYDTVVITLKNMASHPVSLHAVGVSYWKASEGAEYDDQTSQREKEDDKVFPGGSHTYVWQVLKENGPMASDPPCLTYSYLSHVDLVKDLNSGLIGALLVCREGSLAKEKTQTLHKFILLFAVFDEGKSWHSETKNSLMQDRDAASARAWPKMHTVNGYVNRTLPGLIGCHRKSVYWHVIGMGTTPEVHSIFLEGHTFLVRNHRQASLEISPITFLTAQTLLMDLGQFLLFCHISSHQHDGMEAYVKVDSCPEEPQLRMKNNEEAEDYDDDLTDSEMDVVRFDDDNSPSRIQIRSVAKKHPKTWVHYIAAEEEDWDYAPLVLAPDDRSYKSQYLNNGPQRIGRKYKKVRFMAYTDETFKTREAIQHESGILGPLLYGEVGDTLLIIFKNQASRPYNIYPHGITDVRPLYSRRLPKGVKHLKDFPILPGEIFKYKWTVTVEDGPTKSDPRCLTRYYSSFVNMERDLASGLIGPLLICYKESVDQRGNQIMSDKRNVILFSVFDENRSWYLTENIQRFLPNPAGVQLEDPEFQASNIMHSINGYVFDSLQLSVCLHEVAYWYILSIGAQTDFLSVFFSGYTFKHKMVYEDTLTLFPFSGETVFMSMENPGLWILGCHNSDFRNRGMTALLKVSSCDKNTGDYYEDSYEDISAYFDSKNNAIEPRSFSQNPPVLKRHQREITRTTLQSDQEEIDYDDTISVEMKKEDFDIYDEDENQSPRSFQKKTRHYFIAAVERLWDYGMSSSPHVLRNRAQSGSVPQFKKVVFQEFTDGSFTQPLYRGELNEHLGLLGPYIRAEVEDNIMVTFRNQASRPYSFYSSLISYEEDQRQGAEPRKNFVKPNETKTYFWKVQHHMAPTKDEFDCKAWAYFSDVDLEKDVHSGLIGPLLVCHTNTLNPAHGRQVTVQEFALFFTIFDETKSWYFTENMERNCRAPCNIQMEDPTFKENYRFHAINGYIMDTLPGLVMAQDQRIRWYLLSMGSNENIHSIHFSGHVFTVRKKEEYKMALYNLYPGVFETVEMLPSKAGIWRVECLIGEHLHAGMSTLFLVYSNKCQTPLGMASGHIRDFQITASGQYGQWAPKLARLHYSGSINAWSTKEPFSWIKVDLLAPMIIHGIKTQGARQKFSSLYISQFIIMYSLDGKKWQTYRGNSTGTDMVFFGNVDSSGIKHNIFNPPIIARYIRLHPTHYSIRSTLRMELMGCDLNSCSMPLGMESKAISDAQITASSYFTNMFATWSPSKARLHLQGRSNAWRPQVNNPKEWLQVDFQKTMKVTGVTTQGVKSLDTSMYVKEFLISSSQDGHQWTLFFQNGKVKVFQGNQDSFTPVVNSLDPPLLTRYLRIHPQSWEHQIALRMEVLGCEAQDLY

SEQ ID NO: 853 - DNA, 4371 bp, synthetic construct
  misc_feature 1..4371: note = Variant of human B-domain deleted Factor VIII
  source 1..4371: mol_type = other DNA
atgcagattgaactgtctacctgcttcttcctctgtttgctgaggttctgctttagcgccactagacggtactaccttggcgctgtggagctgtcctgggactatatgcagagtgatttgggagagcttcccgtcgacgcacgatttcctcctcgcgttccaaagtcatttccctttaacacaagcgtagtgtacaagaagacgctcttcgtcgaattcaccgatcacctgttcaatatcgccaaacccagaccaccatggatgggtcttttggggcctaccatacaagcggaggtgtatgacacagttgttatcactctcaagaacatggcttctcatccggtaagtcttcacgcagtgggcgtgtcctactggaaagcttcagaaggagccgagtatgatgatcagacatcccagagggagaaagaagacgacaaggtatttccaggtgggtctcatacctatgtgtggcaagtgctcaaagagaatggccctatggcaagcgatccgccgtgtttgacttacagctacctttcacacgttgacctcgtcaaggacctcaactccgggttgattggagccttgttggtatgcagggaaggatctcttgccaaagagaagacacagaccctccacaagtttatccttctctttgctgtgttcgatgagggcaaaagttggcatagcgaaacgaagaattccctcatgcaggatcgcgacgcagccagcgccagagcttggcccaagatgcacactgtgaacggatatgtcaataggacgcttcctggcttgattgggtgtcatcggaaaagtgtctactggcacgtgatcggaatggggacaacaccagaggtccactccatatttctcgaaggccataccttccttgttcgaaaccacagacaggcatccttggggatctctcccattacctttctcactgcccaaacgctccttatggacttgggtcagttccttctcttctgccatatcagctcacaccagcatgatggtatggaagcttatgtgaaagtcgacagttgtcctgaggagccacagttgcgcatgaagaataatgaagaagccgaggattacgacgacgatctcaccgattctgagatggacgtggtgaggtttgatgacgacaactctccctccatcattcaaattcggagcgtggcgaagaaacaccccaagacttgggtccactatatagcggcggaagaggaggattgggattacgctcctcttgtattggcaccagatgaccgctcatacaaaagccagtacctcaacaacggaccgcagagaattggccggaagtataagaaagtgcgatttatggcctatacagacgaaacctttaagacaagggaggccatccagcatgagagtgggattttgggacctcttctttacggcgaagttggtgataccctcctcatcatcttcaagaatcaagcttctcgcccctataacatttacccacacgggatcactgacgttaggcctttgtatagcagaagacttcccaaaggcgtgaagcatctcaaagacttccccattttgccaggcgagatctttaagtacaaatggaccgtcacagtggaagatggaccgactaaatcagaccctcgatgccttacgcggtactattcctccttcgtgaatatggagagagatttggcaagcggactcataggaccactcctcatctgttacaaggaatctgtagaccagaggggtaaccagattatgagtgataaacgcaatgtgatcctttttagcgtcttcgacgagaaccggtcctggtacttgaccgagaatatacaaaggttccttcccaaccccgcaggcgttcagttggaagaccctgagtttcaggccagcaatattatgcactcaatcaacggctatgtgtttgatagtctccagctttctgtttgcctccatgaagtagcctattggtacatcttgtcaattggtgctcaaacagacttcctctccgtcttcttctccggctacacctttaagcacaagatggtgtatgaggacactctcacactctttccattttctggagaaaccgtgttcatgagcatggagaatccaggcctttggatcttgggttgccacaacagtgattttcgcaatcggggaatgactgctctcctcaaagtcagcagctgtgataagaacacaggcgactattacgaagattcttacgaggacataagtgcctacctggactccaagaataacgccattgagcccagatcattctcccagaatcctcccgtgcttaaaaggcatcagcgcgaaatcaccagaactactcttcagtctgatcaagaggagattgactatgacgacaccataagcgtggaaatgaagaaggaggatttcgatatctatgacgaagatgagaaccagtctccgcggagctttcagaagaagacgcgacactacttcattgcagcagtcgaaaggctttgggactacggtatgtcatcatcccctcatgtgttgcgcaatagagctcagagtggaagtgttccacagttcaagaaagtcgtctttcaagagtttacagatggcagcttcacacagcctctctatcggggcgagcttaacgaacatttgggactccttggtccctatatccgagccgaagtggaggacaacattatggttacctttaggaatcaagcctctcgcccctacagcttctactcctccctcatcagttatgaggaggatcagagacaaggcgctgaaccacggaagaactttgtgaaaccgaatgagacgaagacctacttctggaaagtaaagcaccacatggcccccacaaaagacgaattcgattgcaaagcatgggcgtatttttcagacgttgacttggagaaagatgtacattcaggacttattggtcctttgttggtgtgtcacactaacactctcaatccagcccatggcaggcaggtgacagtccaggaattcgctcttttctttaccatctttgatgagaccaagtcctggtacttcacggaaaacatggagcgcaattgcagagccccctgtaacatacagatggaggaccctacctttaaggaaaattatcggttccacgcaatcaacggatacattcgtgatacactccctggccttgtgatggctcaggaccaacgaatcaggtggtacctcctcagcatgggttctaatgagaacatacactccattcacttttcaggacatgtgttcactgtccggaagaaagaagagtataagatggccctctacaatttgtatccaggcgtgtttgagaccgttgaaatgcttccctctaaagctggcatctggagagtagagtgcttgatcggagaacatcttcacgcaggtatgagcaccttgttcctcgtgtacagcaacaaatgtcagaccccacttggcatggccagtggacacattcgcgactttcagatcacagcatctggccagtatggacaatgggccccaaagttggctcgcctccattactccggtagcataaatgcgtggtccactaaagaacctgccagctggattaaggtcgatcttcttgcccccatgatcatccacggcattaagacacagggagcgaggcagaaattctcctccggttacatctcacagttcattattatgtatagtttggacggcaagaagtggcaaacttatagaggtaacagtactggaacagacatggtgttcttcggcaacgttgatagctctggcatcaaacacaacatctttaatcctcccataatagctcggtacatcagattgcatccgacccactacagcattaggagtacactccgaatggagcttatgggttgcgacttgaattcctgttcaatgccactcggaatggagtctaaagccatctctgatgcacagataaccgccagtagctactttacgaacatgtttgctacgtggtcaccctctaaggcaaggcttcatttgcaaggccggtctaatgcctggagacctcaggtgaacaacccgaaagaatggctccaggtggactttcagaagaccatgaaagtaacaggtgtcactactcagggagttaagtccttggatactagcatgtatgtgaaggagttccttatttcctcatcacaagatggccaccagtggaccctcttctttcagaatggtaaggtcaaagtgtttcagggcaatcaagacagcttcacacccgtggtgaacagtcttgatcctccactcttgacacgataccttcgaatccatccacagtcttgggagcaccagattgcattgcgcatggaagtacttggatgcgaggctcaggacctctac

SEQ ID NO: 854 - protein, 1457 aa, synthetic construct
  REGION 1..1457: note = Variant of human B-domain deleted Factor VIII
MQIELSTCFFLCLLRFCFSATRRYYLGAVELSWDYMQSDLGELPVDARFPPRVPKSFPFNTSVVYKKTLFVEFTDHLFNIAKPRPPWMGLLGPTIQAEVYDTVVITLKNMASHPVSLHAVGVSYWKASEGAEYDDQTSQREKEDDKVFPGGSHTYVWQVLKENGPMASDPPCLTYSYLSHVDLVKDLNSGLIGALLVCREGSLAKEKTQTLHKFILLFAVFDEGKSWHSETKNSLMQDRDAASARAWPKMHTVNGYVNRTLPGLIGCHRKSVYWHVIGMGTTPEVHSIFLEGHTFLVRNHRQASLGISPITFLTAQTLLMDLGQFLLFCHISSHQHDGMEAYVKVDSCPEEPQLRMKNNEEAEDYDDDLTDSEMDVVRFDDDNSPSIIQIRSVAKKHPKTWVHYIAAEEEDWDYAPLVLAPDDRSYKSQYLNNGPQRIGRKYKKVRFMAYTDETFKTREAIQHESGILGPLLYGEVGDTLLIIFKNQASRPYNIYPHGITDVRPLYSRRLPKGVKHLKDFPILPGEIFKYKWTVTVEDGPTKSDPRCLTRYYSSFVNMERDLASGLIGPLLICYKESVDQRGNQIMSDKRNVILFSVFDENRSWYLTENIQRFLPNPAGVQLEDPEFQASNIMHSINGYVFDSLQLSVCLHEVAYWYILSIGAQTDFLSVFFSGYTFKHKMVYEDTLTLFPFSGETVFMSMENPGLWILGCHNSDFRNRGMTALLKVSSCDKNTGDYYEDSYEDISAYLDSKNNAIEPRSFSQNPPVLKRHQREITRTTLQSDQEEIDYDDTISVEMKKEDFDIYDEDENQSPRSFQKKTRHYFIAAVERLWDYGMSSSPHVLRNRAQSGSVPQFKKVVFQEFTDGSFTQPLYRGELNEHLGLLGPYIRAEVEDNIMVTFRNQASRPYSFYSSLISYEEDQRQGAEPRKNFVKPNETKTYFWKVKHHMAPTKDEFDCKAWAYFSDVDLEKDVHSGLIGPLLVCHTNTLNPAHGRQVTVQEFALFFTIFDETKSWYFTENMERNCRAPCNIQMEDPTFKENYRFHAINGYIRDTLPGLVMAQDQRIRWYLLSMGSNENIHSIHFSGHVFTVRKKEEYKMALYNLYPGVFETVEMLPSKAGIWRVECLIGEHLHAGMSTLFLVYSNKCQTPLGMASGHIRDFQITASGQYGQWAPKLARLHYSGSINAWSTKEPASWIKVDLLAPMIIHGIKTQGARQKFSSGYISQFIIMYSLDGKKWQTYRGNSTGTDMVFFGNVDSSGIKHNIFNPPIIARYIRLHPTHYSIRSTLRMELMGCDLNSCSMPLGMESKAISDAQITASSYFTNMFATWSPSKARLHLQGRSNAWRPQVNNPKEWLQVDFQKTMKVTGVTTQGVKSLDTSMYVKEFLISSSQDGHQWTLFFQNGKVKVFQGNQDSFTPVVNSLDPPLLTRYLRIHPQSWEHQIALRMEVLGCEAQDLY

SEQ ID NO: 855 - DNA, 4371 bp, synthetic construct
  misc_feature 1..4371: note = Variant of human B-domain deleted Factor VIII
  source 1..4371: mol_type = other DNA
atgcagattgaactgtctacctgcttcttcctctgtttgctgaggttctgctttagcgccactagacggtactaccttggcgctgtggagctgtcctgggactatatgcagagtgatttgggagagcttcccgtcgacgcacgatttcctcctcgcgttccaaagtcatttccctttaacacaagcgtggtgtacaagaagacgctcttcgtcgaattcaccgatcacctgttcaatatcgccaaacccagaccaccatggatgggtcttttggggcctaccatacaagcggaggtgtatgacacagttgttatcactctcaagaacatggcttctcatccggtaagtcttcacgcagtgggcgtgtcctactggaaagcttcagaaggagccgagtatgatgatcagacatcccagagggagaaagaagacgacaaggtatttccaggtgggtctcatacctatgtgtggcaagtgctcaaagagaatggccctatggcaagcgatccgccgtgtttgacttacagctacctttcacacgttgacctcgtcaaggacctcaactccgggttgattggagccttgttggtatgcagggaaggatctcttgccaaagagaagacacagaccctccacaagtttatccttctctttgctgtgttcgatgagggcaaaagttggcatagcgaaacgaagaattccctcatgcaggatcgcgacgcagccagcgccagagcttggcccaagatgcacactgtgaacggatatgtcaataggacgcttcctggcttgattgggtgtcatcggaaaagtgtctactggcacgtgatcggaatggggacaacaccagaggtccactccatatttctcgaaggccataccttccttgttcgaaaccacagacaggcatccttggggatctctcccattacctttctcactgcccaaacgctccttatggacttgggtcagttccttctcttctgccatatcagctcacaccagcatgatggtatggaagcttatgtgaaagtcgacagttgtcctgaggagccacagttgcgcatgaagaataatgaagaagccgaggattacgacgacgatctcaccgattctgagatggacgtggtgaggtttgatgacgacaactctccctccatcattcaagctcggagcgtggcgaagaaacaccccaagacttgggtccactatatagcggcggaagaggaggattgggattacgctcctcttgtattggcaccagatgaccgctcatacaaaagccagtacctcaacaacggaccgcagagaattggccggaagtataagaaagtgcgatttatggcctatacagacgaaacctttaagacaagggaggccatccagcatgagagtgggattttgggacctcttctttacggcgaagttggtgataccctcctcatcatcttcaagaatcaagcttctcgcccctataacatttacccacacgggatcactgacgttaggcctttgtatagcagaagacttcccaaaggcgtgaagcatctcaaagacttccccattttgccaggcgagatctttaagtacaaatggaccgtcacagtggaagatggaccgactaaatcagaccctcgatgccttacgcggtactattcctccttcgtgaatatggagagagatttggcaagcggactcataggaccactcctcatctgttacaaggaatctgtagaccagaggggtaaccagattatgagtgataaacgcaatgtgatcctttttagcgtcttcgacgagaaccggtcctggtacttgaccgagaatatacaaaggttccttcccaaccccgcaggcgttcagttggaagaccctgagtttcaggccagcaatattatgcactcaatcaacggctatgtgtttgatagtctccagctttctgtttgcctccatgaagtagcctattggtacatcttgtcaattggtgctcaaacagacttcctctccgtcttcttctccggctacacctttaagcacaagatggtgtatgaggacactctcacactctttccattttctggagaaaccgtgttcatgagcatggagaatccaggcctttggatcttgggttgccacaacagtgattttcgcaatcggggaatgactgctctcctcaaagtcagcagctgtgataagaacacaggcgactattacgaagattcttacgaggacataagtgcctactttgactccaagaataacgccattgagcccagatcattctcccagaatcctcccgtgcttaaaaggcatcagcgcgaaatcaccagaactactcttcagtctgatcaagaggagattgactatgacgacaccataagcgtggaaatgaagaaggaggatttcgatatctatgacgaagatgagaaccagtctccgcggagctttcagaagaagacgcgacactacttcattgcagcagtcgaaaggctttgggactacggtatgtcatcatcccctcatgtgttgcgcaatagagctcagagtggaagtgttccacagttcaagaaagtcgtctttcaagagtttacagatggcagcttcacacagcctctctatcggggcgagcttaacgaacatttgggactccttggtccctatatccgagccgaagtggaggacaacattatggttacctttaggaatcaagcctctcgcccctacagcttctactcctccctcatcagttatgaggaggatcagagacaaggcgctgaaccacggaagaactttgtgaaaccgaatgagacgaagacctacttctggaaagtacagcaccacatggcccccacaaaagacgaattcgattgcaaagcatgggcgtatttttcagacgttgacttggagaaagatgtacattcaggacttattggtcctttgttggtgtgtcacactaacactctcaatccagcccatggcaggcaggtgacagtccaggaattcgctcttttctttaccatctttgatgagaccaagtcctggtacttcacggaaaacatggagcgcaattgcagagccccctgtaacatacagatggaggaccctacctttaaggaaaattatcggttccacgcaatcaacggatacattaaggatacactccctggccttgtgatggctcaggaccaacgaatcaggtggtacctcctcagcatgggttctaatgagaacatacactccattcacttttcaggacatgtgttcactgtccggaagaaagaagagtataagatggccctctacaatttgtatccaggcgtgtttgagaccgttgaaatgcttccctctaaagctggcatctggagagtagagtgcttgatcggagaacatcttcacgcaggtatgagcaccttgttcctcgtgtacagcaacaaatgtcagaccccacttggcatggccagtggacacattcgcgactttcagatcacagcatctggccagtatggacaatgggccccaaagttggctcgcctccattactccggtagcataaatgcgtggtccactaaagaacctttcagctggattaaggtcgatcttcttgcccccatgatcatccacggcattaagacacagggagcgaggcagaaattctcctccctgtacatctcacagttcattattatgtatagtttggacggcaagaagtggcaaacttatagaggtaacagtactggaacagacatggtgttcttcggcaacgttgatagctctggcatcaaacacaacatctttaatcctcccataatagctcggtacatcagattgcatccgacccactacagcattaggagtacactccgaatggagcttatgggttgcgacttgaattcctgttcaatgccactcggaatggagtctaaagccatctctgatgcacagataaccgccagtagctactttacgaacatgtttgctacgtggtcaccctctaaggcaaggcttcatttgcaaggccggtctaatgcctggagacctcaggtgaacaacccgaaagaatggctccaggtggactttcagaagaccatgaaagtaacaggtgtcactactcagggagttaagtccttggatactagcatgtatgtgaaggagttccttatttcctcatcacaagatggccaccagtggaccctcttctttcagaatggtaaggtcaaagtgtttcagggcaatcaagacagcttcacacccgtggtgaacagtcttgatcctccactcttgacacgataccttcgaatccatccacagtcttgggagcaccagattgcattgcgcatggaagtacttggatgcgaggctcaggacctctac

SEQ ID NO: 856 - protein, 1457 aa, synthetic construct
  REGION 1..1457: note = Variant of human B-domain deleted Factor VIII
MQIELSTCFFLCLLRFCFSATRRYYLGAVELSWDYMQSDLGELPVDARFPPRVPKSFPFNTSVVYKKTLFVEFTDHLFNIAKPRPPWMGLLGPTIQAEVYDTVVITLKNMASHPVSLHAVGVSYWKASEGAEYDDQTSQREKEDDKVFPGGSHTYVWQVLKENGPMASDPPCLTYSYLSHVDLVKDLNSGLIGALLVCREGSLAKEKTQTLHKFILLFAVFDEGKSWHSETKNSLMQDRDAASARAWPKMHTVNGYVNRTLPGLIGCHRKSVYWHVIGMGTTPEVHSIFLEGHTFLVRNHRQASLGISPITFLTAQTLLMDLGQFLLFCHISSHQHDGMEAYVKVDSCPEEPQLRMKNNEEAEDYDDDLTDSEMDVVRFDDDNSPSIIQARSVAKKHPKTWVHYIAAEEEDWDYAPLVLAPDDRSYKSQYLNNGPQRIGRKYKKVRFMAYTDETFKTREAIQHESGILGPLLYGEVGDTLLIIFKNQASRPYNIYPHGITDVRPLYSRRLPKGVKHLKDFPILPGEIFKYKWTVTVEDGPTKSDPRCLTRYYSSFVNMERDLASGLIGPLLICYKESVDQRGNQIMSDKRNVILFSVFDENRSWYLTENIQRFLPNPAGVQLEDPEFQASNIMHSINGYVFDSLQLSVCLHEVAYWYILSIGAQTDFLSVFFSGYTFKHKMVYEDTLTLFPFSGETVFMSMENPGLWILGCHNSDFRNRGMTALLKVSSCDKNTGDYYEDSYEDISAYFDSKNNAIEPRSFSQNPPVLKRHQREITRTTLQSDQEEIDYDDTISVEMKKEDFDIYDEDENQSPRSFQKKTRHYFIAAVERLWDYGMSSSPHVLRNRAQSGSVPQFKKVVFQEFTDGSFTQPLYRGELNEHLGLLGPYIRAEVEDNIMVTFRNQASRPYSFYSSLISYEEDQRQGAEPRKNFVKPNETKTYFWKVQHHMAPTKDEFDCKAWAYFSDVDLEKDVHSGLIGPLLVCHTNTLNPAHGRQVTVQEFALFFTIFDETKSWYFTENMERNCRAPCNIQMEDPTFKENYRFHAINGYIKDTLPGLVMAQDQRIRWYLLSMGSNENIHSIHFSGHVFTVRKKEEYKMALYNLYPGVFETVEMLPSKAGIWRVECLIGEHLHAGMSTLFLVYSNKCQTPLGMASGHIRDFQITASGQYGQWAPKLARLHYSGSINAWSTKEPFSWIKVDLLAPMIIHGIKTQGARQKFSSLYISQFIIMYSLDGKKWQTYRGNSTGTDMVFFGNVDSSGIKHNIFNPPIIARYIRLHPTHYSIRSTLRMELMGCDLNSCSMPLGMESKAISDAQITASSYFTNMFATWSPSKARLHLQGRSNAWRPQVNNPKEWLQVDFQKTMKVTGVTTQGVKSLDTSMYVKEFLISSSQDGHQWTLFFQNGKVKVFQGNQDSFTPVVNSLDPPLLTRYLRIHPQSWEHQIALRMEVLGCEAQDLY

SEQ ID NO: 857 - DNA, 4371 bp, synthetic construct
  misc_feature 1..4371: note = Variant of human B-domain deleted Factor VIII
  source 1..4371: mol_type = other DNA
atgcagattgaactgtctacctgcttcttcctctgtttgctgaggttctgctttagcgccactagacggtactaccttggcgctgtggagctgtcctgggactatatgcagagtgatttgggagagcttcccgtcgacgcacgatttcctcctcgcgttccaaagtcatttccctttaacacaagccaagtgtacaagaagacgctcttcgtcgaattcaccgatcacctgttcaatatcgccaaacccagaccaccatggatgggtcttttggggcctaccatacaagcggaggtgtatgacacagttgttatcactctcaagaacatggcttctcatccggtaagtcttcacgcagtgggcgtgtcctactggaaagcttcagaaggagccgagtatgatgatcagacatcccagagggagaaagaagacgacaaggtatttccaggtgggtctcatacctatgtgtggcaagtgctcaaagagaatggccctatggcaagcgatccgccgtgtttgacttacagctacctttcacacgttgacctcgtcaaggacctcaactccgggttgattggagccttgttggtatgcagggaaggatctcttgccaaagagaagacacagaccctccacaagtttatccttctctttgctgtgttcgatgagggcaaaagttggcatagcgaaacgaagaattccctcatgcaggatcgcgacgcagccagcgccagagcttggcccaagatgcacactgtgaacggatatgtcaataggacgcttcctggcttgattgggtgtcatcggaaaagtgtctactggcacgtgatcggaatggggacaacaccagaggtccactccatatttctcgaaggccataccttccttgttcgaaaccacagacaggcatccttggggatctctcccattacctttctcactgcccaaacgctccttatggacttgggtcagttccttctcttttgccatatcccgtcacaccagcatgatggtatggaagcttatgtgaaagtcgacagttgtcctgaggagccacagttgcgcatgaagaataatgaagaagccgaggattacgacgacgatctcaccgattctgagatggacgtggtgaggtttgatgacgacaactctccctccatcattcaagctcggagcgtggcgaagaaacaccccaagacttgggtccactatatagcggcggaagaggaggattgggattacgctcctcttgtattggcaccagatgaccgctcatacaaaagccagtacctcaacaacggaccgcagagaattggccggaagtataagaaagtgcgatttatggcctatacagacgaaacctttaagacaagggaggccatccagcatgagagtgggattttgggacctcttctttacggcgaagttggtgataccctcctcatcatcttcaagaatcaagcttctcgcccctataacatttacccacacgggatcactgacgttaggcctttgtatagcagaagacttcccaaaggcgtgaagcatctcaaagacttccccattttgccaggcgagatctttaagtacaaatggaccgtcacagtggaagatggaccgactaaatcagaccctcgatgccttacgcggtactattcctccttcgtgaatatggagagagatttggcaagcggactcataggaccactcctcatctgttacaaggaatctgtagaccagaggggtaaccagattatgagtgataaacgcaatgtgatcctttttagcgtcttcgacgagaaccggtcctggtacttgaccgagaatatacaaaggttccttcccaaccccgcaggcgttcagttggaagaccctgagtttcaggccagcaatattatgcactcaatcaacggctatgtgtttgatagtctccagctttctgtttgcctccatgaagtagcctattggtacatcttgtcaattggtgctcaaacagacttcctctccgtcttcttctccggctacacctttaagcacaagatggtgtatgaggacactctcacactctttccattttctggagaaaccgtgttcatgagcatggagaatccaggcctttggatcttgggttgccacaacagtgattttcgcaatcggggaatgactgctctcctcaaagtcagcagctgtgataagaacacaggcgactattacgaagattcttacgaggacataagtgcctacctggactccaagaataacgccattgagcccagatcattctcccagaatcctcccgtgcttaaaaggcatcagcgcgaaatcaccagaactactcttcagtctgatcaagaggagattgactatgacgacaccataagcgtggaaatgaagaaggaggatttcgatatctatgacgaagatgagaaccagtctccgcggagctttcagaagaagacgcgacactacttcattgcagcagtcgaaaggctttgggactacggtatgtcatcatcccctcatgtgttgcgcaatagagctcagagtggaagtgttccacagttcaagaaagtcgtctttcaagagtttacagatggcagcttcacacagcctctctatcggggcgagcttaacgaacatttgggactccttggtccctatatccgagccgaagtggaggacaacattatggttacctttaggaatcaagcctctcgcccctacagcttctactcctccctcatcagttatgaggaggatcagagacaaggcgctgaaccacggaagaactttgtgaaaccgaatgagacgaagacctacttctggaaagtacagcaccacatggcccccacaaaagacgaattcgattgcaaagcatgggcgtatttttcagacgttgacttggagaaagatgtacattcaggacttattggtcctttgttggtgtgtcacactaacactctcaatccagcccatggcaggcaggtgacagtccaggaattcgctcttttctttaccatctttgatgagaccaagtcctggtacttcacggaaaacatggagcgcaattgcagagccccctgtaacatacagatggaggaccctacctttaaggaaaattatcggttccacgcaatcaacggatacattatggatacactccctggccttgtgatggctcaggaccaacgaatcaggtggtacctcctcagcatgggttctaatgagaacatacactccattcacttttcaggacatgtgttcactgtccggaagaaagaagagtataagatggccctctacaatttgtatccaggcgtgtttgagaccgttgaaatgcttccctctaaagctggcatctggagagtagagtgcttgatcggagaacatcttcacgcaggtatgagcaccttgttcctcgtgtacagcaacaaatgtcagaccccacttggcatggccagtggacacattcgcgactttcagatcacagcatctggccagtatggacaatgggccccaaagttggctcgcctccattactccggtagcataaatgcgtggtccactaaagaacctttcagctggattaaggtcgatcttcttgcccccatgatcatccacggcattaagacacagggagcgaggcagaaattctcctccctgtacatctcacagttcattattatgtatagtttggacggcaagaagtggcaaacttatagaggtaacagtactggaacagacatggtgttcttcggcaacgttgatagctctggcatcaaacacaacatctttaatcctcccataatagctcggtacatcagattgcatccgacccactacagcattaggagtacactccgaatggagcttatgggttgcgacttgaattcctgttcaatgccactcggaatggagtctaaagccatctctgatgcacagataaccgccagtagctactttacgaacatgtttgctacgtggtcaccctctaaggcaaggcttcatttgcaaggccggtctaatgcctggagacctcaggtgaacaacccgaaagaatggctccaggtggactttcagaagaccatgaaagtaacaggtgtcactactcagggagttaagtccttggatactagcatgtatgtgaaggagttccttatttcctcatcacaagatggccaccagtggaccctcttctttcagaatggtaaggtcaaagtgtttcagggcaatcaagacagcttcacacccgtggtgaacagtcttgatcctccactcttgacacgataccttcgaatccatccacagtcttgggagcaccagattgcattgcgcatggaagtacttggatgcgaggctcaggacctctac

SEQ ID NO: 858 - protein, 1457 aa, synthetic construct
  REGION 1..1457: note = Variant of human B-domain deleted Factor VIII
MQIELSTCFFLCLLRFCFSATRRYYLGAVELSWDYMQSDLGELPVDARFPPRVPKSFPFNTSQVYKKTLFVEFTDHLFNIAKPRPPWMGLLGPTIQAEVYDTVVITLKNMASHPVSLHAVGVSYWKASEGAEYDDQTSQREKEDDKVFPGGSHTYVWQVLKENGPMASDPPCLTYSYLSHVDLVKDLNSGLIGALLVCREGSLAKEKTQTLHKFILLFAVFDEGKSWHSETKNSLMQDRDAASARAWPKMHTVNGYVNRTLPGLIGCHRKSVYWHVIGMGTTPEVHSIFLEGHTFLVRNHRQASLGISPITFLTAQTLLMDLGQFLLFCHIPSHQHDGMEAYVKVDSCPEEPQLRMKNNEEAEDYDDDLTDSEMDVVRFDDDNSPSIIQARSVAKKHPKTWVHYIAAEEEDWDYAPLVLAPDDRSYKSQYLNNGPQRIGRKYKKVRFMAYTDETFKTREAIQHESGILGPLLYGEVGDTLLIIFKNQASRPYNIYPHGITDVRPLYSRRLPKGVKHLKDFPILPGEIFKYKWTVTVEDGPTKSDPRCLTRYYSSFVNMERDLASGLIGPLLICYKESVDQRGNQIMSDKRNVILFSVFDENRSWYLTENIQRFLPNPAGVQLEDPEFQASNIMHSINGYVFDSLQLSVCLHEVAYWYILSIGAQTDFLSVFFSGYTFKHKMVYEDTLTLFPFSGETVFMSMENPGLWILGCHNSDFRNRGMTALLKVSSCDKNTGDYYEDSYEDISAYLDSKNNAIEPRSFSQNPPVLKRHQREITRTTLQSDQEEIDYDDTISVEMKKEDFDIYDEDENQSPRSFQKKTRHYFIAAVERLWDYGMSSSPHVLRNRAQSGSVPQFKKVVFQEFTDGSFTQPLYRGELNEHLGLLGPYIRAEVEDNIMVTFRNQASRPYSFYSSLISYEEDQRQGAEPRKNFVKPNETKTYFWKVQHHMAPTKDEFDCKAWAYFSDVDLEKDVHSGLIGPLLVCHTNTLNPAHGRQVTVQEFALFFTIFDETKSWYFTENMERNCRAPCNIQMEDPTFKENYRFHAINGYIMDTLPGLVMAQDQRIRWYLLSMGSNENIHSIHFSGHVFTVRKKEEYKMALYNLYPGVFETVEMLPSKAGIWRVECLIGEHLHAGMSTLFLVYSNKCQTPLGMASGHIRDFQITASGQYGQWAPKLARLHYSGSINAWSTKEPFSWIKVDLLAPMIIHGIKTQGARQKFSSLYISQFIIMYSLDGKKWQTYRGNSTGTDMVFFGNVDSSGIKHNIFNPPIIARYIRLHPTHYSIRSTLRMELMGCDLNSCSMPLGMESKAISDAQITASSYFTNMFATWSPSKARLHLQGRSNAWRPQVNNPKEWLQVDFQKTMKVTGVTTQGVKSLDTSMYVKEFLISSSQDGHQWTLFFQNGKVKVFQGNQDSFTPVVNSLDPPLLTRYLRIHPQSWEHQIALRMEVLGCEAQDLY

SEQ ID NO: 859 - DNA, 4371 bp, synthetic construct
  misc_feature 1..4371: note = Variant of human B-domain deleted Factor VIII
  source 1..4371: mol_type = other DNA
atgcagattgaactgtctacctgcttcttcctctgtttgctgaggttctgctttagcgccactagacggtactaccttggcgctgtggagctgtcctgggactatatgcagagtgatttgggagagcttcccgtcgacgcacgatttcctcctcgcgttccaaagtcatttccctttaacacaagcgtggtgtacaagaagacgctcttcgtcgaattcaccgatcacctgttcaatatcgccaaacccagaccaccatggatgggtcttttggggcctaccatacaagcggaggtgtatgacacagttgttatcactctcaagaacatggcttctcatccggtaagtcttcacgcagtgggcgtgtcctactggaaagcttcagaaggagccgagtatgatgatcagacatcccagagggagaaagaagacgacaaggtatttccaggtgggtctcatacctatgtgtggcaagtgctcaaagagaatggccctatggcaagcgatccgccgtgtttgacttacagctacctttcacacgttgacctcgtcaaggacctcaactccgggttgattggagccttgttggtatgcagggaaggatctcttgccaaagagaagacacagaccctccacaagtttatccttctctttgctgtgttcgatgagggcaaaagttggcatagcgaaacgaagaattccctcatgcaggatcgcgacgcagccagcgccagagcttggcccaagatgcacactgtgaacggatatgtcaataggacgcttcctggcttgattgggtgtcatcggaaaagtgtctactggcacgtgatcggaatggggacaacaccagaggtccactccatatttctcgaaggccataccttccttgttcgaaaccacagacaggcatccttggggatctctcccattacctttctcactgcccaaacgctccttatggacttgggtcagttccttctcttctgccatatctcgtcacaccagcatgatggtatggaagcttatgtgaaagtcgacagttgtcctgaggagccacagttgcgcatgaagaataatgaagaagccgaggattacgacgacgatctcaccgattctgagatggacgtggtgaggtttgatgacgacaactctccctccaccattcaagctcggagcgtggcgaagaaacaccccaagacttgggtccactatatagcggcggaagaggaggattgggattacgctcctcttgtattggcaccagatgaccgctcatacaaaagccagtacctcaacaacggaccgcagagaattggccggaagtataagaaagtgcgatttatggcctatacagacgaaacctttaagacaagggaggccatccagcatgagagtgggattttgggacctcttctttacggcgaagttggtgataccctcctcatcatcttcaagaatcaagcttctcgcccctataacatttacccacacgggatcactgacgttaggcctttgtatagcagaagacttcccaaaggcgtgaagcatctcaaagacttccccattttgccaggcgagatctttaagtacaaatggaccgtcacagtggaagatggaccgactaaatcagaccctcgatgccttacgcggtactattcctccttcgtgaatatggagagagatttggcaagcggactcataggaccactcctcatctgttacaaggaatctgtagaccagaggggtaaccagattatgagtgataaacgcaatgtgatcctttttagcgtcttcgacgagaaccggtcctggtacttgaccgagaatatacaaaggttccttcccaaccccgcaggcgttcagttggaagaccctgagtttcaggccagcaatattatgcactcaatcaacggctatgtgtttgatagtctccagctttctgtttgcctccatgaagtagcctattggtacatcttgtcaattggtgctcaaacagacttcctctccgtcttcttctccggctacacctttaagcacaagatggtgtatgaggacactctcacactctttccattttctggagaaaccgtgttcatgagcatggagaatccaggcctttggatcttgggttgccacaacagtgattttcgcaatcggggaatgactgctctcctcaaagtcagcagctgtgataagaacacaggcgactattacgaagattcttacgaggacataagtgcctactttgactccaagaataacgccattgagcccagatcattctcccagaatcctcccgtgcttaaaaggcatcagcgcgaaatcaccagaactactcttcagtctgatcaagaggagattgactatgacgacaccataagcgtggaaatgaagaaggaggatttcgatatctatgacgaagatgagaaccagtctccgcggagctttcagaagaagacgcgacactacttcattgcagcagtcgaaaggctttgggactacggtatgtcatcatcccctcatgtgttgcgcaatagagctcagagtggaagtgttccacagttcaagaaagtcgtctttcaagagtttacagatggcagcttcacacagcctctctatcggggcgagcttaacgaacatttgggactccttggtccctatatccgagccgaagtggaggacaacattatggttacctttaggaatcaagcctctcgcccctacagcttctactcctccctcatcagttatgaggaggatcagagacaaggcgctgaaccacggaagaactttgtgaaaccgaatgagacgaagacctacttctggaaagtacagcaccacatggcccccacaaaagacgaattcgattgcaaagcatgggcgtatttttcagacgttgacttggagaaagatgtacattcaggacttattggtcctttgttggtgtgtcacactaacactctcaatccagcccatggcaggcaggtgacagtccaggaattcgctcttttctttaccatctttgatgagaccaagtcctggtacttcacggaaaacatggagcgcaattgcagagccccctgtaacatacagatggaggaccctacctttaaggaaaattatcggttccacgcaatcaacggatacattatggatacactccctggccttgtgatggctcaggaccaacgaatcaggtggtacctcctcagcatgggttctaatgagaacatacactccattcacttttcaggacatgtgttcactgtccggaagaaagaagagtataagatggccctctacaatttgtatccaggcgtgtttgagaccgttgaaatgcttccctctaaagctggcatctggagagtagagtgcttgatcggagaacatcttcacgcaggtatgagcaccttgttcctcgtgtacagcaacaaatgtcagaacccacttggcatggccagtggacacattcgcgactttcagatcacagcatctggccagtatggacaatgggccccaaagttggctcgcctccattactccggtagcataaatgcgtggtccactaaagaacctgccagctggattaaggtcgatcttcttgcccccatgatcatccacggcattaagacacagggagcgaggcagaaattctcctccggttacatctcacagttcattattatgtatagtttggacggcaagaagtggcaaacttatagaggtaacagtactggaacagacatggtgttcttcggcaacgttgatagctctggcatcaaacacaacatctttaatcctcccataatagctcggtacatcagattgcatccgacccactacagcattaggagtacactccgaatggagcttatgggttgcgacttgaattcctgttcaatgccactcggaatggagtctaaagccatctctgatgcacagataaccgccagtagctactttacgaacatgtttgctacgtggtcaccctctaaggcaaggcttcatttgcaaggccggtctaatgcctggagacctcaggtgaacaacccgaaagaatggctccaggtggactttcagaagaccatgaaagtaacaggtgtcactactcagggagttaagtccttggatactagcatgtatgtgaaggagttccttatttcctcatcacaagatggccaccagtggaccctcttctttcagaatggtaaggtcaaagtgtttcagggcaatcaagacagcttcacacccgtggtgaacagtcttgatcctccactcttgacacgataccttcgaatccatccacagtcttgggagcaccagattgcattgcgcatggaagtacttggatgcgaggctcaggacctctac

SEQ ID NO: 860 - protein, 1457 aa, synthetic construct
  REGION 1..1457: note = Variant of human B-domain deleted Factor VIII
MQIELSTCFFLCLLRFCFSATRRYYLGAVELSWDYMQSDLGELPVDARFPPRVPKSFPFNTSVVYKKTLFVEFTDHLFNIAKPRPPWMGLLGPTIQAEVYDTVVITLKNMASHPVSLHAVGVSYWKASEGAEYDDQTSQREKEDDKVFPGGSHTYVWQVLKENGPMASDPPCLTYSYLSHVDLVKDLNSGLIGALLVCREGSLAKEKTQTLHKFILLFAVFDEGKSWHSETKNSLMQDRDAASARAWPKMHTVNGYVNRTLPGLIGCHRKSVYWHVIGMGTTPEVHSIFLEGHTFLVRNHRQASLGISPITFLTAQTLLMDLGQFLLFCHISSHQHDGMEAYVKVDSCPEEPQLRMKNNEEAEDYDDDLTDSEMDVVRFDDDNSPSTIQARSVAKKHPKTWVHYIAAEEEDWDYAPLVLAPDDRSYKSQYLNNGPQRIGRKYKKVRFMAYTDETFKTREAIQHESGILGPLLYGEVGDTLLIIFKNQASRPYNIYPHGITDVRPLYSRRLPKGVKHLKDFPILPGEIFKYKWTVTVEDGPTKSDPRCLTRYYSSFVNMERDLASGLIGPLLICYKESVDQRGNQIMSDKRNVILFSVFDENRSWYLTENIQRFLPNPAGVQLEDPEFQASNIMHSINGYVFDSLQLSVCLHEVAYWYILSIGAQTDFLSVFFSGYTFKHKMVYEDTLTLFPFSGETVFMSMENPGLWILGCHNSDFRNRGMTALLKVSSCDKNTGDYYEDSYEDISAYFDSKNNAIEPRSFSQNPPVLKRHQREITRTTLQSDQEEIDYDDTISVEMKKEDFDIYDEDENQSPRSFQKKTRHYFIAAVERLWDYGMSSSPHVLRNRAQSGSVPQFKKVVFQEFTDGSFTQPLYRGELNEHLGLLGPYIRAEVEDNIMVTFRNQASRPYSFYSSLISYEEDQRQGAEPRKNFVKPNETKTYFWKVQHHMAPTKDEFDCKAWAYFSDVDLEKDVHSGLIGPLLVCHTNTLNPAHGRQVTVQEFALFFTIFDETKSWYFTENMERNCRAPCNIQMEDPTFKENYRFHAINGYIMDTLPGLVMAQDQRIRWYLLSMGSNENIHSIHFSGHVFTVRKKEEYKMALYNLYPGVFETVEMLPSKAGIWRVECLIGEHLHAGMSTLFLVYSNKCQNPLGMASGHIRDFQITASGQYGQWAPKLARLHYSGSINAWSTKEPASWIKVDLLAPMIIHGIKTQGARQKFSSGYISQFIIMYSLDGKKWQTYRGNSTGTDMVFFGNVDSSGIKHNIFNPPIIARYIRLHPTHYSIRSTLRMELMGCDLNSCSMPLGMESKAISDAQITASSYFTNMFATWSPSKARLHLQGRSNAWRPQVNNPKEWLQVDFQKTMKVTGVTTQGVKSLDTSMYVKEFLISSSQDGHQWTLFFQNGKVKVFQGNQDSFTPVVNSLDPPLLTRYLRIHPQSWEHQIALRMEVLGCEAQDLY

SEQ ID NO: 861 - DNA, 4371 bp, synthetic construct
  misc_feature 1..4371: note = Variant of human B-domain deleted Factor VIII
  source 1..4371: mol_type = other DNA
atgcagattgaactgtctacctgcttcttcctctgtttgctgaggttctgctttagcgccactagacggtactaccttggcgctgtggagctgtcctgggactatatgcagagtgatttgggagagcttcccgtcgacgcacgatttcctcctcgcgttccaaagtcatttccctttaacacaagcgtagtgtacaagaagacgctcttcgtcgaattcaccgatcacctgttcaatatcgccaaacccagaccaccatggatgggtcttttggggcctaccatacaagcggaggtgtatgacacagttgttatcactctcaagaacatggcttctcatccggtaagtcttcacgcagtgggcgtgtcctactggaaagcttcagaaggagccgagtatgatgatcagacatcccagagggagaaagaagacgacaaggtatttccaggtgggtctcatacctatgtgtggcaagtgctcaaagagaatggccctatggcaagcgatccgccgtgtttgacttacagctacctttcacacgttgacctcgtcaaggacctcaactccgggttgattggagccttgttggtatgcagggaaggatctcttgccaaagagaagacacagaccctccacaagtttatccttctctttgctgtgttcgatgagggcaaaagttggcatagcgaaacgaagaattccctcatgcaggatcgcgacgcagccagcgccagagcttggcccaagatgcacactgtgaacggatatgtcaataggacgcttcctggcttgattgggtgtcatcggaaaagtgtctactggcacgtgatcggaatggggacaacaccagaggtccactccatatttctcgaaggccataccttccttgttcgaaaccacagacaggcatccttggggatctctcccattacctttctcactgcccaaacgctccttatggacttgggtcagttccttctcttttgccatatcccgtcacaccagcatgatggtatggaagcttatgtgaaagtcgacagttgtcctgaggagccacagttgcgcatgaagaataatgaagaagccgaggattacgacgacgatctcaccgattctgagatggacgtggtgaggtttgatgacgacaactctccctcccgcattcaagctcggagcgtggcgaagaaacaccccaagacttgggtccactatatagcggcggaagaggaggattgggattacgctcctcttgtattggcaccagatgaccgctcatacaaaagccagtacctcaacaacggaccgcagagaattggccggaagtataagaaagtgcgatttatggcctatacagacgaaacctttaagacaagggaggccatccagcatgagagtgggattttgggacctcttctttacggcgaagttggtgataccctcctcatcatcttcaagaatcaagcttctcgcccctataacatttacccacacgggatcactgacgttaggcctttgtatagcagaagacttcccaaaggcgtgaagcatctcaaagacttccccattttgccaggcgagatctttaagtacaaatggaccgtcacagtggaagatggaccgactaaatcagaccctcgatgccttacgcggtactattcctccttcgtgaatatggagagagatttggcaagcggactcataggaccactcctcatctgttacaaggaatctgtagaccagaggggtaaccagattatgagtgataaacgcaatgtgatcctttttagcgtcttcgacgagaaccggtcctggtacttgaccgagaatatacaaaggttccttcccaaccccgcaggcgttcagttggaagaccctgagtttcaggccagcaatattatgcactcaatcaacggctatgtgtttgatagtctccagctttctgtttgcctccatgaagtagcctattggtacatcttgtcaattggtgctcaaacagacttcctctccgtcttcttctccggctacacctttaagcacaagatggtgtatgaggacactctcacactctttccattttctggagaaaccgtgttcatgagcatggagaatccaggcctttggatcttgggttgccacaacagtgattttcgcaatcggggaatgactgctctcctcaaagtcagcagctgtgataagaacacaggcgactattacgaagattcttacgaggacataagtgcctactttgactccaagaataacgccattgagcccagatcattctcccagaatcctcccgtgcttaaaaggcatcagcgcgaaatcaccagaactactcttcagtctgatcaagaggagattgactatgacgacaccataagcgtggaaatgaagaaggaggatttcgatatctatgacgaagatgagaaccagtctccgcggagctttcagaagaagacgcgacactacttcattgcagcagtcgaaaggctttgggactacggtatgtcatcatcccctcatgtgttgcgcaatagagctcagagtggaagtgttccacagttcaagaaagtcgtctttcaagagtttacagatggcagcttcacacagcctctctatcggggcgagcttaacgaacatttgggactccttggtccctatatccgagccgaagtggaggacaacattatggttacctttaggaatcaagcctctcgcccctacagcttctactcctccctcatcagttatgaggaggatcagagacaaggcgctgaaccacggaagaactttgtgaaaccgaatgagacgaagacctacttctggaaagtacagcaccacatggcccccacaaaagacgaattcgattgcaaagcatgggcgtatttttcagacgttgacttggagaaagatgtacattcaggacttattggtcctttgttggtgtgtcacactaacactctcaatccagcccatggcaggcaggtgacagtccaggaattcgctcttttctttaccatctttgatgagaccaagtcctggtacttcacggaaaacatggagcgcaattgcagagccccctgtaacatacagatggaggaccctacctttaaggaaaattatcggttccacgcaatcaacggatacattatggatacactccctggccttgtgatggctcaggaccaacgaatcaggtggtacctcctcagcatgggttctaatgagaacatacactccattcacttttcaggacatgtgttcactgtccggaagaaagaagagtataagatggccctctacaatttgtatccaggcgtgtttgagaccgttgaaatgcttccctctaaagctggcatctggagagtagagtgcttgatcggagaacatcttcacgcaggtatgagcaccttgttcctcgtgtacagcaacaaatgtcagaccccacttggcatggccagtggacacattcgcgactttcagatcacagcatctggccagtatggacaatgggccccaaagttggctcgcctccattactccggtagcataaatgcgtggtccactaaagaacctttcagctggattaaggtcgatcttcttgcccccatgatcatccacggcattaagacacagggagcgaggcagaaaatgtcctccctgtacatctcacagttcattattatgtatagtttggacggcaagaagtggcaaacttatagaggtaacagtactggaacagacatggtgttcttcggcaacgttgatagctctggcatcaaacacaacatctttaatcctcccataatagctcggtacatcagattgcatccgacccactacagcattaggagtacactccgaatggagcttatgggttgcgacttgaattcctgttcaatgccactcggaatggagtctaaagccatctctgatgcacagataaccgccagtagctactttacgaacatgtttgctacgtggtcaccctctaaggcaaggcttcatttgcaaggccggtctaatgcctggagacctcaggtgaacaacccgaaagaatggctccaggtggactttcagaagaccatgaaagtaacaggtgtcactactcagggagttaagtccttggatactagcatgtatgtgaaggagttccttatttcctcatcacaagatggccaccagtggaccctcttctttcagaatggtaaggtcaaagtgtttcagggcaatcaagacagcttcacacccgtggtgaacagtcttgatcctccactcttgacacgataccttcgaatccatccacagtcttgggagcaccagattgcattgcgcatggaagtacttggatgcgaggctcaggacctctac

SEQ ID NO: 862 - protein, 1457 aa, synthetic construct
  REGION 1..1457: note = Variant of human B-domain deleted Factor VIII
MQIELSTCFFLCLLRFCFSATRRYYLGAVELSWDYMQSDLGELPVDARFPPRVPKSFPFNTSVVYKKTLFVEFTDHLFNIAKPRPPWMGLLGPTIQAEVYDTVVITLKNMASHPVSLHAVGVSYWKASEGAEYDDQTSQREKEDDKVFPGGSHTYVWQVLKENGPMASDPPCLTYSYLSHVDLVKDLNSGLIGALLVCREGSLAKEKTQTLHKFILLFAVFDEGKSWHSETKNSLMQDRDAASARAWPKMHTVNGYVNRTLPGLIGCHRKSVYWHVIGMGTTPEVHSIFLEGHTFLVRNHRQASLGISPITFLTAQTLLMDLGQFLLFCHIPSHQHDGMEAYVKVDSCPEEPQLRMKNNEEAEDYDDDLTDSEMDVVRFDDDNSPSRIQARSVAKKHPKTWVHYIAAEEEDWDYAPLVLAPDDRSYKSQYLNNGPQRIGRKYKKVRFMAYTDETFKTREAIQHESGILGPLLYGEVGDTLLIIFKNQASRPYNIYPHGITDVRPLYSRRLPKGVKHLKDFPILPGEIFKYKWTVTVEDGPTKSDPRCLTRYYSSFVNMERDLASGLIGPLLICYKESVDQRGNQIMSDKRNVILFSVFDENRSWYLTENIQRFLPNPAGVQLEDPEFQASNIMHSINGYVFDSLQLSVCLHEVAYWYILSIGAQTDFLSVFFSGYTFKHKMVYEDTLTLFPFSGETVFMSMENPGLWILGCHNSDFRNRGMTALLKVSSCDKNTGDYYEDSYEDISAYFDSKNNAIEPRSFSQNPPVLKRHQREITRTTLQSDQEEIDYDDTISVEMKKEDFDIYDEDENQSPRSFQKKTRHYFIAAVERLWDYGMSSSPHVLRNRAQSGSVPQFKKVVFQEFTDGSFTQPLYRGELNEHLGLLGPYIRAEVEDNIMVTFRNQASRPYSFYSSLISYEEDQRQGAEPRKNFVKPNETKTYFWKVQHHMAPTKDEFDCKAWAYFSDVDLEKDVHSGLIGPLLVCHTNTLNPAHGRQVTVQEFALFFTIFDETKSWYFTENMERNCRAPCNIQMEDPTFKENYRFHAINGYIMDTLPGLVMAQDQRIRWYLLSMGSNENIHSIHFSGHVFTVRKKEEYKMALYNLYPGVFETVEMLPSKAGIWRVECLIGEHLHAGMSTLFLVYSNKCQTPLGMASGHIRDFQITASGQYGQWAPKLARLHYSGSINAWSTKEPFSWIKVDLLAPMIIHGIKTQGARQKMSSLYISQFIIMYSLDGKKWQTYRGNSTGTDMVFFGNVDSSGIKHNIFNPPIIARYIRLHPTHYSIRSTLRMELMGCDLNSCSMPLGMESKAISDAQITASSYFTNMFATWSPSKARLHLQGRSNAWRPQVNNPKEWLQVDFQKTMKVTGVTTQGVKSLDTSMYVKEFLISSSQDGHQWTLFFQNGKVKVFQGNQDSFTPVVNSLDPPLLTRYLRIHPQSWEHQIALRMEVLGCEAQDLY

SEQ ID NO: 863 - DNA, 4371 bp, synthetic construct
  misc_feature 1..4371: note = Variant of human B-domain deleted Factor VIII
  source 1..4371: mol_type = other DNA
atgcagattgaactgtctacctgcttcttcctctgtttgctgaggttctgctttagcgccactagacggtactaccttggcgctgtggagctgtcctgggactatatgcagagtgatttgggagagcttcccgtcgacgcacgatttcctcctcgcgttccaaagtcatttccctttaacacaagccaagtgtacaagaagacgctcttcgtcgaattcaccgatcacctgttcaatatcgccaaacccagaccaccatggatgggtcttttggggcctaccatacaagcggaggtgtatgacacagttgttatcactctcaagaacatggcttctcatccggtaagtcttcacgcagtgggcgtgtcctactggaaagcttcagaaggagccgagtatgatgatcagacatcccagagggagaaagaagacgacaaggtatttccaggtgggtctcatacctatgtgtggcaagtgctcaaagagaatggccctatggcaagcgatccgccgtgtttgacttacagctacctttcacacgttgacctcgtcaaggacctcaactccgggttgattggagccttgttggtatgcagggaaggatctcttgccaaagagaagacacagaccctccacaagtttatccttctctttgctgtgttcgatgagggcaaaagttggcatagcgaaacgaagaattccctcatgcaggatcgcgacgcagccagcgccagagcttggcccaagatgcacactgtgaacggatatgtcaataggacgcttcctggcttgattgggtgtcatcggaaaagtgtctactggcacgtgatcggaatggggacaacaccagaggtccactccatatttctcgaaggccataccttccttgttcgaaaccacagacaggcatccttggggatctctcccattacctttctcactgcccaaacgctccttatggacttgggtcagttccttctcttttgccatatcccgtcacaccagcatgatggtatggaagcttatgtgaaagtcgacagttgtcctgaggagccacagttgcgcatgaagaataatgaagaagccgaggattacgacgacgatctcaccgattctgagatggacgtggtgaggtttgatgacgacaactctccctccatcattcaagctcggagcgtggcgaagaaacaccccaagacttgggtccactatatagcggcggaagaggaggattgggattacgctcctcttgtattggcaccagatgaccgctcatacaaaagccagtacctcaacaacggaccgcagagaattggccggaagtataagaaagtgcgatttatggcctatacagacgaaacctttaagacaagggaggccatccagcatgagagtgggattttgggacctcttctttacggcgaagttggtgataccctcctcatcatcttcaagaatcaagcttctcgcccctataacatttacccacacgggatcactgacgttaggcctttgtatagcagaagacttcccaaaggcgtgaagcatctcaaagacttccccattttgccaggcgagatctttaagtacaaatggaccgtcacagtggaagatggaccgactaaatcagaccctcgatgccttacgcggtactattcctccttcgtgaatatggagagagatttggcaagcggactcataggaccactcctcatctgttacaaggaatctgtagaccagaggggtaaccagattatgagtgataaacgcaatgtgatcctttttagcgtcttcgacgagaaccggtcctggtacttgaccgagaatatacaaaggttccttcccaaccccgcaggcgttcagttggaagaccctgagtttcaggccagcaatattatgcactcaatcaacggctatgtgtttgatagtctccagctttctgtttgcctccatgaagtagcctattggtacatcttgtcaattggtgctcaaacagacttcctctccgtcttcttctccggctacacctttaagcacaagatggtgtatgaggacactctcacactctttccattttctggagaaaccgtgttcatgagcatggagaatccaggcctttggatcttgggttgccacaacagtgattttcgcaatcggggaatgactgctctcctcaaagtcagcagctgtgataagaacacaggcgactattacgaagattcttacgaggacataagtgcctacctggactccaagaataacgccattgagcccagatcattctcccagaatcctcccgtgcttaaaaggcatcagcgcgaaatcaccagaactactcttcagtctgatcaagaggagattgactatgacgacaccataagcgtggaaatgaagaaggaggatttcgatatctatgacgaagatgagaaccagtctccgcggagctttcagaagaagacgcgacactacttcattgcagcagtcgaaaggctttgggactacggtatgtcatcatcccctcatgtgttgcgcaatagagctcagagtggaagtgttccacagttcaagaaagtcgtctttcaagagtttacagatggcagcttcacacagcctctctatcggggcgagcttaacgaacatttgggactccttggtccctatatccgagccgaagtggaggacaacattatggttacctttaggaatcaagcctctcgcccctacagcttctactcctccctcatcagttatgaggaggatcagagacaaggcgctgaaccacggaagaactttgtgaaaccgaatgagacgaagacctacttctggaaagtacagcaccacatggcccccacaaaagacgaattcgattgcaaagcatgggcgtatttttcagacgttgacttggagaaagatgtacattcaggacttattggtcctttgttggtgtgtcacactaacactctcaatccagcccatggcaggcaggtgacagtccaggaattcgctcttttctttaccatctttgatgagaccaagtcctggtacttcacggaaaacatggagcgcaattgcagagccccctgtaacatacagatggaggaccctacctttaaggaaaattatcggttccacgcaatcaacggatacattcgtgatacactccctggccttgtgatggctcaggaccaacgaatcaggtggtacctcctcagcatgggttctaatgagaacatacactccattcacttttcaggacatgtgttcactgtccggaagaaagaagagtataagatggccctctacaatttgtatccaggcgtgtttgagaccgttgaaatgcttccctctaaagctggcatctggagagtagagtgcttgatcggagaacatcttcacgcaggtatgagcaccttgttcctcgtgtacagcaacaaatgtcagaacccacttggcatggccagtggacacattcgcgactttcagatcacagcatctggccagtatggacaatgggccccaaagttggctcgcctccattactccggtagcataaatgcgtggtccactaaagaacctgccagctggattaaggtcgatcttcttgcccccatgatcatccacggcattaagacacagggagcgaggcagaaaggttcctccctgtacatctcacagttcattattatgtatagtttggacggcaagaagtggcaaacttatagaggtaacagtactggaacagacatggtgttcttcggcaacgttgatagctctggcatcaaacacaacatctttaatcctcccataatagctcggtacatcagattgcatccgacccactacagcattaggagtacactccgaatggagcttatgggttgcgacttgaattcctgttcaatgccactcggaatggagtctaaagccatctctgatgcacagataaccgccagtagctactttacgaacatgtttgctacgtggtcaccctctaaggcaaggcttcatttgcaaggccggtctaatgcctggagacctcaggtgaacaacccgaaagaatggctccaggtggactttcagaagaccatgaaagtaacaggtgtcactactcagggagttaagtccttggatactagcatgtatgtgaaggagttccttatttcctcatcacaagatggccaccagtggaccctcttctttcagaatggtaaggtcaaagtgtttcagggcaatcaagacagcttcacacccgtggtgaacagtcttgatcctccactcttgacacgataccttcgaatccatccacagtcttgggagcaccagattgcattgcgcatggaagtacttggatgcgaggctcaggacctctac

SEQ ID NO: 864 - protein, 1457 aa, synthetic construct
  REGION 1..1457: note = Variant of human B-domain deleted Factor VIII
MQIELSTCFFLCLLRFCFSATRRYYLGAVELSWDYMQSDLGELPVDARFPPRVPKSFPFNTSQVYKKTLFVEFTDHLFNIAKPRPPWMGLLGPTIQAEVYDTVVITLKNMASHPVSLHAVGVSYWKASEGAEYDDQTSQREKEDDKVFPGGSHTYVWQVLKENGPMASDPPCLTYSYLSHVDLVKDLNSGLIGALLVCREGSLAKEKTQTLHKFILLFAVFDEGKSWHSETKNSLMQDRDAASARAWPKMHTVNGYVNRTLPGLIGCHRKSVYWHVIGMGTTPEVHSIFLEGHTFLVRNHRQASLGISPITFLTAQTLLMDLGQFLLFCHIPSHQHDGMEAYVKVDSCPEEPQLRMKNNEEAEDYDDDLTDSEMDVVRFDDDNSPSIIQARSVAKKHPKTWVHYIAAEEEDWDYAPLVLAPDDRSYKSQYLNNGPQRIGRKYKKVRFMAYTDETFKTREAIQHESGILGPLLYGEVGDTLLIIFKNQASRPYNIYPHGITDVRPLYSRRLPKGVKHLKDFPILPGEIFKYKWTVTVEDGPTKSDPRCLTRYYSSFVNMERDLASGLIGPLLICYKESVDQRGNQIMSDKRNVILFSVFDENRSWYLTENIQRFLPNPAGVQLEDPEFQASNIMHSINGYVFDSLQLSVCLHEVAYWYILSIGAQTDFLSVFFSGYTFKHKMVYEDTLTLFPFSGETVFMSMENPGLWILGCHNSDFRNRGMTALLKVSSCDKNTGDYYEDSYEDISAYLDSKNNAIEPRSFSQNPPVLKRHQREITRTTLQSDQEEIDYDDTISVEMKKEDFDIYDEDENQSPRSFQKKTRHYFIAAVERLWDYGMSSSPHVLRNRAQSGSVPQFKKVVFQEFTDGSFTQPLYRGELNEHLGLLGPYIRAEVEDNIMVTFRNQASRPYSFYSSLISYEEDQRQGAEPRKNFVKPNETKTYFWKVQHHMAPTKDEFDCKAWAYFSDVDLEKDVHSGLIGPLLVCHTNTLNPAHGRQVTVQEFALFFTIFDETKSWYFTENMERNCRAPCNIQMEDPTFKENYRFHAINGYIRDTLPGLVMAQDQRIRWYLLSMGSNENIHSIHFSGHVFTVRKKEEYKMALYNLYPGVFETVEMLPSKAGIWRVECLIGEHLHAGMSTLFLVYSNKCQNPLGMASGHIRDFQITASGQYGQWAPKLARLHYSGSINAWSTKEPASWIKVDLLAPMIIHGIKTQGARQKGSSLYISQFIIMYSLDGKKWQTYRGNSTGTDMVFFGNVDSSGIKHNIFNPPIIARYIRLHPTHYSIRSTLRMELMGCDLNSCSMPLGMESKAISDAQITASSYFTNMFATWSPSKARLHLQGRSNAWRPQVNNPKEWLQVDFQKTMKVTGVTTQGVKSLDTSMYVKEFLISSSQDGHQWTLFFQNGKVKVFQGNQDSFTPVVNSLDPPLLTRYLRIHPQSWEHQIALRMEVLGCEAQDLY

SEQ ID NO: 865 - DNA, 4371 bp, synthetic construct
  misc_feature 1..4371: note = Variant of human B-domain deleted Factor VIII
  source 1..4371: mol_type = other DNA
atgcagattgaactgtctacctgcttcttcctctgtttgctgaggttctgctttagcgccactagacggtactaccttggcgctgtggagctgtcctgggactatatgcagagtgatttgggagagcttcccgtcgacgcacgatttcctcctcgcgttccaaagtcatttccctttaacacaagcgtggtgtacaagaagacgctcttcgtcgaattcaccgatcacctgttcaatatcgccaaacccagaccaccatggatgggtcttttggggcctaccatacaagcggaggtgtatgacacagttgttatcactctcaagaacatggcttctcatccggtaagtcttcacgcagtgggcgtgtcctactggaaagcttcagaaggagccgagtatgatgatcagacatcccagagggagaaagaagacgacaaggtatttccaggtgggtctcatacctatgtgtggcaagtgctcaaagagaatggccctatggcaagcgatccgccgtgtttgacttacagctacctttcacacgttgacctcgtcaaggacctcaactccgggttgattggagccttgttggtatgcagggaaggatctcttgccaaagagaagacacagaccctccacaagtttatccttctctttgctgtgttcgatgagggcaaaagttggcatagcgaaacgaagaattccctcatgcaggatcgcgacgcagccagcgccagagcttggcccaagatgcacactgtgaacggatatgtcaataggacgcttcctggcttgattgggtgtcatcggaaaagtgtctactggcacgtgatcggaatggggacaacaccagaggtccactccatatttctcgaaggccataccttccttgttcgaaaccacagacaggcatccttggagatctctcccattacctttctcactgcccaaacgctccttatggacttgggtcagttccttctcttctgccatatcagctcacaccagcatgatggtatggaagcttatgtgaaagtcgacagttgtcctgaggagccacagttgcgcatgaagaataatgaagaagccgaggattacgacgacgatctcaccgattctgagatggacgtggtgaggtttgatgacgacaactctccctccatcattcaaatccggagcgtggcgaagaaacaccccaagacttgggtccactatatagcggcggaagaggaggattgggattacgctcctcttgtattggcaccagatgaccgctcatacaaaagccagtacctcaacaacggaccgcagagaattggccggaagtataagaaagtgcgatttatggcctatacagacgaaacctttaagacaagggaggccatccagcatgagagtgggattttgggacctcttctttacggcgaagttggtgataccctcctcatcatcttcaagaatcaagcttctcgcccctataacatttacccacacgggatcactgacgttaggcctttgtatagcagaagacttcccaaaggcgtgaagcatctcaaagacttccccattttgccaggcgagatctttaagtacaaatggaccgtcacagtggaagatggaccgactaaatcagaccctcgatgccttacgcggtactattcctccttcgtgaatatggagagagatttggcaagcggactcataggaccactcctcatctgttacaaggaatctgtagaccagaggggtaaccagattatgagtgataaacgcaatgtgatcctttttagcgtcttcgacgagaaccggtcctggtacttgaccgagaatatacaaaggttccttcccaaccccgcaggcgttcagttggaagaccctgagtttcaggccagcaatattatgcactcaatcaacggctatgtgtttgatagtctccagctttctgtttgcctccatgaagtagcctattggtacatcttgtcaattggtgctcaaacagacttcctctccgtcttcttctccggctacacctttaagcacaagatggtgtatgaggacactctcacactctttccattttctggagaaaccgtgttcatgagcatggagaatccaggcctttggatcttgggttgccacaacagtgattttcgcaatcggggaatgactgctctcctcaaagtcagcagctgtgataagaacacaggcgactattacgaagattcttacgaggacataagtgcctacttggactccaagaataacgccattgagcccagatcattctcccagaatcctcccgtgcttaaaaggcatcagcgcgaaatcaccagaactactcttcagtctgatcaagaggagattgactatgacgacaccataagcgtggaaatgaagaaggaggatttcgatatctatgacgaagatgagaaccagtctccgcggagctttcagaagaagacgcgacactacttcattgcagcagtcgaaaggctttgggactacggtatgtcatcatcccctcatgtgttgcgcaatagagctcagagtggaagtgttccacagttcaagaaagtcgtctttcaagagtttacagatggcagcttcacacagcctctctatcggggcgagcttaacgaacatttgggactccttggtccctatatccgagccgaagtggaggacaacattatggttacctttaggaatcaagcctctcgcccctacagcttctactcctccctcatcagttatgaggaggatcagagacaaattgctgaaccacggaagaactttgtgaaaccgaatgagacgaagacctacttctggaaagtacagcaccacatggcccccacaaaagacgaattcgattgcaaagcatgggcgtatttttcagacgttgacttggagaaagatgtacattcaggacttattggtcctttgttggtgtgtcacactaacactctcaatccagcccatggcaggcaggtgacagtccaggaattcgctcttttctttaccatctttgatgagaccaagtcctggtacttcacggaaaacatggagcgcaattgcagagccccctgtaacatacagatggaggaccctacctttaaggaaaattatcggttccacgcaatcaacggatacattatggatacactccctggccttgtgatggctcaggaccaacgaatcaggtggtacctcctcagcatgggttctaatgagaacatacactccattcacttttcaggacatgtgttcactgtccggaagaaagaagagtataagatggccctctacaatttgtatccaggcgtgtttgagaccgttgaaatgcttccctctaaagctggcatctggagagtagagtgcttgatcggagaacatcttcacgcaggtatgagcaccttgttcctcgtgtacagcaacaaatgtcagaccccacttggcatggccagtggacacattcgcgactttcagatcacagcatctggccagtatggacaatgggccccaaagttggctcgcctccattactccggtagcataaatgcgtggtccactaaagaacctttcagctggattaaggtcgatcttcttgcccccatgatcatccacggcattaagacacagggagcgaggcagaaattctcctccctctacatctcacagttcattattatgtatagtttggacggcaagaagtggcaaacttatagaggtaacagtactggaacagacatggtgttcttcggcaacgttgatagctctggcatcaaacacaacatctttaatcctcccataatagctcggtacatcagattgcatccgacccactacagcattaggagtacactccgaatggagcttatgggttgcgacttgaattcctgttcaatgccactcggaatggagtctaaagccatctctgatgcacagataaccgccagtagctactttacgaacatgtttgctacgtggtcaccctctaaggcaaggcttcatttgcaaggccggtctaatgcctggagacctcaggtgaacaacccgaaagaatggctccaggtggactttcagaagaccatgaaagtaacaggtgtcactactcagggagttaagtccttggatactagcatgtatgtgaaggagttccttatttcctcatcacaagatggccaccagtggaccctcttctttcagaatggtaaggtcaaagtgtttcagggcaatcaagacagcttcacacccgtggtgaacagtcttgatcctccactcttgacacgataccttcgaatccatccacagtcttgggagcaccagattgcattgcgcatggaagtacttggatgcgaggctcaggacctctac

SEQ ID NO: 866 - protein, 1457 aa, synthetic construct
  REGION 1..1457: note = Variant of human B-domain deleted Factor VIII
MQIELSTCFFLCLLRFCFSATRRYYLGAVELSWDYMQSDLGELPVDARFPPRVPKSFPFNTSVVYKKTLFVEFTDHLFNIAKPRPPWMGLLGPTIQAEVYDTVVITLKNMASHPVSLHAVGVSYWKASEGAEYDDQTSQREKEDDKVFPGGSHTYVWQVLKENGPMASDPPCLTYSYLSHVDLVKDLNSGLIGALLVCREGSLAKEKTQTLHKFILLFAVFDEGKSWHSETKNSLMQDRDAASARAWPKMHTVNGYVNRTLPGLIGCHRKSVYWHVIGMGTTPEVHSIFLEGHTFLVRNHRQASLEISPITFLTAQTLLMDLGQFLLFCHISSHQHDGMEAYVKVDSCPEEPQLRMKNNEEAEDYDDDLTDSEMDVVRFDDDNSPSIIQIRSVAKKHPKTWVHYIAAEEEDWDYAPLVLAPDDRSYKSQYLNNGPQRIGRKYKKVRFMAYTDETFKTREAIQHESGILGPLLYGEVGDTLLIIFKNQASRPYNIYPHGITDVRPLYSRRLPKGVKHLKDFPILPGEIFKYKWTVTVEDGPTKSDPRCLTRYYSSFVNMERDLASGLIGPLLICYKESVDQRGNQIMSDKRNVILFSVFDENRSWYLTENIQRFLPNPAGVQLEDPEFQASNIMHSINGYVFDSLQLSVCLHEVAYWYILSIGAQTDFLSVFFSGYTFKHKMVYEDTLTLFPFSGETVFMSMENPGLWILGCHNSDFRNRGMTALLKVSSCDKNTGDYYEDSYEDISAYLDSKNNAIEPRSFSQNPPVLKRHQREITRTTLQSDQEEIDYDDTISVEMKKEDFDIYDEDENQSPRSFQKKTRHYFIAAVERLWDYGMSSSPHVLRNRAQSGSVPQFKKVVFQEFTDGSFTQPLYRGELNEHLGLLGPYIRAEVEDNIMVTFRNQASRPYSFYSSLISYEEDQRQIAEPRKNFVKPNETKTYFWKVQHHMAPTKDEFDCKAWAYFSDVDLEKDVHSGLIGPLLVCHTNTLNPAHGRQVTVQEFALFFTIFDETKSWYFTENMERNCRAPCNIQMEDPTFKENYRFHAINGYIMDTLPGLVMAQDQRIRWYLLSMGSNENIHSIHFSGHVFTVRKKEEYKMALYNLYPGVFETVEMLPSKAGIWRVECLIGEHLHAGMSTLFLVYSNKCQTPLGMASGHIRDFQITASGQYGQWAPKLARLHYSGSINAWSTKEPFSWIKVDLLAPMIIHGIKTQGARQKFSSLYISQFIIMYSLDGKKWQTYRGNSTGTDMVFFGNVDSSGIKHNIFNPPIIARYIRLHPTHYSIRSTLRMELMGCDLNSCSMPLGMESKAISDAQITASSYFTNMFATWSPSKARLHLQGRSNAWRPQVNNPKEWLQVDFQKTMKVTGVTTQGVKSLDTSMYVKEFLISSSQDGHQWTLFFQNGKVKVFQGNQDSFTPVVNSLDPPLLTRYLRIHPQSWEHQIALRMEVLGCEAQDLY

SEQ ID NO: 867 - DNA, 4371 bp, synthetic construct
  misc_feature 1..4371: note = Variant of human B-domain deleted Factor VIII
  source 1..4371: mol_type = other DNA
atgcagattgaactgtctacctgcttcttcctctgtttgctgaggttctgctttagcgccactagacggtactaccttggcgctgtggagctgtcctgggactatatgcagagtgatttgggagagcttcccgtcgacgcacgatttcctcctcgcgttccaaagtcatttccctttaacacaagcgtggtgtacaagaagacgctcttcgtcgaattcaccgatcacctgttcaatatcgccaaacccagaccaccatggatgggtcttttggggcctaccatacaagcggaggtgtatgacacagttgttatcactctcaagaacatggcttctcatccggtaagtcttcacgcagtgggcgtgtcctactggaaagcttcagaaggagccgagtatgatgatcagacatcccagagggagaaagaagacgacaaggtatttccaggtgggtctcatacctatgtgtggcaagtgctcaaagagaatggccctatggcaagcgatccgccgtgtttgacttacagctacctttcacacgttgacctcgtcaaggacctcaactccgggttgattggagccttgttggtatgcagggaaggatctcttgccaaagagaagacacagaccctccacaagtttatccttctctttgctgtgttcgatgagggcaaaagttggcatagcgaaacgaagaattccctcatgcaggatcgcgacgcagccagcgccagagcttggcccaagatgcacactgtgaacggatatgtcaataggacgcttcctggcttgattgggtgtcatcggaaaagtgtctactggcacgtgatcggaatggggacaacaccagaggtccactccatatttctcgaaggccataccttccttgttcgaaaccacagacaggcatccttggagatctctcccattacctttctcactgcccaaacgctccttatggacttgggtcagttccttctcttctgccatatcagctcacaccagcatgatggtatggaagcttatgtgaaagtcgacagttgtcctgaggagccacagttgcgcatgaagaataatgaagaagccgaggattacgacgacgatctcaccgattctgagatggacgtggtgaggtttgatgacgacaactctccctccatcattcaaatccggagcgtggcgaagaaacaccccaagacttgggtccactatatagcggcggaagaggaggattgggattacgctcctcttgtattggcaccagatgaccgctcatacaaaagccagtacctcaacaacggaccgcagagaattggccggaagtataagaaagtgcgatttatggcctatacagacgaaacctttaagacaagggaggccatccagcatgagagtgggattttgggacctcttctttacggcgaagttggtgataccctcctcatcatcttcaagaatcaagcttctcgcccctataacatttacccacacgggatcactgacgttaggcctttgtatagcagaagacttcccaaaggcgtgaagcatctcaaagacttccccattttgccaggcgagatctttaagtacaaatggaccgtcacagtggaagatggaccgactaaatcagaccctcgatgccttacgcggtactattcctccttcgtgaatatggagagagatttggcaagcggactcataggaccactcctcatctgttacaaggaatctgtagaccagaggggtaaccagattatgagtgataaacgcaatgtgatcctttttagcgtcttcgacgagaaccggtcctggtacttgaccgagaatatacaaaggttccttcccaaccccgcaggcgttcagttggaagaccctgagtttcaggccagcaatattatgcactcaatcaacggctatgtgtttgatagtctccagctttctgtttgcctccatgaagtagcctattggtacatcttgtcaattggtgctcaaacagacttcctctccgtcttcttctccggctacacctttaagcacaagatggtgtatgaggacactctcacactctttccattttctggagaaaccgtgttcatgagcatggagaatccaggcctttggatcttgggttgccacaacagtgattttcgcaatcggggaatgactgctctcctcaaagtcagcagctgtgataagaacacaggcgactattacgaagattcttacgaggacataagtgcctacttggactccaagaataactctattgagcccagatcattctcccagaatcctcccgtgcttaaaaggcatcagcgcgaaatcaccagaactactcttcagtctgatcaagaggagattgactatgacgacaccataagcgtggaaatgaagaaggaggatttcgatatctatgacgaagatgagaaccagtctccgcggagctttcagaagaagacgcgacactacttcattgcagcagtcgaaaggctttgggactacggtatgtcatcatcccctcatgtgttgcgcaatagagctcagagtggaagtgttccacagttcaagaaagtcgtctttcaagagtttacagatggcagcttcacacagcctctctatcggggcgagcttaacgaacatttgggactccttggtccctatatccgagccgaagtggaggacaacattatggttacctttaggaatcaagcctctcgcccctacagcttctactcctccctcatcagttatgaggaggatcagagacaaggcgctgaaccacggaagaactttgtgaaaccgaatgagacgaagacctacttctggaaagtacagcaccacatggcccccacaaaagacgaattcgattgcaaagcatgggcgtatttttcagacgttgacttggagaaagatgtacattcaggacttattggtcctttgttggtgtgtcacactaacactctcaatccagcccatggcaggcaggtgacagtccaggaattcgctcttttctttaccatctttgatgagaccaagtcctggtacttcacggaaaacatggagcgcaattgcagagccccctgtaacatacagatggaggaccctacctttaaggaaaattatcggttccacgcaatcaacggatacattatggatacactccctggccttgtgatggctcaggaccaacgaatcaggtggtacctcctcagcatgggttctaatgagaacatacactccattcacttttcaggacatgtgttcactgtccggaagaaagaagagtataagatggccctctacaatttgtatccaggcgtgtttgagaccgttgaaatgcttccctctaaagctggcatctggagagtagagtgcttgatcggagaacatcttcacgcaggtatgagcaccttgttcctcgtgtacagcaacaaatgtcagaccccacttggcatggccagtggacacattcgcgactttcagatcacagcatctggccagtatggacaatgggccccaaagttggctcgcctccattactccggtagcataaatgcgtggtccactaaagaacctttcagctggattaaggtcgatcttcttgcccccatgatcatccacggcattaagacacagggagcgaggcagaaattctcctccctctacatctcacagttcattattatgtatagtttggacggcaagaagtggcaaacttatagaggtaacagtactggaacagacatggtgttcttcggcaacgttgatagctctggcatcaaacacaacatctttaatcctcccataatagctcggtacatcagattgcatccgacccactacagcattaggagtacactccgaatggagcttatgggttgcgacttgaattcctgttcaatgccactcggaatggagtctaaagccatctctgatgcacagataaccgccagtagctactttacgaacatgtttgctacgtggtcaccctctaaggcaaggcttcatttgcaaggccggtctaatgcctggagacctcaggtgaacaacccgaaagaatggctccaggtggactttcagaagaccatgaaagtaacaggtgtcactactcagggagttaagtccttggatactagcatgtatgtgaaggagttccttatttcctcatcacaagatggccaccagtggaccctcttctttcagaatggtaaggtcaaagtgtttcagggcaatcaagacagcttcacacccgtggtgaacagtcttgatcctccactcttgacacgataccttcgaatccatccacagtcttgggagcaccagattgcattgcgcatggaagtacttggatgcgaggctcaggacctctac

SEQ ID NO: 868 - protein, 1457 aa, synthetic construct
  REGION 1..1457: note = Variant of human B-domain deleted Factor VIII
MQIELSTCFFLCLLRFCFSATRRYYLGAVELSWDYMQSDLGELPVDARFPPRVPKSFPFNTSVVYKKTLFVEFTDHLFNIAKPRPPWMGLLGPTIQAEVYDTVVITLKNMASHPVSLHAVGVSYWKASEGAEYDDQTSQREKEDDKVFPGGSHTYVWQVLKENGPMASDPPCLTYSYLSHVDLVKDLNSGLIGALLVCREGSLAKEKTQTLHKFILLFAVFDEGKSWHSETKNSLMQDRDAASARAWPKMHTVNGYVNRTLPGLIGCHRKSVYWHVIGMGTTPEVHSIFLEGHTFLVRNHRQASLEISPITFLTAQTLLMDLGQFLLFCHISSHQHDGMEAYVKVDSCPEEPQLRMKNNEEAEDYDDDLTDSEMDVVRFDDDNSPSIIQIRSVAKKHPKTWVHYIAAEEEDWDYAPLVLAPDDRSYKSQYLNNGPQRIGRKYKKVRFMAYTDETFKTREAIQHESGILGPLLYGEVGDTLLIIFKNQASRPYNIYPHGITDVRPLYSRRLPKGVKHLKDFPILPGEIFKYKWTVTVEDGPTKSDPRCLTRYYSSFVNMERDLASGLIGPLLICYKESVDQRGNQIMSDKRNVILFSVFDENRSWYLTENIQRFLPNPAGVQLEDPEFQASNIMHSINGYVFDSLQLSVCLHEVAYWYILSIGAQTDFLSVFFSGYTFKHKMVYEDTLTLFPFSGETVFMSMENPGLWILGCHNSDFRNRGMTALLKVSSCDKNTGDYYEDSYEDISAYLDSKNNSIEPRSFSQNPPVLKRHQREITRTTLQSDQEEIDYDDTISVEMKKEDFDIYDEDENQSPRSFQKKTRHYFIAAVERLWDYGMSSSPHVLRNRAQSGSVPQFKKVVFQEFTDGSFTQPLYRGELNEHLGLLGPYIRAEVEDNIMVTFRNQASRPYSFYSSLISYEEDQRQGAEPRKNFVKPNETKTYFWKVQHHMAPTKDEFDCKAWAYFSDVDLEKDVHSGLIGPLLVCHTNTLNPAHGRQVTVQEFALFFTIFDETKSWYFTENMERNCRAPCNIQMEDPTFKENYRFHAINGYIMDTLPGLVMAQDQRIRWYLLSMGSNENIHSIHFSGHVFTVRKKEEYKMALYNLYPGVFETVEMLPSKAGIWRVECLIGEHLHAGMSTLFLVYSNKCQTPLGMASGHIRDFQITASGQYGQWAPKLARLHYSGSINAWSTKEPFSWIKVDLLAPMIIHGIKTQGARQKFSSLYISQFIIMYSLDGKKWQTYRGNSTGTDMVFFGNVDSSGIKHNIFNPPIIARYIRLHPTHYSIRSTLRMELMGCDLNSCSMPLGMESKAISDAQITASSYFTNMFATWSPSKARLHLQGRSNAWRPQVNNPKEWLQVDFQKTMKVTGVTTQGVKSLDTSMYVKEFLISSSQDGHQWTLFFQNGKVKVFQGNQDSFTPVVNSLDPPLLTRYLRIHPQSWEHQIALRMEVLGCEAQDLY

SEQ ID NO: 869 - DNA, 4371 bp, synthetic construct
  misc_feature 1..4371: note = Variant of human B-domain deleted Factor VIII
  source 1..4371: mol_type = other DNA
atgcagattgaactgtctacctgcttcttcctctgtttgctgaggttctgctttagcgccactagacggtactaccttggcgctgtggagctgtcctgggactatatgcagagtgatttgggagagcttcccgtcgacgcacgatttcctcctcgcgttccaaagtcatttccctttaacacaagcgtggtgtacaagaagacgctcttcgtcgaattcaccgatcacctgttcaatatcgccaaacccagaccaccatggatgggtcttttggggcctaccatacaagcggaggtgtatgacacagttgttatcactctcaagaacatggcttctcatccggtaagtcttcacgcagtgggcgtgtcctactggaaagcttcagaaggagccgagtatgatgatcagacatcccagagggagaaagaagacgacaaggtatttccaggtgggtctcatacctatgtgtggcaagtgctcaaagagaatggccctatggcaagcgatccgccgtgtttgacttacagctacctttcacacgttgacctcgtcaaggacctcaactccgggttgattggagccttgttggtatgcagggaaggatctcttgccaaagagaagacacagaccctccacaagtttatccttctctttgctgtgttcgatgagggcaaaagttggcatagcgaaacgaagaattccctcatgcaggatcgcgacgcagccagcgccagagcttggcccaagatgcacactgtgaacggatatgtcaataggacgcttcctggcttgattgggtgtcatcggaaaagtgtctactggcacgtgatcggaatggggacaacaccagaggtccactccatatttctcgaaggccataccttccttgttcgaaaccacagacaggcatccttggagatctctcccattacctttctcactgcccaaacgctccttatggacttgggtcagttccttctcttctgccatatcagctcacaccagcatgatggtatggaagcttatgtgaaagtcgacagttgtcctgaggagccacagttgcgcatgaagaataatgaagaagccgaggattacgacgacgatctcaccgattctgagatggacgtggtgaggtttgatgacgacaactctccctccatcattcaaatccggagcgtggcgaagaaacaccccaagacttgggtccactatatagcggcggaagaggaggattgggattacgctcctcttgtattggcaccagatgaccgctcatacaaaagccagtacctcaacaacggaccgcagagaattggccggaagtataagaaagtgcgatttatggcctatacagacgaaacctttaagacaagggaggccatccagcatgagagtgggattttgggacctcttctttacggcgaagttggtgataccctcctcatcatcttcaagaatcaagcttctcgcccctataacatttacccacacgggatcactgacgttaggcctttgtatagcagaagacttcccaaaggcgtgaagcatctcaaagacttccccattttgccaggcgagatctttaagtacaaatggaccgtcacagtggaagatggaccgactaaatcagaccctcgatgccttacgcggtactattcctccttcgtgaatatggagagagatttggcaagcggactcataggaccactcctcatctgttacaaggaatctgtagaccagaggggtaaccagattatgagtgataaacgcaatgtgatcctttttagcgtcttcgacgagaaccggtcctggtacttgaccgagaatatacaaaggttccttcccaaccccgcaggcgttcagttggaagaccctgagtttcaggccagcaatattatgcactcaatcaacggctatgtgtttgatagtctccagctttctgtttgcctccatgaagtagcctattggtacatcttgtcaattggtgctcaaacagacttcctctccgtcttcttctccggctacacctttaagcacaagatggtgtatgaggacactctcacactctttccattttctggagaaaccgtgttcatgagcatggagaatccaggcctttggatcttgggttgccacaacagtgattttcgcaatcggggaatgactgctctcctcaaagtcagcagctgtgataagaacacaggcgactattacgaagattcttacgaggacataagtgcctacttggactcctttaataacgccattgagcccagatcattctcccagaatcctcccgtgcttaaaaggcatcagcgcgaaatcaccagaactactcttcagtctgatcaagaggagattgactatgacgacaccataagcgtggaaatgaagaaggaggatttcgatatctatgacgaagatgagaaccagtctccgcggagctttcagaagaagacgcgacactacttcattgcagcagtcgaaaggctttgggactacggtatgtcatcatcccctcatgtgttgcgcaatagagctcagagtggaagtgttccacagttcaagaaagtcgtctttcaagagtttacagatggcagcttcacacagcctctctatcggggcgagcttaacgaacatttgggactccttggtccctatatccgagccgaagtggaggacaacattatggttacctttaggaatcaagcctctcgcccctacagcttctactcctccctcatcagttatgaggaggatcagagacaaggcgctgaaccacggaagaactttgtgaaaccgaatgagacgaagacctacttctggaaagtacagcaccacatggcccccacaaaagacgaattcgattgcaaagcatgggcgtatttttcagacgttgacttggagaaagatgtacattcaggacttattggtcctttgttggtgtgtcacactaacactctcaatccagcccatggcaggcaggtgacagtccaggaattcgctcttttctttaccatctttgatgagaccaagtcctggtacttcacggaaaacatggagcgcaattgcagagccccctgtaacatacagatggaggaccctacctttaaggaaaattatcggttccacgcaatcaacggatacattatggatacactccctggccttgtgatggctcaggaccaacgaatcaggtggtacctcctcagcatgggttctaatgagaacatacactccattcacttttcaggacatgtgttcactgtccggaagaaagaagagtataagatggccctctacaatttgtatccaggcgtgtttgagaccgttgaaatgcttccctctaaagctggcatctggagagtagagtgcttgatcggagaacatcttcacgcaggtatgagcaccttgttcctcgtgtacagcaacaaatgtcagaccccacttggcatggccagtggacacattcgcgactttcagatcacagcatctggccagtatggacaatgggccccaaagttggctcgcctccattactccggtagcataaatgcgtggtccactaaagaacctttcagctggattaaggtcgatcttcttgcccccatgatcatccacggcattaagacacagggagcgaggcagaaattctcctccctctacatctcacagttcattattatgtatagtttggacggcaagaagtggcaaacttatagaggtaacagtactggaacagacatggtgttcttcggcaacgttgatagctctggcatcaaacacaacatctttaatcctcccataatagctcggtacatcagattgcatccgacccactacagcattaggagtacactccgaatggagcttatgggttgcgacttgaattcctgttcaatgccactcggaatggagtctaaagccatctctgatgcacagataaccgccagtagctactttacgaacatgtttgctacgtggtcaccctctaaggcaaggcttcatttgcaaggccggtctaatgcctggagacctcaggtgaacaacccgaaagaatggctccaggtggactttcagaagaccatgaaagtaacaggtgtcactactcagggagttaagtccttggatactagcatgtatgtgaaggagttccttatttcctcatcacaagatggccaccagtggaccctcttctttcagaatggtaaggtcaaagtgtttcagggcaatcaagacagcttcacacccgtggtgaacagtcttgatcctccactcttgacacgataccttcgaatccatccacagtcttgggagcaccagattgcattgcgcatggaagtacttggatgcgaggctcaggacctctac

SEQ ID NO: 870 - protein, 1457 aa, synthetic construct
  REGION 1..1457: note = Variant of human B-domain deleted Factor VIII
MQIELSTCFFLCLLRFCFSATRRYYLGAVELSWDYMQSDLGELPVDARFPPRVPKSFPFNTSVVYKKTLFVEFTDHLFNIAKPRPPWMGLLGPTIQAEVYDTVVITLKNMASHPVSLHAVGVSYWKASEGAEYDDQTSQREKEDDKVFPGGSHTYVWQVLKENGPMASDPPCLTYSYLSHVDLVKDLNSGLIGALLVCREGSLAKEKTQTLHKFILLFAVFDEGKSWHSETKNSLMQDRDAASARAWPKMHTVNGYVNRTLPGLIGCHRKSVYWHVIGMGTTPEVHSIFLEGHTFLVRNHRQASLEISPITFLTAQTLLMDLGQFLLFCHISSHQHDGMEAYVKVDSCPEEPQLRMKNNEEAEDYDDDLTDSEMDVVRFDDDNSPSIIQIRSVAKKHPKTWVHYIAAEEEDWDYAPLVLAPDDRSYKSQYLNNGPQRIGRKYKKVRFMAYTDETFKTREAIQHESGILGPLLYGEVGDTLLIIFKNQASRPYNIYPHGITDVRPLYSRRLPKGVKHLKDFPILPGEIFKYKWTVTVEDGPTKSDPRCLTRYYSSFVNMERDLASGLIGPLLICYKESVDQRGNQIMSDKRNVILFSVFDENRSWYLTENIQRFLPNPAGVQLEDPEFQASNIMHSINGYVFDSLQLSVCLHEVAYWYILSIGAQTDFLSVFFSGYTFKHKMVYEDTLTLFPFSGETVFMSMENPGLWILGCHNSDFRNRGMTALLKVSSCDKNTGDYYEDSYEDISAYLDSFNNAIEPRSFSQNPPVLKRHQREITRTTLQSDQEEIDYDDTISVEMKKEDFDIYDEDENQSPRSFQKKTRHYFIAAVERLWDYGMSSSPHVLRNRAQSGSVPQFKKVVFQEFTDGSFTQPLYRGELNEHLGLLGPYIRAEVEDNIMVTFRNQASRPYSFYSSLISYEEDQRQGAEPRKNFVKPNETKTYFWKVQHHMAPTKDEFDCKAWAYFSDVDLEKDVHSGLIGPLLVCHTNTLNPAHGRQVTVQEFALFFTIFDETKSWYFTENMERNCRAPCNIQMEDPTFKENYRFHAINGYIMDTLPGLVMAQDQRIRWYLLSMGSNENIHSIHFSGHVFTVRKKEEYKMALYNLYPGVFETVEMLPSKAGIWRVECLIGEHLHAGMSTLFLVYSNKCQTPLGMASGHIRDFQITASGQYGQWAPKLARLHYSGSINAWSTKEPFSWIKVDLLAPMIIHGIKTQGARQKFSSLYISQFIIMYSLDGKKWQTYRGNSTGTDMVFFGNVDSSGIKHNIFNPPIIARYIRLHPTHYSIRSTLRMELMGCDLNSCSMPLGMESKAISDAQITASSYFTNMFATWSPSKARLHLQGRSNAWRPQVNNPKEWLQVDFQKTMKVTGVTTQGVKSLDTSMYVKEFLISSSQDGHQWTLFFQNGKVKVFQGNQDSFTPVVNSLDPPLLTRYLRIHPQSWEHQIALRMEVLGCEAQDLY

SEQ ID NO: 871 - DNA, 4371 bp, synthetic construct
  misc_feature 1..4371: note = Variant of human B-domain deleted Factor VIII
  source 1..4371: mol_type = other DNA
atgcagattgaactgtctacctgcttcttcctctgtttgctgaggttctgctttagcgccactagacggtactaccttggcgctgtggagctgtcctgggactatatgcagagtgatttgggagagcttcccgtcgacgcacgatttcctcctcgcgttccaaagtcatttccctttaacacaagcgtggtgtacaagaagacgctcttcgtcgaattcaccgatcacctgttcaatatcgccaaacccagaccaccatggatgggtcttttggggcctaccatacaagcggaggtgtatgacacagttgttatcactctcaagaacatggcttctcatccggtaagtcttcacgcagtgggcgtgtcctactggaaagcttcagaaggagccgagtatgatgatcagacatcccagagggagaaagaagacgacaaggtatttccaggtgggtctcatacctatgtgtggcaagtgctcaaagagaatggccctatggcaagcgatccgccgtgtttgacttacagctacctttcacacgttgacctcgtcaaggacctcaactccgggttgattggagccttgttggtatgcagggaaggatctcttgccaaagagaagacacagaccctccacaagtttatccttctctttgctgtgttcgatgagggcaaaagttggcatagcgaaacgaagaattccctcatgcaggatcgcgacgcagccagcgccagagcttggcccaagatgcacactgtgaacggatatgtcaataggacgcttcctggcttgattgggtgtcatcggaaaagtgtctactggcacgtgatcggaatggggacaacaccagaggtccactccatatttctcgaaggccataccttccttgttcgaaaccacagacaggcatccttggagatctctcccattacctttctcactgcccaaacgctccttatggacttgggtcagttccttctcttctgccatatcagctcacaccagcatgatggtatggaagcttatgtgaaagtcgacagttgtcctgaggagccacagttgcgcatgaagaataatgaagaagccgaggattacgacgacgatctcaccgattctgagatggacgtggtgaggtttgatgacgacaactctccctccatcattcaaatccggagcgtggcgaagaaacaccccaagacttgggtccactatatagcggcggaagaggaggattgggattacgctcctcttgtattggcaccagatgaccgctcatacaaaagccagtacctcaacaacggaccgcagagaattggccggaagtataagaaagtgcgatttatggcctatacagacgaaacctttaagacaagggaggccatccagcatgagagtgggattttgggacctcttctttacggcgaagttggtgataccctcctcatcatcttcaagaatcaagcttctcgcccctataacatttacccacacgggatcactgacgttaggcctttgtatagcagaagacttcccaaaggcgtgaagcatctcaaagacttccccattttgccaggcgagatctttaagtacaaatggaccgtcacagtggaagatggaccgactaaatcagaccctcgatgccttacgcggtactattcctccttcgtgaatatggagagagatttggcaagcggactcataggaccactcctcatctgttacaaggaatctgtagaccagaggggtaaccagattatgagtgataaacgcaatgtgatcctttttagcgtcttcgacgagaaccggtcctggtacttgaccgagaatatacaaaggttccttcccaaccccgcaggcgttcagttggaagaccctgagtttcaggccagcaatattatgcactcaatcaacggctatgtgtttgatagtctccagctttctgtttgcctccatgaagtagcctattggtacatcttgtcaattggtgctcaaacagacttcctctccgtcttcttctccggctacacctttaagcacaagatggtgtatgaggacactctcacactctttccattttctggagaaaccgtgttcatgagcatggagaatccaggcctttggatcttgggttgccacaacagtgattttcgcaatcggggaatgactgctctcctcaaagtcagcagctgtgataagaacacaggcgactattacgaagattcttacgaggacataagtgcctacttggactataagaataacgccattgagcccagatcattctcccagaatcctcccgtgcttaaaaggcatcagcgcgaaatcaccagaactactcttcagtctgatcaagaggagattgactatgacgacaccataagcgtggaaatgaagaaggaggatttcgatatctatgacgaagatgagaaccagtctccgcggagctttcagaagaagacgcgacactacttcattgcagcagtcgaaaggctttgggactacggtatgtcatcatcccctcatgtgttgcgcaatagagctcagagtggaagtgttccacagttcaagaaagtcgtctttcaagagtttacagatggcagcttcacacagcctctctatcggggcgagcttaacgaacatttgggactccttggtccctatatccgagccgaagtggaggacaacattatggttacctttaggaatcaagcctctcgcccctacagcttctactcctccctcatcagttatgaggaggatcagagacaaggcgctgaaccacggaagaactttgtgaaaccgaatgagacgaagacctacttctggaaagtacagcaccacatggcccccacaaaagacgaattcgattgcaaagcatgggcgtatttttcagacgttgacttggagaaagatgtacattcaggacttattggtcctttgttggtgtgtcacactaacactctcaatccagcccatggcaggcaggtgacagtccaggaattcgctcttttctttaccatctttgatgagaccaagtcctggtacttcacggaaaacatggagcgcaattgcagagccccctgtaacatacagatggaggaccctacctttaaggaaaattatcggttccacgcaatcaacggatacattatggatacactccctggccttgtgatggctcaggaccaacgaatcaggtggtacctcctcagcatgggttctaatgagaacatacactccattcacttttcaggacatgtgttcactgtccggaagaaagaagagtataagatggccctctacaatttgtatccaggcgtgtttgagaccgttgaaatgcttccctctaaagctggcatctggagagtagagtgcttgatcggagaacatcttcacgcaggtatgagcaccttgttcctcgtgtacagcaacaaatgtcagaccccacttggcatggccagtggacacattcgcgactttcagatcacagcatctggccagtatggacaatgggccccaaagttggctcgcctccattactccggtagcataaatgcgtggtccactaaagaacctttcagctggattaaggtcgatcttcttgcccccatgatcatccacggcattaagacacagggagcgaggcagaaattctcctccctctacatctcacagttcattattatgtatagtttggacggcaagaagtggcaaacttatagaggtaacagtactggaacagacatggtgttcttcggcaacgttgatagctctggcatcaaacacaacatctttaatcctcccataatagctcggtacatcagattgcatccgacccactacagcattaggagtacactccgaatggagcttatgggttgcgacttgaattcctgttcaatgccactcggaatggagtctaaagccatctctgatgcacagataaccgccagtagctactttacgaacatgtttgctacgtggtcaccctctaaggcaaggcttcatttgcaaggccggtctaatgcctggagacctcaggtgaacaacccgaaagaatggctccaggtggactttcagaagaccatgaaagtaacaggtgtcactactcagggagttaagtccttggatactagcatgtatgtgaaggagttccttatttcctcatcacaagatggccaccagtggaccctcttctttcagaatggtaaggtcaaagtgtttcagggcaatcaagacagcttcacacccgtggtgaacagtcttgatcctccactcttgacacgataccttcgaatccatccacagtcttgggagcaccagattgcattgcgcatggaagtacttggatgcgaggctcaggacctctac

SEQ ID NO: 872 - protein, 1457 aa, synthetic construct
  REGION 1..1457: note = Variant of human B-domain deleted Factor VIII
MQIELSTCFFLCLLRFCFSATRRYYLGAVELSWDYMQSDLGELPVDARFPPRVPKSFPFNTSVVYKKTLFVEFTDHLFNIAKPRPPWMGLLGPTIQAEVYDTVVITLKNMASHPVSLHAVGVSYWKASEGAEYDDQTSQREKEDDKVFPGGSHTYVWQVLKENGPMASDPPCLTYSYLSHVDLVKDLNSGLIGALLVCREGSLAKEKTQTLHKFILLFAVFDEGKSWHSETKNSLMQDRDAASARAWPKMHTVNGYVNRTLPGLIGCHRKSVYWHVIGMGTTPEVHSIFLEGHTFLVRNHRQASLEISPITFLTAQTLLMDLGQFLLFCHISSHQHDGMEAYVKVDSCPEEPQLRMKNNEEAEDYDDDLTDSEMDVVRFDDDNSPSIIQIRSVAKKHPKTWVHYIAAEEEDWDYAPLVLAPDDRSYKSQYLNNGPQRIGRKYKKVRFMAYTDETFKTREAIQHESGILGPLLYGEVGDTLLIIFKNQASRPYNIYPHGITDVRPLYSRRLPKGVKHLKDFPILPGEIFKYKWTVTVEDGPTKSDPRCLTRYYSSFVNMERDLASGLIGPLLICYKESVDQRGNQIMSDKRNVILFSVFDENRSWYLTENIQRFLPNPAGVQLEDPEFQASNIMHSINGYVFDSLQLSVCLHEVAYWYILSIGAQTDFLSVFFSGYTFKHKMVYEDTLTLFPFSGETVFMSMENPGLWILGCHNSDFRNRGMTALLKVSSCDKNTGDYYEDSYEDISAYLDYKNNAIEPRSFSQNPPVLKRHQREITRTTLQSDQEEIDYDDTISVEMKKEDFDIYDEDENQSPRSFQKKTRHYFIAAVERLWDYGMSSSPHVLRNRAQSGSVPQFKKVVFQEFTDGSFTQPLYRGELNEHLGLLGPYIRAEVEDNIMVTFRNQASRPYSFYSSLISYEEDQRQGAEPRKNFVKPNETKTYFWKVQHHMAPTKDEFDCKAWAYFSDVDLEKDVHSGLIGPLLVCHTNTLNPAHGRQVTVQEFALFFTIFDETKSWYFTENMERNCRAPCNIQMEDPTFKENYRFHAINGYIMDTLPGLVMAQDQRIRWYLLSMGSNENIHSIHFSGHVFTVRKKEEYKMALYNLYPGVFETVEMLPSKAGIWRVECLIGEHLHAGMSTLFLVYSNKCQTPLGMASGHIRDFQITASGQYGQWAPKLARLHYSGSINAWSTKEPFSWIKVDLLAPMIIHGIKTQGARQKFSSLYISQFIIMYSLDGKKWQTYRGNSTGTDMVFFGNVDSSGIKHNIFNPPIIARYIRLHPTHYSIRSTLRMELMGCDLNSCSMPLGMESKAISDAQITASSYFTNMFATWSPSKARLHLQGRSNAWRPQVNNPKEWLQVDFQKTMKVTGVTTQGVKSLDTSMYVKEFLISSSQDGHQWTLFFQNGKVKVFQGNQDSFTPVVNSLDPPLLTRYLRIHPQSWEHQIALRMEVLGCEAQDLY

SEQ ID NO: 873 - DNA, 4371 bp, synthetic construct
  misc_feature 1..4371: note = Variant of human B-domain deleted Factor VIII
  source 1..4371: mol_type = other DNA
atgcagattgaactgtctacctgcttcttcctctgtttgctgaggttctgctttagcgccactagacggtactaccttggcgctgtggagctgtcctgggactatatgcagagtgatttgggagagcttcccgtcgacgcacgatttcctcctcgcgttccaaagtcatttccctttaacacaagcgtggtgtacaagaagacgctcttcgtcgaattcaccgatcacctgttcaatatcgccaaacccagaccaccatggatgggtcttttggggcctaccatacaagcggaggtgtatgacacagttgttatcactctcaagaacatggcttctcatccggtaagtcttcacgcagtgggcgtgtcctactggaaagcttcagaaggagccgagtatgatgatcagacatcccagagggagaaagaagacgacaaggtatttccaggtgggtctcatacctatgtgtggcaagtgctcaaagagaatggccctatggcaagcgatccgccgtgtttgacttacagctacctttcacacgttgacctcgtcaaggacctcaactccgggttgattggagccttgttggtatgcagggaaggatctcttgccaaagagaagacacagaccctccacaagtttatccttctctttgctgtgttcgatgagggcaaaagttggcatagcgaaacgaagaattccctcatgcaggatcgcgacgcagccagcgccagagcttggcccaagatgcacactgtgaacggatatgtcaataggacgcttcctggcttgattgggtgtcatcggaaaagtgtctactggcacgtgatcggaatggggacaacaccagaggtccactccatatttctcgaaggccataccttccttgttcgaaaccacagacaggcatccttggagatctctcccattacctttctcactgcccaaacgctccttatggacttgggtcagttccttctcttctgccatatcagctcacaccagcatgatggtatggaagcttatgtgaaagtcgacagttgtcctgaggagccacagttgcgcatgaagaataatgaagaagccgaggattacgacgacgatctcaccgattctgagatggacgtggtgaggtttgatgacgacaactctccctccatcattcaaatccggagcgtggcgaagaaacaccccaagacttgggtccactatatagcggcggaagaggaggattgggattacgctcctcttgtattggcaccagatgaccgctcatacaaaagccagtacctcaacaacggaccgcagagaattggccggaagtataagaaagtgcgatttatggcctatacagacgaaacctttaagacaagggaggccatccagcatgagagtgggattttgggacctcttctttacggcgaagttggtgataccctcctcatcatcttcaagaatcaagcttctcgcccctataacatttacccacacgggatcactgacgttaggcctttgtatagcagaagacttcccaaaggcgtgaagcatctcaaagacttccccattttgccaggcgagatctttaagtacaaatggaccgtcacagtggaagatggaccgactaaatcagaccctcgatgccttacgcggtactattcctccttcgtgaatatggagagagatttggcaagcggactcataggaccactcctcatctgttacaaggaatctgtagaccagaggggtaaccagattatgagtgataaacgcaatgtgatcctttttagcgtcttcgacgagaaccggtcctggtacttgaccgagaatatacaaaggttccttcccaaccccgcaggcgttcagttggaagaccctgagtttcaggccagcaatattatgcactcaatcaacggctatgtgtttgatagtctccagctttctgtttgcctccatgaagtagcctattggtacatcttgtcaattggtgctcaaacagacttcctctccgtcttcttctccggctacacctttaagcacaagatggtgtatgaggacactctcacactctttccattttctggagaaaccgtgttcatgagcatggagaatccaggcctttggatcttgggttgccacaacagtgattttcgcaatcggggaatgactgctctcctcaaagtcagcagctgtgataagaacacaggcgactattacgaagattcttacgaggacataagtgcctacttggactccaagaataacgccattgagcccagatcattctcccagaatcctcccgtgcttaaaaggcatcagcgcgaaatcaccagaactactcttcagtctgatcaagaggagattgactatgacgacaccataagcgtggaaatgaagaaggaggatttcgatatctatgacgaagatgagaaccagtctccgcggagctttcagaagaagacgcgacactacttcattgcagcagtcgaaaggctttgggactacggtatgtcatcatcccctcatgtgttgcgcaatagagctcagagtggaagtgttccacagttcaagaaagtcgtctttcaagagtttacagatggcagcttcacacagcctctctatcggggcgagcttaacgaacatttgggactccttggtccctatatccgagccgaagtggaggacaacattatggttacctttaggaatcaagcctctcgcccctacagcttctactcctccctcatcagttatgaggaggatcagagaatgggcgctgaaccacggaagaactttgtgaaaccgaatgagacgaagacctacttctggaaagtacagcaccacatggcccccacaaaagacgaattcgattgcaaagcatgggcgtatttttcagacgttgacttggagaaagatgtacattcaggacttattggtcctttgttggtgtgtcacactaacactctcaatccagcccatggcaggcaggtgacagtccaggaattcgctcttttctttaccatctttgatgagaccaagtcctggtacttcacggaaaacatggagcgcaattgcagagccccctgtaacatacagatggaggaccctacctttaaggaaaattatcggttccacgcaatcaacggatacattatggatacactccctggccttgtgatggctcaggaccaacgaatcaggtggtacctcctcagcatgggttctaatgagaacatacactccattcacttttcaggacatgtgttcactgtccggaagaaagaagagtataagatggccctctacaatttgtatccaggcgtgtttgagaccgttgaaatgcttccctctaaagctggcatctggagagtagagtgcttgatcggagaacatcttcacgcaggtatgagcaccttgttcctcgtgtacagcaacaaatgtcagaccccacttggcatggccagtggacacattcgcgactttcagatcacagcatctggccagtatggacaatgggccccaaagttggctcgcctccattactccggtagcataaatgcgtggtccactaaagaacctttcagctggattaaggtcgatcttcttgcccccatgatcatccacggcattaagacacagggagcgaggcagaaattctcctccctctacatctcacagttcattattatgtatagtttggacggcaagaagtggcaaacttatagaggtaacagtactggaacagacatggtgttcttcggcaacgttgatagctctggcatcaaacacaacatctttaatcctcccataatagctcggtacatcagattgcatccgacccactacagcattaggagtacactccgaatggagcttatgggttgcgacttgaattcctgttcaatgccactcggaatggagtctaaagccatctctgatgcacagataaccgccagtagctactttacgaacatgtttgctacgtggtcaccctctaaggcaaggcttcatttgcaaggccggtctaatgcctggagacctcaggtgaacaacccgaaagaatggctccaggtggactttcagaagaccatgaaagtaacaggtgtcactactcagggagttaagtccttggatactagcatgtatgtgaaggagttccttatttcctcatcacaagatggccaccagtggaccctcttctttcagaatggtaaggtcaaagtgtttcagggcaatcaagacagcttcacacccgtggtgaacagtcttgatcctccactcttgacacgataccttcgaatccatccacagtcttgggagcaccagattgcattgcgcatggaagtacttggatgcgaggctcaggacctctac

SEQ ID NO: 874 - protein, 1457 aa, synthetic construct
  REGION 1..1457: note = Variant of human B-domain deleted Factor VIII
MQIELSTCFFLCLLRFCFSATRRYYLGAVELSWDYMQSDLGELPVDARFPPRVPKSFPFNTSVVYKKTLFVEFTDHLFNIAKPRPPWMGLLGPTIQAEVYDTVVITLKNMASHPVSLHAVGVSYWKASEGAEYDDQTSQREKEDDKVFPGGSHTYVWQVLKENGPMASDPPCLTYSYLSHVDLVKDLNSGLIGALLVCREGSLAKEKTQTLHKFILLFAVFDEGKSWHSETKNSLMQDRDAASARAWPKMHTVNGYVNRTLPGLIGCHRKSVYWHVIGMGTTPEVHSIFLEGHTFLVRNHRQASLEISPITFLTAQTLLMDLGQFLLFCHISSHQHDGMEAYVKVDSCPEEPQLRMKNNEEAEDYDDDLTDSEMDVVRFDDDNSPSIIQIRSVAKKHPKTWVHYIAAEEEDWDYAPLVLAPDDRSYKSQYLNNGPQRIGRKYKKVRFMAYTDETFKTREAIQHESGILGPLLYGEVGDTLLIIFKNQASRPYNIYPHGITDVRPLYSRRLPKGVKHLKDFPILPGEIFKYKWTVTVEDGPTKSDPRCLTRYYSSFVNMERDLASGLIGPLLICYKESVDQRGNQIMSDKRNVILFSVFDENRSWYLTENIQRFLPNPAGVQLEDPEFQASNIMHSINGYVFDSLQLSVCLHEVAYWYILSIGAQTDFLSVFFSGYTFKHKMVYEDTLTLFPFSGETVFMSMENPGLWILGCHNSDFRNRGMTALLKVSSCDKNTGDYYEDSYEDISAYLDSKNNAIEPRSFSQNPPVLKRHQREITRTTLQSDQEEIDYDDTISVEMKKEDFDIYDEDENQSPRSFQKKTRHYFIAAVERLWDYGMSSSPHVLRNRAQSGSVPQFKKVVFQEFTDGSFTQPLYRGELNEHLGLLGPYIRAEVEDNIMVTFRNQASRPYSFYSSLISYEEDQRMGAEPRKNFVKPNETKTYFWKVQHHMAPTKDEFDCKAWAYFSDVDLEKDVHSGLIGPLLVCHTNTLNPAHGRQVTVQEFALFFTIFDETKSWYFTENMERNCRAPCNIQMEDPTFKENYRFHAINGYIMDTLPGLVMAQDQRIRWYLLSMGSNENIHSIHFSGHVFTVRKKEEYKMALYNLYPGVFETVEMLPSKAGIWRVECLIGEHLHAGMSTLFLVYSNKCQTPLGMASGHIRDFQITASGQYGQWAPKLARLHYSGSINAWSTKEPFSWIKVDLLAPMIIHGIKTQGARQKFSSLYISQFIIMYSLDGKKWQTYRGNSTGTDMVFFGNVDSSGIKHNIFNPPIIARYIRLHPTHYSIRSTLRMELMGCDLNSCSMPLGMESKAISDAQITASSYFTNMFATWSPSKARLHLQGRSNAWRPQVNNPKEWLQVDFQKTMKVTGVTTQGVKSLDTSMYVKEFLISSSQDGHQWTLFFQNGKVKVFQGNQDSFTPVVNSLDPPLLTRYLRIHPQSWEHQIALRMEVLGCEAQDLY

SEQ ID NO: 875 - DNA, 4371 bp, synthetic construct
  misc_feature 1..4371: note = Variant of human B-domain deleted Factor VIII
  source 1..4371: mol_type = other DNA
atgcagattgaactgtctacctgcttcttcctctgtttgctgaggttctgctttagcgccactagacggtactaccttggcgctgtggagctgtcctgggactatatgcagagtgatttgggagagcttcccgtcgacgcacgatttcctcctcgcgttccaaagtcatttccctttaacacaagcgtggtgtacaagaagacgctcttcgtcgaattcaccgatcacctgttcaatatcgccaaacccagaccaccatggatgggtcttttggggcctaccatacaagcggaggtgtatgacacagttgttatcactctcaagaacatggcttctcatccggtaagtcttcacgcagtgggcgtgtcctactggaaagcttcagaaggagccgagtatgatgatcagacatcccagagggagaaagaagacgacaaggtatttccaggtgggtctcatacctatgtgtggcaagtgctcaaagagaatggccctatggcaagcgatccgccgtgtttgacttacagctacctttcacacgttgacctcgtcaaggacctcaactccgggttgattggagccttgttggtatgcagggaaggatctcttgccaaagagaagacacagaccctccacaagtttatccttctctttgctgtgttcgatgagggcaaaagttggcatagcgaaacgaagaattccctcatgcaggatcgcgacgcagccagcgccagagcttggcccaagatgcacactgtgaacggatatgtcaataggacgcttcctggcttgattgggtgtcatcggaaaagtgtctactggcacgtgatcggaatggggacaacaccagaggtccactccatatttctcgaaggccataccttccttgttcgaaaccacagacaggcatccttggagatctctcccattacctttctcactgcccaaacgctccttatggacttgggtcagttccttctcttctgccatatcagctcacaccagcatgatggtatggaagcttatgtgaaagtcgacagttgtcctgaggagccacagttgcgcatgaagaataatgaagaagccgaggattacgacgacgatctcaccgattctgagatggacgtggtgaggtttgatgacgacaactctccctccatcattcaaatccggagcgtggcgaagaaacaccccaagacttgggtccactatatagcggcggaagaggaggattgggattacgctcctcttgtattggcaccagatgaccgctcatacaaaagccagtacctcaacaacggaccgcagagaattggccggaagtataagaaagtgcgatttatggcctatacagacgaaacctttaagacaagggaggccatccagcatgagagtgggattttgggacctcttctttacggcgaagttggtgataccctcctcatcatcttcaagaatcaagcttctcgcccctataacatttacccacacgggatcactgacgttaggcctttgtatagcagaagacttcccaaaggcgtgaagcatctcaaagacttccccattttgccaggcgagatctttaagtacaaatggaccgtcacagtggaagatggaccgactaaatcagaccctcgatgccttacgcggtactattcctccttcgtgaatatggagagagatttggcaagcggactcataggaccactcctcatctgttacaaggaatctgtagaccagaggggtaaccagattatgagtgataaacgcaatgtgatcctttttagcgtcttcgacgagaaccggtcctggtacttgaccgagaatatacaaaggttccttcccaaccccgcaggcgttcagttggaagaccctgagtttcaggccagcaatattatgcactcaatcaacggctatgtgtttgatagtctccagctttctgtttgcctccatgaagtagcctattggtacatcttgtcaattggtgctcaaacagacttcctctccgtcttcttctccggctacacctttaagcacaagatggtgtatgaggacactctcacactctttccattttctggagaaaccgtgttcatgagcatggagaatccaggcctttggatcttgggttgccacaacagtgattttcgcaatcggggaatgactgctctcctcaaagtcagcagctgtgataagaacacaggcgactattacgaagattcttacgaggacataagtgcctacttggactccaagaataacgccattgagcccagatcattctcccagaatcctcccgtgcttaaaaggcatcagcgcgaaatcaccagaactactcttcagtctgatcaagaggagattgactatgacgacaccataagcgtggaatataagaaggaggatttcgatatctatgacgaagatgagaaccagtctccgcggagctttcagaagaagacgcgacactacttcattgcagcagtcgaaaggctttgggactacggtatgtcatcatcccctcatgtgttgcgcaatagagctcagagtggaagtgttccacagttcaagaaagtcgtctttcaagagtttacagatggcagcttcacacagcctctctatcggggcgagcttaacgaacatttgggactccttggtccctatatccgagccgaagtggaggacaacattatggttacctttaggaatcaagcctctcgcccctacagcttctactcctccctcatcagttatgaggaggatcagagacaaggcgctgaaccacggaagaactttgtgaaaccgaatgagacgaagacctacttctggaaagtacagcaccacatggcccccacaaaagacgaattcgattgcaaagcatgggcgtatttttcagacgttgacttggagaaagatgtacattcaggacttattggtcctttgttggtgtgtcacactaacactctcaatccagcccatggcaggcaggtgacagtccaggaattcgctcttttctttaccatctttgatgagaccaagtcctggtacttcacggaaaacatggagcgcaattgcagagccccctgtaacatacagatggaggaccctacctttaaggaaaattatcggttccacgcaatcaacggatacattatggatacactccctggccttgtgatggctcaggaccaacgaatcaggtggtacctcctcagcatgggttctaatgagaacatacactccattcacttttcaggacatgtgttcactgtccggaagaaagaagagtataagatggccctctacaatttgtatccaggcgtgtttgagaccgttgaaatgcttccctctaaagctggcatctggagagtagagtgcttgatcggagaacatcttcacgcaggtatgagcaccttgttcctcgtgtacagcaacaaatgtcagaccccacttggcatggccagtggacacattcgcgactttcagatcacagcatctggccagtatggacaatgggccccaaagttggctcgcctccattactccggtagcataaatgcgtggtccactaaagaacctttcagctggattaaggtcgatcttcttgcccccatgatcatccacggcattaagacacagggagcgaggcagaaattctcctccctctacatctcacagttcattattatgtatagtttggacggcaagaagtggcaaacttatagaggtaacagtactggaacagacatggtgttcttcggcaacgttgatagctctggcatcaaacacaacatctttaatcctcccataatagctcggtacatcagattgcatccgacccactacagcattaggagtacactccgaatggagcttatgggttgcgacttgaattcctgttcaatgccactcggaatggagtctaaagccatctctgatgcacagataaccgccagtagctactttacgaacatgtttgctacgtggtcaccctctaaggcaaggcttcatttgcaaggccggtctaatgcctggagacctcaggtgaacaacccgaaagaatggctccaggtggactttcagaagaccatgaaagtaacaggtgtcactactcagggagttaagtccttggatactagcatgtatgtgaaggagttccttatttcctcatcacaagatggccaccagtggaccctcttctttcagaatggtaaggtcaaagtgtttcagggcaatcaagacagcttcacacccgtggtgaacagtcttgatcctccactcttgacacgataccttcgaatccatccacagtcttgggagcaccagattgcattgcgcatggaagtacttggatgcgaggctcaggacctctac

SEQ ID NO: 876 - protein, 1457 aa, synthetic construct
  REGION 1..1457: note = Variant of human B-domain deleted Factor VIII
MQIELSTCFFLCLLRFCFSATRRYYLGAVELSWDYMQSDLGELPVDARFPPRVPKSFPFNTSVVYKKTLFVEFTDHLFNIAKPRPPWMGLLGPTIQAEVYDTVVITLKNMASHPVSLHAVGVSYWKASEGAEYDDQTSQREKEDDKVFPGGSHTYVWQVLKENGPMASDPPCLTYSYLSHVDLVKDLNSGLIGALLVCREGSLAKEKTQTLHKFILLFAVFDEGKSWHSETKNSLMQDRDAASARAWPKMHTVNGYVNRTLPGLIGCHRKSVYWHVIGMGTTPEVHSIFLEGHTFLVRNHRQASLEISPITFLTAQTLLMDLGQFLLFCHISSHQHDGMEAYVKVDSCPEEPQLRMKNNEEAEDYDDDLTDSEMDVVRFDDDNSPSIIQIRSVAKKHPKTWVHYIAAEEEDWDYAPLVLAPDDRSYKSQYLNNGPQRIGRKYKKVRFMAYTDETFKTREAIQHESGILGPLLYGEVGDTLLIIFKNQASRPYNIYPHGITDVRPLYSRRLPKGVKHLKDFPILPGEIFKYKWTVTVEDGPTKSDPRCLTRYYSSFVNMERDLASGLIGPLLICYKESVDQRGNQIMSDKRNVILFSVFDENRSWYLTENIQRFLPNPAGVQLEDPEFQASNIMHSINGYVFDSLQLSVCLHEVAYWYILSIGAQTDFLSVFFSGYTFKHKMVYEDTLTLFPFSGETVFMSMENPGLWILGCHNSDFRNRGMTALLKVSSCDKNTGDYYEDSYEDISAYLDSKNNAIEPRSFSQNPPVLKRHQREITRTTLQSDQEEIDYDDTISVEYKKEDFDIYDEDENQSPRSFQKKTRHYFIAAVERLWDYGMSSSPHVLRNRAQSGSVPQFKKVVFQEFTDGSFTQPLYRGELNEHLGLLGPYIRAEVEDNIMVTFRNQASRPYSFYSSLISYEEDQRQGAEPRKNFVKPNETKTYFWKVQHHMAPTKDEFDCKAWAYFSDVDLEKDVHSGLIGPLLVCHTNTLNPAHGRQVTVQEFALFFTIFDETKSWYFTENMERNCRAPCNIQMEDPTFKENYRFHAINGYIMDTLPGLVMAQDQRIRWYLLSMGSNENIHSIHFSGHVFTVRKKEEYKMALYNLYPGVFETVEMLPSKAGIWRVECLIGEHLHAGMSTLFLVYSNKCQTPLGMASGHIRDFQITASGQYGQWAPKLARLHYSGSINAWSTKEPFSWIKVDLLAPMIIHGIKTQGARQKFSSLYISQFIIMYSLDGKKWQTYRGNSTGTDMVFFGNVDSSGIKHNIFNPPIIARYIRLHPTHYSIRSTLRMELMGCDLNSCSMPLGMESKAISDAQITASSYFTNMFATWSPSKARLHLQGRSNAWRPQVNNPKEWLQVDFQKTMKVTGVTTQGVKSLDTSMYVKEFLISSSQDGHQWTLFFQNGKVKVFQGNQDSFTPVVNSLDPPLLTRYLRIHPQSWEHQIALRMEVLGCEAQDLY

SEQ ID NO: 877 - DNA, 4371 bp, synthetic construct
  misc_feature 1..4371: note = Variant of human B-domain deleted Factor VIII
  source 1..4371: mol_type = other DNA
atgcagattgaactgtctacctgcttcttcctctgtttgctgaggttctgctttagcgccactagacggtactaccttggcgctgtggagctgtcctgggactatatgcagagtgatttgggagagcttcccgtcgacgcacgatttcctcctcgcgttccaaagtcatttccctttaacacaagcgtggtgtacaagaagacgctcttcgtcgaattcaccgatcacctgttcaatatcgccaaacccagaccaccatggatgggtcttttggggcctaccatacaagcggaggtgtatgacacagttgttatcactctcaagaacatggcttctcatccggtaagtcttcacgcagtgggcgtgtcctactggaaagcttcagaaggagccgagtatgatgatcagacatcccagagggagaaagaagacgacaaggtatttccaggtgggtctcatacctatgtgtggcaagtgctcaaagagaatggccctatggcaagcgatccgccgtgtttgacttacagctacctttcacacgttgacctcgtcaaggacctcaactccgggttgattggagccttgttggtatgcagggaaggatctcttgccaaagagaagacacagaccctccacaagtttatccttctctttgctgtgttcgatgagggcaaaagttggcatagcgaaacgaagaattccctcatgcaggatcgcgacgcagccagcgccagagcttggcccaagatgcacactgtgaacggatatgtcaataggacgcttcctggcttgattgggtgtcatcggaaaagtgtctactggcacgtgatcggaatggggacaacaccagaggtccactccatatttctcgaaggccataccttccttgttcgaaaccacagacaggcatccttggagatctctcccattacctttctcactgcccaaacgctccttatggacttgggtcagttccttctcttctgccatatcagctcacaccagcatgatggtatggaagcttatgtgaaagtcgacagttgtcctgaggagccacagttgcgcatgaagaataatgaagaagccgaggattacgacgacgatctcaccgattctgagatggacgtggtgaggtttgatgacgacaactctccctccatcattcaaatccggagcgtggcgaagaaacaccccaagacttgggtccactatatagcggcggaagaggaggattgggattacgctcctcttgtattggcaccagatgaccgctcatacaaaagccagtacctcaacaacggaccgcagagaattggccggaagtataagaaagtgcgatttatggcctatacagacgaaacctttaagacaagggaggccatccagcatgagagtgggattttgggacctcttctttacggcgaagttggtgataccctcctcatcatcttcaagaatcaagcttctcgcccctataacatttacccacacgggatcactgacgttaggcctttgtatagcagaagacttcccaaaggcgtgaagcatctcaaagacttccccattttgccaggcgagatctttaagtacaaatggaccgtcacagtggaagatggaccgactaaatcagaccctcgatgccttacgcggtactattcctccttcgtgaatatggagagagatttggcaagcggactcataggaccactcctcatctgttacaaggaatctgtagaccagaggggtaaccagattatgagtgataaacgcaatgtgatcctttttagcgtcttcgacgagaaccggtcctggtacttgaccgagaatatacaaaggttccttcccaaccccgcaggcgttcagttggaagaccctgagtttcaggccagcaatattatgcactcaatcaacggctatgtgtttgatagtctccagctttctgtttgcctccatgaagtagcctattggtacatcttgtcaattggtgctcaaacagacttcctctccgtcttcttctccggctacacctttaagcacaagatggtgtatgaggacactctcacactctttccattttctggagaaaccgtgttcatgagcatggagaatccaggcctttggatcttgggttgccacaacagtgattttcgcaatcggggaatgactgctctcctcaaagtcagcagctgtgataagaacacaggcgactattacgaagattcttacgaggacataagtgcctacttggactccaagaattgggccattgagcccagatcattctcccagaatcctcccgtgcttaaaaggcatcagcgcgaaatcaccagaactactcttcagtctgatcaagaggagattgactatgacgacaccataagcgtggaaatgaagaaggaggatttcgatatctatgacgaagatgagaaccagtctccgcggagctttcagaagaagacgcgacactacttcattgcagcagtcgaaaggctttgggactacggtatgtcatcatcccctcatgtgttgcgcaatagagctcagagtggaagtgttccacagttcaagaaagtcgtctttcaagagtttacagatggcagcttcacacagcctctctatcggggcgagcttaacgaacatttgggactccttggtccctatatccgagccgaagtggaggacaacattatggttacctttaggaatcaagcctctcgcccctacagcttctactcctccctcatcagttatgaggaggatcagagacaaggcgctgaaccacggaagaactttgtgaaaccgaatgagacgaagacctacttctggaaagtacagcaccacatggcccccacaaaagacgaattcgattgcaaagcatgggcgtatttttcagacgttgacttggagaaagatgtacattcaggacttattggtcctttgttggtgtgtcacactaacactctcaatccagcccatggcaggcaggtgacagtccaggaattcgctcttttctttaccatctttgatgagaccaagtcctggtacttcacggaaaacatggagcgcaattgcagagccccctgtaacatacagatggaggaccctacctttaaggaaaattatcggttccacgcaatcaacggatacattatggatacactccctggccttgtgatggctcaggaccaacgaatcaggtggtacctcctcagcatgggttctaatgagaacatacactccattcacttttcaggacatgtgttcactgtccggaagaaagaagagtataagatggccctctacaatttgtatccaggcgtgtttgagaccgttgaaatgcttccctctaaagctggcatctggagagtagagtgcttgatcggagaacatcttcacgcaggtatgagcaccttgttcctcgtgtacagcaacaaatgtcagaccccacttggcatggccagtggacacattcgcgactttcagatcacagcatctggccagtatggacaatgggccccaaagttggctcgcctccattactccggtagcataaatgcgtggtccactaaagaacctttcagctggattaaggtcgatcttcttgcccccatgatcatccacggcattaagacacagggagcgaggcagaaattctcctccctctacatctcacagttcattattatgtatagtttggacggcaagaagtggcaaacttatagaggtaacagtactggaacagacatggtgttcttcggcaacgttgatagctctggcatcaaacacaacatctttaatcctcccataatagctcggtacatcagattgcatccgacccactacagcattaggagtacactccgaatggagcttatgggttgcgacttgaattcctgttcaatgccactcggaatggagtctaaagccatctctgatgcacagataaccgccagtagctactttacgaacatgtttgctacgtggtcaccctctaaggcaaggcttcatttgcaaggccggtctaatgcctggagacctcaggtgaacaacccgaaagaatggctccaggtggactttcagaagaccatgaaagtaacaggtgtcactactcagggagttaagtccttggatactagcatgtatgtgaaggagttccttatttcctcatcacaagatggccaccagtggaccctcttctttcagaatggtaaggtcaaagtgtttcagggcaatcaagacagcttcacacccgtggtgaacagtcttgatcctccactcttgacacgataccttcgaatccatccacagtcttgggagcaccagattgcattgcgcatggaagtacttggatgcgaggctcaggacctctac

SEQ ID NO: 878 - protein, 1457 aa, synthetic construct
  REGION 1..1457: note = Variant of human B-domain deleted Factor VIII
MQIELSTCFFLCLLRFCFSATRRYYLGAVELSWDYMQSDLGELPVDARFPPRVPKSFPFNTSVVYKKTLFVEFTDHLFNIAKPRPPWMGLLGPTIQAEVYDTVVITLKNMASHPVSLHAVGVSYWKASEGAEYDDQTSQREKEDDKVFPGGSHTYVWQVLKENGPMASDPPCLTYSYLSHVDLVKDLNSGLIGALLVCREGSLAKEKTQTLHKFILLFAVFDEGKSWHSETKNSLMQDRDAASARAWPKMHTVNGYVNRTLPGLIGCHRKSVYWHVIGMGTTPEVHSIFLEGHTFLVRNHRQASLEISPITFLTAQTLLMDLGQFLLFCHISSHQHDGMEAYVKVDSCPEEPQLRMKNNEEAEDYDDDLTDSEMDVVRFDDDNSPSIIQIRSVAKKHPKTWVHYIAAEEEDWDYAPLVLAPDDRSYKSQYLNNGPQRIGRKYKKVRFMAYTDETFKTREAIQHESGILGPLLYGEVGDTLLIIFKNQASRPYNIYPHGITDVRPLYSRRLPKGVKHLKDFPILPGEIFKYKWTVTVEDGPTKSDPRCLTRYYSSFVNMERDLASGLIGPLLICYKESVDQRGNQIMSDKRNVILFSVFDENRSWYLTENIQRFLPNPAGVQLEDPEFQASNIMHSINGYVFDSLQLSVCLHEVAYWYILSIGAQTDFLSVFFSGYTFKHKMVYEDTLTLFPFSGETVFMSMENPGLWILGCHNSDFRNRGMTALLKVSSCDKNTGDYYEDSYEDISAYLDSKNWAIEPRSFSQNPPVLKRHQREITRTTLQSDQEEIDYDDTISVEMKKEDFDIYDEDENQSPRSFQKKTRHYFIAAVERLWDYGMSSSPHVLRNRAQSGSVPQFKKVVFQEFTDGSFTQPLYRGELNEHLGLLGPYIRAEVEDNIMVTFRNQASRPYSFYSSLISYEEDQRQGAEPRKNFVKPNETKTYFWKVQHHMAPTKDEFDCKAWAYFSDVDLEKDVHSGLIGPLLVCHTNTLNPAHGRQVTVQEFALFFTIFDETKSWYFTENMERNCRAPCNIQMEDPTFKENYRFHAINGYIMDTLPGLVMAQDQRIRWYLLSMGSNENIHSIHFSGHVFTVRKKEEYKMALYNLYPGVFETVEMLPSKAGIWRVECLIGEHLHAGMSTLFLVYSNKCQTPLGMASGHIRDFQITASGQYGQWAPKLARLHYSGSINAWSTKEPFSWIKVDLLAPMIIHGIKTQGARQKFSSLYISQFIIMYSLDGKKWQTYRGNSTGTDMVFFGNVDSSGIKHNIFNPPIIARYIRLHPTHYSIRSTLRMELMGCDLNSCSMPLGMESKAISDAQITASSYFTNMFATWSPSKARLHLQGRSNAWRPQVNNPKEWLQVDFQKTMKVTGVTTQGVKSLDTSMYVKEFLISSSQDGHQWTLFFQNGKVKVFQGNQDSFTPVVNSLDPPLLTRYLRIHPQSWEHQIALRMEVLGCEAQDLY

SEQ ID NO: 879 - DNA, 4371 bp, synthetic construct
  misc_feature 1..4371: note = Variant of human B-domain deleted Factor VIII
  source 1..4371: mol_type = other DNA
atgcagattgaactgtctacctgcttcttcctctgtttgctgaggttctgctttagcgccactagacggtactaccttggcgctgtggagctgtcctgggactatatgcagagtgatttgggagagcttcccgtcgacgcacgatttcctcctcgcgttccaaagtcatttccctttaacacaagcgtggtgtacaagaagacgctcttcgtcgaattcaccgatcacctgttcaatatcgccaaacccagaccaccatggatgggtcttttggggcctaccatacaagcggaggtgtatgacacagttgttatcactctcaagaacatggcttctcatccggtaagtcttcacgcagtgggcgtgtcctactggaaagcttcagaaggagccgagtatgatgatcagacatcccagagggagaaagaagacgacaaggtatttccaggtgggtctcatacctatgtgtggcaagtgctcaaagagaatggccctatggcaagcgatccgccgtgtttgacttacagctacctttcacacgttgacctcgtcaaggacctcaactccgggttgattggagccttgttggtatgcagggaaggatctcttgccaaagagaagacacagaccctccacaagtttatccttctctttgctgtgttcgatgagggcaaaagttggcatagcgaaacgaagaattccctcatgcaggatcgcgacgcagccagcgccagagcttggcccaagatgcacactgtgaacggatatgtcaataggacgcttcctggcttgattgggtgtcatcggaaaagtgtctactggcacgtgatcggaatggggacaacaccagaggtccactccatatttctcgaaggccataccttccttgttcgaaaccacagacaggcatccttggagatctctcccattacctttctcactgcccaaacgctccttatggacttgggtcagttccttctcttctgccatatcagctcacaccagcatgatggtatggaagcttatgtgaaagtcgacagttgtcctgaggagccacagttgcgcatgaagaataatgaagaagccgaggattacgacgacgatctcaccgattctgagatggacgtggtgaggtttgatgacgacaactctccctccatcattcaaatccggagcgtggcgaagaaacaccccaagacttgggtccactatatagcggcggaagaggaggattgggattacgctcctcttgtattggcaccagatgaccgctcatacaaaagccagtacctcaacaacggaccgcagagaattggccggaagtataagaaagtgcgatttatggcctatacagacgaaacctttaagacaagggaggccatccagcatgagagtgggattttgggacctcttctttacggcgaagttggtgataccctcctcatcatcttcaagaatcaagcttctcgcccctataacatttacccacacgggatcactgacgttaggcctttgtatagcagaagacttcccaaaggcgtgaagcatctcaaagacttccccattttgccaggcgagatctttaagtacaaatggaccgtcacagtggaagatggaccgactaaatcagaccctcgatgccttacgcggtactattcctccttcgtgaatatggagagagatttggcaagcggactcataggaccactcctcatctgttacaaggaatctgtagaccagaggggtaaccagattatgagtgataaacgcaatgtgatcctttttagcgtcttcgacgagaaccggtcctggtacttgaccgagaatatacaaaggttccttcccaaccccgcaggcgttcagttggaagaccctgagtttcaggccagcaatattatgcactcaatcaacggctatgtgtttgatagtctccagctttctgtttgcctccatgaagtagcctattggtacatcttgtcaattggtgctcaaacagacttcctctccgtcttcttctccggctacacctttaagcacaagatggtgtatgaggacactctcacactctttccattttctggagaaaccgtgttcatgagcatggagaatccaggcctttggatcttgggttgccacaacagtgattttcgcaatcggggaatgactgctctcctcaaagtcagcagctgtgataagaacacaggcgactattacgaagattcttacgaggacataagtgcctacttggactccaagaataacgccattgagcccagatcattctcccagaatcctcccgtgcttaaaaggcatcagcgcgaaatcaccagaactactcttcagtctgatcaagaggagattgactatgacgacaccggtagcgtggaaatgaagaaggaggatttcgatatctatgacgaagatgagaaccagtctccgcggagctttcagaagaagacgcgacactacttcattgcagcagtcgaaaggctttgggactacggtatgtcatcatcccctcatgtgttgcgcaatagagctcagagtggaagtgttccacagttcaagaaagtcgtctttcaagagtttacagatggcagcttcacacagcctctctatcggggcgagcttaacgaacatttgggactccttggtccctatatccgagccgaagtggaggacaacattatggttacctttaggaatcaagcctctcgcccctacagcttctactcctccctcatcagttatgaggaggatcagagacaaggcgctgaaccacggaagaactttgtgaaaccgaatgagacgaagacctacttctggaaagtacagcaccacatggcccccacaaaagacgaattcgattgcaaagcatgggcgtatttttcagacgttgacttggagaaagatgtacattcaggacttattggtcctttgttggtgtgtcacactaacactctcaatccagcccatggcaggcaggtgacagtccaggaattcgctcttttctttaccatctttgatgagaccaagtcctggtacttcacggaaaacatggagcgcaattgcagagccccctgtaacatacagatggaggaccctacctttaaggaaaattatcggttccacgcaatcaacggatacattatggatacactccctggccttgtgatggctcaggaccaacgaatcaggtggtacctcctcagcatgggttctaatgagaacatacactccattcacttttcaggacatgtgttcactgtccggaagaaagaagagtataagatggccctctacaatttgtatccaggcgtgtttgagaccgttgaaatgcttccctctaaagctggcatctggagagtagagtgcttgatcggagaacatcttcacgcaggtatgagcaccttgttcctcgtgtacagcaacaaatgtcagaccccacttggcatggccagtggacacattcgcgactttcagatcacagcatctggccagtatggacaatgggccccaaagttggctcgcctccattactccggtagcataaatgcgtggtccactaaagaacctttcagctggattaaggtcgatcttcttgcccccatgatcatccacggcattaagacacagggagcgaggcagaaattctcctccctctacatctcacagttcattattatgtatagtttggacggcaagaagtggcaaacttatagaggtaacagtactggaacagacatggtgttcttcggcaacgttgatagctctggcatcaaacacaacatctttaatcctcccataatagctcggtacatcagattgcatccgacccactacagcattaggagtacactccgaatggagcttatgggttgcgacttgaattcctgttcaatgccactcggaatggagtctaaagccatctctgatgcacagataaccgccagtagctactttacgaacatgtttgctacgtggtcaccctctaaggcaaggcttcatttgcaaggccggtctaatgcctggagacctcaggtgaacaacccgaaagaatggctccaggtggactttcagaagaccatgaaagtaacaggtgtcactactcagggagttaagtccttggatactagcatgtatgtgaaggagttccttatttcctcatcacaagatggccaccagtggaccctcttctttcagaatggtaaggtcaaagtgtttcagggcaatcaagacagcttcacacccgtggtgaacagtcttgatcctccactcttgacacgataccttcgaatccatccacagtcttgggagcaccagattgcattgcgcatggaagtacttggatgcgaggctcaggacctctac

SEQ ID NO: 880 - protein, 1457 aa, synthetic construct
  REGION 1..1457: note = Variant of human B-domain deleted Factor VIII
MQIELSTCFFLCLLRFCFSATRRYYLGAVELSWDYMQSDLGELPVDARFPPRVPKSFPFNTSVVYKKTLFVEFTDHLFNIAKPRPPWMGLLGPTIQAEVYDTVVITLKNMASHPVSLHAVGVSYWKASEGAEYDDQTSQREKEDDKVFPGGSHTYVWQVLKENGPMASDPPCLTYSYLSHVDLVKDLNSGLIGALLVCREGSLAKEKTQTLHKFILLFAVFDEGKSWHSETKNSLMQDRDAASARAWPKMHTVNGYVNRTLPGLIGCHRKSVYWHVIGMGTTPEVHSIFLEGHTFLVRNHRQASLEISPITFLTAQTLLMDLGQFLLFCHISSHQHDGMEAYVKVDSCPEEPQLRMKNNEEAEDYDDDLTDSEMDVVRFDDDNSPSIIQIRSVAKKHPKTWVHYIAAEEEDWDYAPLVLAPDDRSYKSQYLNNGPQRIGRKYKKVRFMAYTDETFKTREAIQHESGILGPLLYGEVGDTLLIIFKNQASRPYNIYPHGITDVRPLYSRRLPKGVKHLKDFPILPGEIFKYKWTVTVEDGPTKSDPRCLTRYYSSFVNMERDLASGLIGPLLICYKESVDQRGNQIMSDKRNVILFSVFDENRSWYLTENIQRFLPNPAGVQLEDPEFQASNIMHSINGYVFDSLQLSVCLHEVAYWYILSIGAQTDFLSVFFSGYTFKHKMVYEDTLTLFPFSGETVFMSMENPGLWILGCHNSDFRNRGMTALLKVSSCDKNTGDYYEDSYEDISAYLDSKNNAIEPRSFSQNPPVLKRHQREITRTTLQSDQEEIDYDDTGSVEMKKEDFDIYDEDENQSPRSFQKKTRHYFIAAVERLWDYGMSSSPHVLRNRAQSGSVPQFKKVVFQEFTDGSFTQPLYRGELNEHLGLLGPYIRAEVEDNIMVTFRNQASRPYSFYSSLISYEEDQRQGAEPRKNFVKPNETKTYFWKVQHHMAPTKDEFDCKAWAYFSDVDLEKDVHSGLIGPLLVCHTNTLNPAHGRQVTVQEFALFFTIFDETKSWYFTENMERNCRAPCNIQMEDPTFKENYRFHAINGYIMDTLPGLVMAQDQRIRWYLLSMGSNENIHSIHFSGHVFTVRKKEEYKMALYNLYPGVFETVEMLPSKAGIWRVECLIGEHLHAGMSTLFLVYSNKCQTPLGMASGHIRDFQITASGQYGQWAPKLARLHYSGSINAWSTKEPFSWIKVDLLAPMIIHGIKTQGARQKFSSLYISQFIIMYSLDGKKWQTYRGNSTGTDMVFFGNVDSSGIKHNIFNPPIIARYIRLHPTHYSIRSTLRMELMGCDLNSCSMPLGMESKAISDAQITASSYFTNMFATWSPSKARLHLQGRSNAWRPQVNNPKEWLQVDFQKTMKVTGVTTQGVKSLDTSMYVKEFLISSSQDGHQWTLFFQNGKVKVFQGNQDSFTPVVNSLDPPLLTRYLRIHPQSWEHQIALRMEVLGCEAQDLY

SEQ ID NO: 881 - DNA, 4371 bp, synthetic construct
  misc_feature 1..4371: note = Variant of human B-domain deleted Factor VIII
  source 1..4371: mol_type = other DNA
atgcagattgaactgtctacctgcttcttcctctgtttgctgaggttctgctttagcgccactagacggtactaccttggcgctgtggagctgtcctgggactatatgcagagtgatttgggagagcttcccgtcgacgcacgatttcctcctcgcgttccaaagtcatttccctttaacacaagcgtggtgtacaagaagacgctcttcgtcgaattcaccgatcacctgttcaatatcgccaaacccagaccaccatggatgggtcttttggggcctaccatacaagcggaggtgtatgacacagttgttatcactctcaagaacatggcttctcatccggtaagtcttcacgcagtgggcgtgtcctactggaaagcttcagaaggagccgagtatgatgatcagacatcccagagggagaaagaagacgacaaggtatttccaggtgggtctcatacctatgtgtggcaagtgctcaaagagaatggccctatggcaagcgatccgccgtgtttgacttacagctacctttcacacgttgacctcgtcaaggacctcaactccgggttgattggagccttgttggtatgcagggaaggatctcttgccaaagagaagacacagaccctccacaagtttatccttctctttgctgtgttcgatgagggcaaaagttggcatagcgaaacgaagaattccctcatgcaggatcgcgacgcagccagcgccagagcttggcccaagatgcacactgtgaacggatatgtcaataggacgcttcctggcttgattgggtgtcatcggaaaagtgtctactggcacgtgatcggaatggggacaacaccagaggtccactccatatttctcgaaggccataccttccttgttcgaaaccacagacaggcatccttggagatctctcccattacctttctcactgcccaaacgctccttatggacttgggtcagttccttctcttctgccatatcagctcacaccagcatgatggtatggaagcttatgtgaaagtcgacagttgtcctgaggagccacagttgcgcatgaagaataatgaagaagccgaggattacgacgacgatctcaccgattctgagatggacgtggtgaggtttgatgacgacaactctccctccatcattcaaatccggagcgtggcgaagaaacaccccaagacttgggtccactatatagcggcggaagaggaggattgggattacgctcctcttgtattggcaccagatgaccgctcatacaaaagccagtacctcaacaacggaccgcagagaattggccggaagtataagaaagtgcgatttatggcctatacagacgaaacctttaagacaagggaggccatccagcatgagagtgggattttgggacctcttctttacggcgaagttggtgataccctcctcatcatcttcaagaatcaagcttctcgcccctataacatttacccacacgggatcactgacgttaggcctttgtatagcagaagacttcccaaaggcgtgaagcatctcaaagacttccccattttgccaggcgagatctttaagtacaaatggaccgtcacagtggaagatggaccgactaaatcagaccctcgatgccttacgcggtactattcctccttcgtgaatatggagagagatttggcaagcggactcataggaccactcctcatctgttacaaggaatctgtagaccagaggggtaaccagattatgagtgataaacgcaatgtgatcctttttagcgtcttcgacgagaaccggtcctggtacttgaccgagaatatacaaaggttccttcccaaccccgcaggcgttcagttggaagaccctgagtttcaggccagcaatattatgcactcaatcaacggctatgtgtttgatagtctccagctttctgtttgcctccatgaagtagcctattggtacatcttgtcaattggtgctcaaacagacttcctctccgtcttcttctccggctacacctttaagcacaagatggtgtatgaggacactctcacactctttccattttctggagaaaccgtgttcatgagcatggagaatccaggcctttggatcttgggttgccacaacagtgattttcgcaatcggggaatgactgctctcctcaaagtcagcagctgtgataagaacacaggcgactattacgaagattcttacgaggacataagtgcctacttggactccaaggataacgccattgagcccagatcattctcccagaatcctcccgtgcttaaaaggcatcagcgcgaaatcaccagaactactcttcagtctgatcaagaggagattgactatgacgacaccataagcgtggaaatgaagaaggaggatttcgatatctatgacgaagatgagaaccagtctccgcggagctttcagaagaagacgcgacactacttcattgcagcagtcgaaaggctttgggactacggtatgtcatcatcccctcatgtgttgcgcaatagagctcagagtggaagtgttccacagttcaagaaagtcgtctttcaagagtttacagatggcagcttcacacagcctctctatcggggcgagcttaacgaacatttgggactccttggtccctatatccgagccgaagtggaggacaacattatggttacctttaggaatcaagcctctcgcccctacagcttctactcctccctcatcagttatgaggaggatcagagacaaggcgctgaaccacggaagaactttgtgaaaccgaatgagacgaagacctacttctggaaagtacagcaccacatggcccccacaaaagacgaattcgattgcaaagcatgggcgtatttttcagacgttgacttggagaaagatgtacattcaggacttattggtcctttgttggtgtgtcacactaacactctcaatccagcccatggcaggcaggtgacagtccaggaattcgctcttttctttaccatctttgatgagaccaagtcctggtacttcacggaaaacatggagcgcaattgcagagccccctgtaacatacagatggaggaccctacctttaaggaaaattatcggttccacgcaatcaacggatacattatggatacactccctggccttgtgatggctcaggaccaacgaatcaggtggtacctcctcagcatgggttctaatgagaacatacactccattcacttttcaggacatgtgttcactgtccggaagaaagaagagtataagatggccctctacaatttgtatccaggcgtgtttgagaccgttgaaatgcttccctctaaagctggcatctggagagtagagtgcttgatcggagaacatcttcacgcaggtatgagcaccttgttcctcgtgtacagcaacaaatgtcagaccccacttggcatggccagtggacacattcgcgactttcagatcacagcatctggccagtatggacaatgggccccaaagttggctcgcctccattactccggtagcataaatgcgtggtccactaaagaacctttcagctggattaaggtcgatcttcttgcccccatgatcatccacggcattaagacacagggagcgaggcagaaattctcctccctctacatctcacagttcattattatgtatagtttggacggcaagaagtggcaaacttatagaggtaacagtactggaacagacatggtgttcttcggcaacgttgatagctctggcatcaaacacaacatctttaatcctcccataatagctcggtacatcagattgcatccgacccactacagcattaggagtacactccgaatggagcttatgggttgcgacttgaattcctgttcaatgccactcggaatggagtctaaagccatctctgatgcacagataaccgccagtagctactttacgaacatgtttgctacgtggtcaccctctaaggcaaggcttcatttgcaaggccggtctaatgcctggagacctcaggtgaacaacccgaaagaatggctccaggtggactttcagaagaccatgaaagtaacaggtgtcactactcagggagttaagtccttggatactagcatgtatgtgaaggagttccttatttcctcatcacaagatggccaccagtggaccctcttctttcagaatggtaaggtcaaagtgtttcagggcaatcaagacagcttcacacccgtggtgaacagtcttgatcctccactcttgacacgataccttcgaatccatccacagtcttgggagcaccagattgcattgcgcatggaagtacttggatgcgaggctcaggacctctac

SEQ ID NO: 882 - protein, 1457 aa, synthetic construct
  REGION 1..1457: note = Variant of human B-domain deleted Factor VIII
MQIELSTCFFLCLLRFCFSATRRYYLGAVELSWDYMQSDLGELPVDARFPPRVPKSFPFNTSVVYKKTLFVEFTDHLFNIAKPRPPWMGLLGPTIQAEVYDTVVITLKNMASHPVSLHAVGVSYWKASEGAEYDDQTSQREKEDDKVFPGGSHTYVWQVLKENGPMASDPPCLTYSYLSHVDLVKDLNSGLIGALLVCREGSLAKEKTQTLHKFILLFAVFDEGKSWHSETKNSLMQDRDAASARAWPKMHTVNGYVNRTLPGLIGCHRKSVYWHVIGMGTTPEVHSIFLEGHTFLVRNHRQASLEISPITFLTAQTLLMDLGQFLLFCHISSHQHDGMEAYVKVDSCPEEPQLRMKNNEEAEDYDDDLTDSEMDVVRFDDDNSPSIIQIRSVAKKHPKTWVHYIAAEEEDWDYAPLVLAPDDRSYKSQYLNNGPQRIGRKYKKVRFMAYTDETFKTREAIQHESGILGPLLYGEVGDTLLIIFKNQASRPYNIYPHGITDVRPLYSRRLPKGVKHLKDFPILPGEIFKYKWTVTVEDGPTKSDPRCLTRYYSSFVNMERDLASGLIGPLLICYKESVDQRGNQIMSDKRNVILFSVFDENRSWYLTENIQRFLPNPAGVQLEDPEFQASNIMHSINGYVFDSLQLSVCLHEVAYWYILSIGAQTDFLSVFFSGYTFKHKMVYEDTLTLFPFSGETVFMSMENPGLWILGCHNSDFRNRGMTALLKVSSCDKNTGDYYEDSYEDISAYLDSKDNAIEPRSFSQNPPVLKRHQREITRTTLQSDQEEIDYDDTISVEMKKEDFDIYDEDENQSPRSFQKKTRHYFIAAVERLWDYGMSSSPHVLRNRAQSGSVPQFKKVVFQEFTDGSFTQPLYRGELNEHLGLLGPYIRAEVEDNIMVTFRNQASRPYSFYSSLISYEEDQRQGAEPRKNFVKPNETKTYFWKVQHHMAPTKDEFDCKAWAYFSDVDLEKDVHSGLIGPLLVCHTNTLNPAHGRQVTVQEFALFFTIFDETKSWYFTENMERNCRAPCNIQMEDPTFKENYRFHAINGYIMDTLPGLVMAQDQRIRWYLLSMGSNENIHSIHFSGHVFTVRKKEEYKMALYNLYPGVFETVEMLPSKAGIWRVECLIGEHLHAGMSTLFLVYSNKCQTPLGMASGHIRDFQITASGQYGQWAPKLARLHYSGSINAWSTKEPFSWIKVDLLAPMIIHGIKTQGARQKFSSLYISQFIIMYSLDGKKWQTYRGNSTGTDMVFFGNVDSSGIKHNIFNPPIIARYIRLHPTHYSIRSTLRMELMGCDLNSCSMPLGMESKAISDAQITASSYFTNMFATWSPSKARLHLQGRSNAWRPQVNNPKEWLQVDFQKTMKVTGVTTQGVKSLDTSMYVKEFLISSSQDGHQWTLFFQNGKVKVFQGNQDSFTPVVNSLDPPLLTRYLRIHPQSWEHQIALRMEVLGCEAQDLY

SEQ ID NO: 883 - DNA, 4371 bp, synthetic construct
  misc_feature 1..4371: note = Variant of human B-domain deleted Factor VIII
  source 1..4371: mol_type = other DNA
atgcagattgaactgtctacctgcttcttcctctgtttgctgaggttctgctttagcgccactagacggtactaccttggcgctgtggagctgtcctgggactatatgcagagtgatttgggagagcttcccgtcgacgcacgatttcctcctcgcgttccaaagtcatttccctttaacacaagcgtggtgtacaagaagacgctcttcgtcgaattcaccgatcacctgttcaatatcgccaaacccagaccaccatggatgggtcttttggggcctaccatacaagcggaggtgtatgacacagttgttatcactctcaagaacatggcttctcatccggtaagtcttcacgcagtgggcgtgtcctactggaaagcttcagaaggagccgagtatgatgatcagacatcccagagggagaaagaagacgacaaggtatttccaggtgggtctcatacctatgtgtggcaagtgctcaaagagaatggccctatggcaagcgatccgccgtgtttgacttacagctacctttcacacgttgacctcgtcaaggacctcaactccgggttgattggagccttgttggtatgcagggaaggatctcttgccaaagagaagacacagaccctccacaagtttatccttctctttgctgtgttcgatgagggcaaaagttggcatagcgaaacgaagaattccctcatgcaggatcgcgacgcagccagcgccagagcttggcccaagatgcacactgtgaacggatatgtcaataggacgcttcctggcttgattgggtgtcatcggaaaagtgtctactggcacgtgatcggaatggggacaacaccagaggtccactccatatttctcgaaggccataccttccttgttcgaaaccacagacaggcatccttggagatctctcccattacctttctcactgcccaaacgctccttatggacttgggtcagttccttctcttctgccatatcagctcacaccagcatgatggtatggaagcttatgtgaaagtcgacagttgtcctgaggagccacagttgcgcatgaagaataatgaagaagccgaggattacgacgacgatctcaccgattctgagatggacgtggtgaggtttgatgacgacaactctccctccatcattcaaatccggagcgtggcgaagaaacaccccaagacttgggtccactatatagcggcggaagaggaggattgggattacgctcctcttgtattggcaccagatgaccgctcatacaaaagccagtacctcaacaacggaccgcagagaattggccggaagtataagaaagtgcgatttatggcctatacagacgaaacctttaagacaagggaggccatccagcatgagagtgggattttgggacctcttctttacggcgaagttggtgataccctcctcatcatcttcaagaatcaagcttctcgcccctataacatttacccacacgggatcactgacgttaggcctttgtatagcagaagacttcccaaaggcgtgaagcatctcaaagacttccccattttgccaggcgagatctttaagtacaaatggaccgtcacagtggaagatggaccgactaaatcagaccctcgatgccttacgcggtactattcctccttcgtgaatatggagagagatttggcaagcggactcataggaccactcctcatctgttacaaggaatctgtagaccagaggggtaaccagattatgagtgataaacgcaatgtgatcctttttagcgtcttcgacgagaaccggtcctggtacttgaccgagaatatacaaaggttccttcccaaccccgcaggcgttcagttggaagaccctgagtttcaggccagcaatattatgcactcaatcaacggctatgtgtttgatagtctccagctttctgtttgcctccatgaagtagcctattggtacatcttgtcaattggtgctcaaacagacttcctctccgtcttcttctccggctacacctttaagcacaagatggtgtatgaggacactctcacactctttccattttctggagaaaccgtgttcatgagcatggagaatccaggcctttggatcttgggttgccacaacagtgattttcgcaatcggggaatgactgctctcctcaaagtcagcagctgtgataagaacacaggcgactattacgaagattcttacgaggacataagtgcctacttggactccaagaataacgccattgagcccagatcattctcccagaatcctcccgtgcttaaaaggcatcagcgcgaaatcaccagaactactcttcagtctgatcaagaggagattgactatgacgacaccataagcgtggaaatgaagaaggaggatttcgatatctatgacgaagatgagaaccagtctccgcggagctttcagaagaagacgcgacactacttcattgcagcagtcgaaaggctttgggactacggtatgtcatcatcccctcatgtgttgcgcaatagagctcagagtggaagtgttccacagttcaagaaagtcgtctttcaagagtttacagatggcagcttcacacagcctctctatcggggcgagcttaacgaacatttgggactccttggtccctatatccgagccgaagtggaggacaacattatggttacctttaggaatcaagcctctcgcccctacagcttctactcctccctcatcagttatgaggaggatcagtggcaaggcgctgaaccacggaagaactttgtgaaaccgaatgagacgaagacctacttctggaaagtacagcaccacatggcccccacaaaagacgaattcgattgcaaagcatgggcgtatttttcagacgttgacttggagaaagatgtacattcaggacttattggtcctttgttggtgtgtcacactaacactctcaatccagcccatggcaggcaggtgacagtccaggaattcgctcttttctttaccatctttgatgagaccaagtcctggtacttcacggaaaacatggagcgcaattgcagagccccctgtaacatacagatggaggaccctacctttaaggaaaattatcggttccacgcaatcaacggatacattatggatacactccctggccttgtgatggctcaggaccaacgaatcaggtggtacctcctcagcatgggttctaatgagaacatacactccattcacttttcaggacatgtgttcactgtccggaagaaagaagagtataagatggccctctacaatttgtatccaggcgtgtttgagaccgttgaaatgcttccctctaaagctggcatctggagagtagagtgcttgatcggagaacatcttcacgcaggtatgagcaccttgttcctcgtgtacagcaacaaatgtcagaccccacttggcatggccagtggacacattcgcgactttcagatcacagcatctggccagtatggacaatgggccccaaagttggctcgcctccattactccggtagcataaatgcgtggtccactaaagaacctttcagctggattaaggtcgatcttcttgcccccatgatcatccacggcattaagacacagggagcgaggcagaaattctcctccctctacatctcacagttcattattatgtatagtttggacggcaagaagtggcaaacttatagaggtaacagtactggaacagacatggtgttcttcggcaacgttgatagctctggcatcaaacacaacatctttaatcctcccataatagctcggtacatcagattgcatccgacccactacagcattaggagtacactccgaatggagcttatgggttgcgacttgaattcctgttcaatgccactcggaatggagtctaaagccatctctgatgcacagataaccgccagtagctactttacgaacatgtttgctacgtggtcaccctctaaggcaaggcttcatttgcaaggccggtctaatgcctggagacctcaggtgaacaacccgaaagaatggctccaggtggactttcagaagaccatgaaagtaacaggtgtcactactcagggagttaagtccttggatactagcatgtatgtgaaggagttccttatttcctcatcacaagatggccaccagtggaccctcttctttcagaatggtaaggtcaaagtgtttcagggcaatcaagacagcttcacacccgtggtgaacagtcttgatcctccactcttgacacgataccttcgaatccatccacagtcttgggagcaccagattgcattgcgcatggaagtacttggatgcgaggctcaggacctctac

SEQ ID NO: 884 - protein, 1457 aa, synthetic construct
  REGION 1..1457: note = Variant of human B-domain deleted Factor VIII
MQIELSTCFFLCLLRFCFSATRRYYLGAVELSWDYMQSDLGELPVDARFPPRVPKSFPFNTSVVYKKTLFVEFTDHLFNIAKPRPPWMGLLGPTIQAEVYDTVVITLKNMASHPVSLHAVGVSYWKASEGAEYDDQTSQREKEDDKVFPGGSHTYVWQVLKENGPMASDPPCLTYSYLSHVDLVKDLNSGLIGALLVCREGSLAKEKTQTLHKFILLFAVFDEGKSWHSETKNSLMQDRDAASARAWPKMHTVNGYVNRTLPGLIGCHRKSVYWHVIGMGTTPEVHSIFLEGHTFLVRNHRQASLEISPITFLTAQTLLMDLGQFLLFCHISSHQHDGMEAYVKVDSCPEEPQLRMKNNEEAEDYDDDLTDSEMDVVRFDDDNSPSIIQIRSVAKKHPKTWVHYIAAEEEDWDYAPLVLAPDDRSYKSQYLNNGPQRIGRKYKKVRFMAYTDETFKTREAIQHESGILGPLLYGEVGDTLLIIFKNQASRPYNIYPHGITDVRPLYSRRLPKGVKHLKDFPILPGEIFKYKWTVTVEDGPTKSDPRCLTRYYSSFVNMERDLASGLIGPLLICYKESVDQRGNQIMSDKRNVILFSVFDENRSWYLTENIQRFLPNPAGVQLEDPEFQASNIMHSINGYVFDSLQLSVCLHEVAYWYILSIGAQTDFLSVFFSGYTFKHKMVYEDTLTLFPFSGETVFMSMENPGLWILGCHNSDFRNRGMTALLKVSSCDKNTGDYYEDSYEDISAYLDSKNNAIEPRSFSQNPPVLKRHQREITRTTLQSDQEEIDYDDTISVEMKKEDFDIYDEDENQSPRSFQKKTRHYFIAAVERLWDYGMSSSPHVLRNRAQSGSVPQFKKVVFQEFTDGSFTQPLYRGELNEHLGLLGPYIRAEVEDNIMVTFRNQASRPYSFYSSLISYEEDQWQGAEPRKNFVKPNETKTYFWKVQHHMAPTKDEFDCKAWAYFSDVDLEKDVHSGLIGPLLVCHTNTLNPAHGRQVTVQEFALFFTIFDETKSWYFTENMERNCRAPCNIQMEDPTFKENYRFHAINGYIMDTLPGLVMAQDQRIRWYLLSMGSNENIHSIHFSGHVFTVRKKEEYKMALYNLYPGVFETVEMLPSKAGIWRVECLIGEHLHAGMSTLFLVYSNKCQTPLGMASGHIRDFQITASGQYGQWAPKLARLHYSGSINAWSTKEPFSWIKVDLLAPMIIHGIKTQGARQKFSSLYISQFIIMYSLDGKKWQTYRGNSTGTDMVFFGNVDSSGIKHNIFNPPIIARYIRLHPTHYSIRSTLRMELMGCDLNSCSMPLGMESKAISDAQITASSYFTNMFATWSPSKARLHLQGRSNAWRPQVNNPKEWLQVDFQKTMKVTGVTTQGVKSLDTSMYVKEFLISSSQDGHQWTLFFQNGKVKVFQGNQDSFTPVVNSLDPPLLTRYLRIHPQSWEHQIALRMEVLGCEAQDLY

SEQ ID NO: 885 - DNA, 4371 bp, synthetic construct
  misc_feature 1..4371: note = Variant of human B-domain deleted Factor VIII
  source 1..4371: mol_type = other DNA
atgcagattgaactgtctacctgcttcttcctctgtttgctgaggttctgctttagcgccactagacggtactaccttggcgctgtggagctgtcctgggactatatgcagagtgatttgggagagcttcccgtcgacgcacgatttcctcctcgcgttccaaagtcatttccctttaacacaagcgtggtgtacaagaagacgctcttcgtcgaattcaccgatcacctgttcaatatcgccaaacccagaccaccatggatgggtcttttggggcctaccatacaagcggaggtgtatgacacagttgttatcactctcaagaacatggcttctcatccggtaagtcttcacgcagtgggcgtgtcctactggaaagcttcagaaggagccgagtatgatgatcagacatcccagagggagaaagaagacgacaaggtatttccaggtgggtctcatacctatgtgtggcaagtgctcaaagagaatggccctatggcaagcgatccgccgtgtttgacttacagctacctttcacacgttgacctcgtcaaggacctcaactccgggttgattggagccttgttggtatgcagggaaggatctcttgccaaagagaagacacagaccctccacaagtttatccttctctttgctgtgttcgatgagggcaaaagttggcatagcgaaacgaagaattccctcatgcaggatcgcgacgcagccagcgccagagcttggcccaagatgcacactgtgaacggatatgtcaataggacgcttcctggcttgattgggtgtcatcggaaaagtgtctactggcacgtgatcggaatggggacaacaccagaggtccactccatatttctcgaaggccataccttccttgttcgaaaccacagacaggcatccttggagatctctcccattacctttctcactgcccaaacgctccttatggacttgggtcagttccttctcttctgccatatcagctcacaccagcatgatggtatggaagcttatgtgaaagtcgacagttgtcctgaggagccacagttgcgcatgaagaataatgaagaagccgaggattacgacgacgatctcaccgattctgagatggacgtggtgaggtttgatgacgacaactctccctccatcattcaaatccggagcgtggcgaagaaacaccccaagacttgggtccactatatagcggcggaagaggaggattgggattacgctcctcttgtattggcaccagatgaccgctcatacaaaagccagtacctcaacaacggaccgcagagaattggccggaagtataagaaagtgcgatttatggcctatacagacgaaacctttaagacaagggaggccatccagcatgagagtgggattttgggacctcttctttacggcgaagttggtgataccctcctcatcatcttcaagaatcaagcttctcgcccctataacatttacccacacgggatcactgacgttaggcctttgtatagcagaagacttcccaaaggcgtgaagcatctcaaagacttccccattttgccaggcgagatctttaagtacaaatggaccgtcacagtggaagatggaccgactaaatcagaccctcgatgccttacgcggtactattcctccttcgtgaatatggagagagatttggcaagcggactcataggaccactcctcatctgttacaaggaatctgtagaccagaggggtaaccagattatgagtgataaacgcaatgtgatcctttttagcgtcttcgacgagaaccggtcctggtacttgaccgagaatatacaaaggttccttcccaaccccgcaggcgttcagttggaagaccctgagtttcaggccagcaatattatgcactcaatcaacggctatgtgtttgatagtctccagctttctgtttgcctccatgaagtagcctattggtacatcttgtcaattggtgctcaaacagacttcctctccgtcttcttctccggctacacctttaagcacaagatggtgtatgaggacactctcacactctttccattttctggagaaaccgtgttcatgagcatggagaatccaggcctttggatcttgggttgccacaacagtgattttcgcaatcggggaatgactgctctcctcaaagtcagcagctgtgataagaacacaggcgactattacgaagattcttacgaggacataagtgcctacttggactccaagaataacgccattgagcccagatcattctcccagaatcctcccgtgcttaaaaggcatcagcgcgaaatcaccagaactactcttcagtctgatcaagaggagattgactatgacgacaccataagcgtggaaatgaagaaggaggatttcgatatctatgacgaagatgagaaccagtctccgcggagctttcagaagaagacgcgacactacttcattgcagcagtcgaaaggctttgggactacggtatgtcatcatcccctcatgtgttgcgcaatagagctcagagtggaagtgttccacagttcaagaaagtcgtctttcaagagtttacagatggcagcttcacacagcctctctatcggggcgagcttaacgaacatttgggactccttggtccctatatccgagccgaagtggaggacaaccttatggttacctttaggaatcaagcctctcgcccctacagcttctactcctccctcatcagttatgaggaggatcagagacaaggcgctgaaccacggaagaactttgtgaaaccgaatgagacgaagacctacttctggaaagtacagcaccacatggcccccacaaaagacgaattcgattgcaaagcatgggcgtatttttcagacgttgacttggagaaagatgtacattcaggacttattggtcctttgttggtgtgtcacactaacactctcaatccagcccatggcaggcaggtgacagtccaggaattcgctcttttctttaccatctttgatgagaccaagtcctggtacttcacggaaaacatggagcgcaattgcagagccccctgtaacatacagatggaggaccctacctttaaggaaaattatcggttccacgcaatcaacggatacattatggatacactccctggccttgtgatggctcaggaccaacgaatcaggtggtacctcctcagcatgggttctaatgagaacatacactccattcacttttcaggacatgtgttcactgtccggaagaaagaagagtataagatggccctctacaatttgtatccaggcgtgtttgagaccgttgaaatgcttccctctaaagctggcatctggagagtagagtgcttgatcggagaacatcttcacgcaggtatgagcaccttgttcctcgtgtacagcaacaaatgtcagaccccacttggcatggccagtggacacattcgcgactttcagatcacagcatctggccagtatggacaatgggccccaaagttggctcgcctccattactccggtagcataaatgcgtggtccactaaagaacctttcagctggattaaggtcgatcttcttgcccccatgatcatccacggcattaagacacagggagcgaggcagaaattctcctccctctacatctcacagttcattattatgtatagtttggacggcaagaagtggcaaacttatagaggtaacagtactggaacagacatggtgttcttcggcaacgttgatagctctggcatcaaacacaacatctttaatcctcccataatagctcggtacatcagattgcatccgacccactacagcattaggagtacactccgaatggagcttatgggttgcgacttgaattcctgttcaatgccactcggaatggagtctaaagccatctctgatgcacagataaccgccagtagctactttacgaacatgtttgctacgtggtcaccctctaaggcaaggcttcatttgcaaggccggtctaatgcctggagacctcaggtgaacaacccgaaagaatggctccaggtggactttcagaagaccatgaaagtaacaggtgtcactactcagggagttaagtccttggatactagcatgtatgtgaaggagttccttatttcctcatcacaagatggccaccagtggaccctcttctttcagaatggtaaggtcaaagtgtttcagggcaatcaagacagcttcacacccgtggtgaacagtcttgatcctccactcttgacacgataccttcgaatccatccacagtcttgggagcaccagattgcattgcgcatggaagtacttggatgcgaggctcaggacctctac

SEQ ID NO: 886 - protein, 1457 aa, synthetic construct
  REGION 1..1457: note = Variant of human B-domain deleted Factor VIII
MQIELSTCFFLCLLRFCFSATRRYYLGAVELSWDYMQSDLGELPVDARFPPRVPKSFPFNTSVVYKKTLFVEFTDHLFNIAKPRPPWMGLLGPTIQAEVYDTVVITLKNMASHPVSLHAVGVSYWKASEGAEYDDQTSQREKEDDKVFPGGSHTYVWQVLKENGPMASDPPCLTYSYLSHVDLVKDLNSGLIGALLVCREGSLAKEKTQTLHKFILLFAVFDEGKSWHSETKNSLMQDRDAASARAWPKMHTVNGYVNRTLPGLIGCHRKSVYWHVIGMGTTPEVHSIFLEGHTFLVRNHRQASLEISPITFLTAQTLLMDLGQFLLFCHISSHQHDGMEAYVKVDSCPEEPQLRMKNNEEAEDYDDDLTDSEMDVVRFDDDNSPSIIQIRSVAKKHPKTWVHYIAAEEEDWDYAPLVLAPDDRSYKSQYLNNGPQRIGRKYKKVRFMAYTDETFKTREAIQHESGILGPLLYGEVGDTLLIIFKNQASRPYNIYPHGITDVRPLYSRRLPKGVKHLKDFPILPGEIFKYKWTVTVEDGPTKSDPRCLTRYYSSFVNMERDLASGLIGPLLICYKESVDQRGNQIMSDKRNVILFSVFDENRSWYLTENIQRFLPNPAGVQLEDPEFQASNIMHSINGYVFDSLQLSVCLHEVAYWYILSIGAQTDFLSVFFSGYTFKHKMVYEDTLTLFPFSGETVFMSMENPGLWILGCHNSDFRNRGMTALLKVSSCDKNTGDYYEDSYEDISAYLDSKNNAIEPRSFSQNPPVLKRHQREITRTTLQSDQEEIDYDDTISVEMKKEDFDIYDEDENQSPRSFQKKTRHYFIAAVERLWDYGMSSSPHVLRNRAQSGSVPQFKKVVFQEFTDGSFTQPLYRGELNEHLGLLGPYIRAEVEDNLMVTFRNQASRPYSFYSSLISYEEDQRQGAEPRKNFVKPNETKTYFWKVQHHMAPTKDEFDCKAWAYFSDVDLEKDVHSGLIGPLLVCHTNTLNPAHGRQVTVQEFALFFTIFDETKSWYFTENMERNCRAPCNIQMEDPTFKENYRFHAINGYIMDTLPGLVMAQDQRIRWYLLSMGSNENIHSIHFSGHVFTVRKKEEYKMALYNLYPGVFETVEMLPSKAGIWRVECLIGEHLHAGMSTLFLVYSNKCQTPLGMASGHIRDFQITASGQYGQWAPKLARLHYSGSINAWSTKEPFSWIKVDLLAPMIIHGIKTQGARQKFSSLYISQFIIMYSLDGKKWQTYRGNSTGTDMVFFGNVDSSGIKHNIFNPPIIARYIRLHPTHYSIRSTLRMELMGCDLNSCSMPLGMESKAISDAQITASSYFTNMFATWSPSKARLHLQGRSNAWRPQVNNPKEWLQVDFQKTMKVTGVTTQGVKSLDTSMYVKEFLISSSQDGHQWTLFFQNGKVKVFQGNQDSFTPVVNSLDPPLLTRYLRIHPQSWEHQIALRMEVLGCEAQDLY

SEQ ID NO: 887 - DNA, 4371 bp, synthetic construct
  misc_feature 1..4371: note = Variant of human B-domain deleted Factor VIII
  source 1..4371: mol_type = other DNA
atgcagattgaactgtctacctgcttcttcctctgtttgctgaggttctgctttagcgccactagacggtactaccttggcgctgtggagctgtcctgggactatatgcagagtgatttgggagagcttcccgtcgacgcacgatttcctcctcgcgttccaaagtcatttccctttaacacaagcgtggtgtacaagaagacgctcttcgtcgaattcaccgatcacctgttcaatatcgccaaacccagaccaccatggatgggtcttttggggcctaccatacaagcggaggtgtatgacacagttgttatcactctcaagaacatggcttctcatccggtaagtcttcacgcagtgggcgtgtcctactggaaagcttcagaaggagccgagtatgatgatcagacatcccagagggagaaagaagacgacaaggtatttccaggtgggtctcatacctatgtgtggcaagtgctcaaagagaatggccctatggcaagcgatccgccgtgtttgacttacagctacctttcacacgttgacctcgtcaaggacctcaactccgggttgattggagccttgttggtatgcagggaaggatctcttgccaaagagaagacacagaccctccacaagtttatccttctctttgctgtgttcgatgagggcaaaagttggcatagcgaaacgaagaattccctcatgcaggatcgcgacgcagccagcgccagagcttggcccaagatgcacactgtgaacggatatgtcaataggacgcttcctggcttgattgggtgtcatcggaaaagtgtctactggcacgtgatcggaatggggacaacaccagaggtccactccatatttctcgaaggccataccttccttgttcgaaaccacagacaggcatccttggagatctctcccattacctttctcactgcccaaacgctccttatggacttgggtcagttccttctcttctgccatatcagctcacaccagcatgatggtatggaagcttatgtgaaagtcgacagttgtcctgaggagccacagttgcgcatgaagaataatgaagaagccgaggattacgacgacgatctcaccgattctgagatggacgtggtgaggtttgatgacgacaactctccctccatcattcaaatccggagcgtggcgaagaaacaccccaagacttgggtccactatatagcggcggaagaggaggattgggattacgctcctcttgtattggcaccagatgaccgctcatacaaaagccagtacctcaacaacggaccgcagagaattggccggaagtataagaaagtgcgatttatggcctatacagacgaaacctttaagacaagggaggccatccagcatgagagtgggattttgggacctcttctttacggcgaagttggtgataccctcctcatcatcttcaagaatcaagcttctcgcccctataacatttacccacacgggatcactgacgttaggcctttgtatagcagaagacttcccaaaggcgtgaagcatctcaaagacttccccattttgccaggcgagatctttaagtacaaatggaccgtcacagtggaagatggaccgactaaatcagaccctcgatgccttacgcggtactattcctccttcgtgaatatggagagagatttggcaagcggactcataggaccactcctcatctgttacaaggaatctgtagaccagaggggtaaccagattatgagtgataaacgcaatgtgatcctttttagcgtcttcgacgagaaccggtcctggtacttgaccgagaatatacaaaggttccttcccaaccccgcaggcgttcagttggaagaccctgagtttcaggccagcaatattatgcactcaatcaacggctatgtgtttgatagtctccagctttctgtttgcctccatgaagtagcctattggtacatcttgtcaattggtgctcaaacagacttcctctccgtcttcttctccggctacacctttaagcacaagatggtgtatgaggacactctcacactctttccattttctggagaaaccgtgttcatgagcatggagaatccaggcctttggatcttgggttgccacaacagtgattttcgcaatcggggaatgactgctctcctcaaagtcagcagctgtgataagaacacaggcgactattacgaagattcttacgaggacataagtgcctacttggactccaagaataacgccattgagcccagatcattctcccagaatcctcccgtgcttaaaaggcatcagcgcgaaatcaccagaactactcttcagtctgatcaagaggagattgactatgacgacaccataagcgtggaaatgaagaaggaggatttcgatatctatgacgaagatgagaaccagtctccgcggagctttcagaagaagacgcgacactacttcattgcagcagtcgaaaggctttgggactacggtatgtcatcatcccctcatgtgttgcgcaatagagctcagagtggaagtgttccacagttcaagaaagtcgtctttcaagagtttacagatggcagcttcacacagcctctctatcggggcgagcttaacgaacatttgggactccttggtccctatatccgagccgaagtggaggacaacattatggttacctttaggaatcaagcctctcgcccctacagcttctactcctccctcatcagttatgaggaggatcagagacaaggcgctgaaccacggaagaactttgtgaaaccgaatgagacgaggacctacttctggaaagtacagcaccacatggcccccacaaaagacgaattcgattgcaaagcatgggcgtatttttcagacgttgacttggagaaagatgtacattcaggacttattggtcctttgttggtgtgtcacactaacactctcaatccagcccatggcaggcaggtgacagtccaggaattcgctcttttctttaccatctttgatgagaccaagtcctggtacttcacggaaaacatggagcgcaattgcagagccccctgtaacatacagatggaggaccctacctttaaggaaaattatcggttccacgcaatcaacggatacattatggatacactccctggccttgtgatggctcaggaccaacgaatcaggtggtacctcctcagcatgggttctaatgagaacatacactccattcacttttcaggacatgtgttcactgtccggaagaaagaagagtataagatggccctctacaatttgtatccaggcgtgtttgagaccgttgaaatgcttccctctaaagctggcatctggagagtagagtgcttgatcggagaacatcttcacgcaggtatgagcaccttgttcctcgtgtacagcaacaaatgtcagaccccacttggcatggccagtggacacattcgcgactttcagatcacagcatctggccagtatggacaatgggccccaaagttggctcgcctccattactccggtagcataaatgcgtggtccactaaagaacctttcagctggattaaggtcgatcttcttgcccccatgatcatccacggcattaagacacagggagcgaggcagaaattctcctccctctacatctcacagttcattattatgtatagtttggacggcaagaagtggcaaacttatagaggtaacagtactggaacagacatggtgttcttcggcaacgttgatagctctggcatcaaacacaacatctttaatcctcccataatagctcggtacatcagattgcatccgacccactacagcattaggagtacactccgaatggagcttatgggttgcgacttgaattcctgttcaatgccactcggaatggagtctaaagccatctctgatgcacagataaccgccagtagctactttacgaacatgtttgctacgtggtcaccctctaaggcaaggcttcatttgcaaggccggtctaatgcctggagacctcaggtgaacaacccgaaagaatggctccaggtggactttcagaagaccatgaaagtaacaggtgtcactactcagggagttaagtccttggatactagcatgtatgtgaaggagttccttatttcctcatcacaagatggccaccagtggaccctcttctttcagaatggtaaggtcaaagtgtttcagggcaatcaagacagcttcacacccgtggtgaacagtcttgatcctccactcttgacacgataccttcgaatccatccacagtcttgggagcaccagattgcattgcgcatggaagtacttggatgcgaggctcaggacctctac

SEQ ID NO: 888 - protein, 1457 aa, synthetic construct
  REGION 1..1457: note = Variant of human B-domain deleted Factor VIII
MQIELSTCFFLCLLRFCFSATRRYYLGAVELSWDYMQSDLGELPVDARFPPRVPKSFPFNTSVVYKKTLFVEFTDHLFNIAKPRPPWMGLLGPTIQAEVYDTVVITLKNMASHPVSLHAVGVSYWKASEGAEYDDQTSQREKEDDKVFPGGSHTYVWQVLKENGPMASDPPCLTYSYLSHVDLVKDLNSGLIGALLVCREGSLAKEKTQTLHKFILLFAVFDEGKSWHSETKNSLMQDRDAASARAWPKMHTVNGYVNRTLPGLIGCHRKSVYWHVIGMGTTPEVHSIFLEGHTFLVRNHRQASLEISPITFLTAQTLLMDLGQFLLFCHISSHQHDGMEAYVKVDSCPEEPQLRMKNNEEAEDYDDDLTDSEMDVVRFDDDNSPSIIQIRSVAKKHPKTWVHYIAAEEEDWDYAPLVLAPDDRSYKSQYLNNGPQRIGRKYKKVRFMAYTDETFKTREAIQHESGILGPLLYGEVGDTLLIIFKNQASRPYNIYPHGITDVRPLYSRRLPKGVKHLKDFPILPGEIFKYKWTVTVEDGPTKSDPRCLTRYYSSFVNMERDLASGLIGPLLICYKESVDQRGNQIMSDKRNVILFSVFDENRSWYLTENIQRFLPNPAGVQLEDPEFQASNIMHSINGYVFDSLQLSVCLHEVAYWYILSIGAQTDFLSVFFSGYTFKHKMVYEDTLTLFPFSGETVFMSMENPGLWILGCHNSDFRNRGMTALLKVSSCDKNTGDYYEDSYEDISAYLDSKNNAIEPRSFSQNPPVLKRHQREITRTTLQSDQEEIDYDDTISVEMKKEDFDIYDEDENQSPRSFQKKTRHYFIAAVERLWDYGMSSSPHVLRNRAQSGSVPQFKKVVFQEFTDGSFTQPLYRGELNEHLGLLGPYIRAEVEDNIMVTFRNQASRPYSFYSSLISYEEDQRQGAEPRKNFVKPNETRTYFWKVQHHMAPTKDEFDCKAWAYFSDVDLEKDVHSGLIGPLLVCHTNTLNPAHGRQVTVQEFALFFTIFDETKSWYFTENMERNCRAPCNIQMEDPTFKENYRFHAINGYIMDTLPGLVMAQDQRIRWYLLSMGSNENIHSIHFSGHVFTVRKKEEYKMALYNLYPGVFETVEMLPSKAGIWRVECLIGEHLHAGMSTLFLVYSNKCQTPLGMASGHIRDFQITASGQYGQWAPKLARLHYSGSINAWSTKEPFSWIKVDLLAPMIIHGIKTQGARQKFSSLYISQFIIMYSLDGKKWQTYRGNSTGTDMVFFGNVDSSGIKHNIFNPPIIARYIRLHPTHYSIRSTLRMELMGCDLNSCSMPLGMESKAISDAQITASSYFTNMFATWSPSKARLHLQGRSNAWRPQVNNPKEWLQVDFQKTMKVTGVTTQGVKSLDTSMYVKEFLISSSQDGHQWTLFFQNGKVKVFQGNQDSFTPVVNSLDPPLLTRYLRIHPQSWEHQIALRMEVLGCEAQDLY

SEQ ID NO: 889 - DNA, 4371 bp, synthetic construct
  misc_feature 1..4371: note = Variant of human B-domain deleted Factor VIII
  source 1..4371: mol_type = other DNA
atgcagattgaactgtctacctgcttcttcctctgtttgctgaggttctgctttagcgccactagacggtactaccttggcgctgtggagctgtcctgggactatatgcagagtgatttgggagagcttcccgtcgacgcacgatttcctcctcgcgttccaaagtcatttccctttaacacaagcgtggtgtacaagaagacgctcttcgtcgaattcaccgatcacctgttcaatatcgccaaacccagaccaccatggatgggtcttttggggcctaccatacaagcggaggtgtatgacacagttgttatcactctcaagaacatggcttctcatccggtaagtcttcacgcagtgggcgtgtcctactggaaagcttcagaaggagccgagtatgatgatcagacatcccagagggagaaagaagacgacaaggtatttccaggtgggtctcatacctatgtgtggcaagtgctcaaagagaatggccctatggcaagcgatccgccgtgtttgacttacagctacctttcacacgttgacctcgtcaaggacctcaactccgggttgattggagccttgttggtatgcagggaaggatctcttgccaaagagaagacacagaccctccacaagtttatccttctctttgctgtgttcgatgagggcaaaagttggcatagcgaaacgaagaattccctcatgcaggatcgcgacgcagccagcgccagagcttggcccaagatgcacactgtgaacggatatgtcaataggacgcttcctggcttgattgggtgtcatcggaaaagtgtctactggcacgtgatcggaatggggacaacaccagaggtccactccatatttctcgaaggccataccttccttgttcgaaaccacagacaggcatccttggagatctctcccattacctttctcactgcccaaacgctccttatggacttgggtcagttccttctcttctgccatatcagctcacaccagcatgatggtatggaagcttatgtgaaagtcgacagttgtcctgaggagccacagttgcgcatgaagaataatgaagaagccgaggattacgacgacgatctcaccgattctgagatggacgtggtgaggtttgatgacgacaactctccctccatcattcaaatccggagcgtggcgaagaaacaccccaagacttgggtccactatatagcggcggaagaggaggattgggattacgctcctcttgtattggcaccagatgaccgctcatacaaaagccagtacctcaacaacggaccgcagagaattggccggaagtataagaaagtgcgatttatggcctatacagacgaaacctttaagacaagggaggccatccagcatgagagtgggattttgggacctcttctttacggcgaagttggtgataccctcctcatcatcttcaagaatcaagcttctcgcccctataacatttacccacacgggatcactgacgttaggcctttgtatagcagaagacttcccaaaggcgtgaagcatctcaaagacttccccattttgccaggcgagatctttaagtacaaatggaccgtcacagtggaagatggaccgactaaatcagaccctcgatgccttacgcggtactattcctccttcgtgaatatggagagagatttggcaagcggactcataggaccactcctcatctgttacaaggaatctgtagaccagaggggtaaccagattatgagtgataaacgcaatgtgatcctttttagcgtcttcgacgagaaccggtcctggtacttgaccgagaatatacaaaggttccttcccaaccccgcaggcgttcagttggaagaccctgagtttcaggccagcaatattatgcactcaatcaacggctatgtgtttgatagtctccagctttctgtttgcctccatgaagtagcctattggtacatcttgtcaattggtgctcaaacagacttcctctccgtcttcttctccggctacacctttaagcacaagatggtgtatgaggacactctcacactctttccattttctggagaaaccgtgttcatgagcatggagaatccaggcctttggatcttgggttgccacaacagtgattttcgcaatcggggaatgactgctctcctcaaagtcagcagctgtgataagaacacaggcgactattacgaagattcttacgaggacataagtgcctacttggactccaagaataacgccattgagcccagatcattctcccagaatcctcccgtgcttaaaaggcatcagcgcgaaggtaccagaactactcttcagtctgatcaagaggagattgactatgacgacaccataagcgtggaaatgaagaaggaggatttcgatatctatgacgaagatgagaaccagtctccgcggagctttcagaagaagacgcgacactacttcattgcagcagtcgaaaggctttgggactacggtatgtcatcatcccctcatgtgttgcgcaatagagctcagagtggaagtgttccacagttcaagaaagtcgtctttcaagagtttacagatggcagcttcacacagcctctctatcggggcgagcttaacgaacatttgggactccttggtccctatatccgagccgaagtggaggacaacattatggttacctttaggaatcaagcctctcgcccctacagcttctactcctccctcatcagttatgaggaggatcagagacaaggcgctgaaccacggaagaactttgtgaaaccgaatgagacgaagacctacttctggaaagtacagcaccacatggcccccacaaaagacgaattcgattgcaaagcatgggcgtatttttcagacgttgacttggagaaagatgtacattcaggacttattggtcctttgttggtgtgtcacactaacactctcaatccagcccatggcaggcaggtgacagtccaggaattcgctcttttctttaccatctttgatgagaccaagtcctggtacttcacggaaaacatggagcgcaattgcagagccccctgtaacatacagatggaggaccctacctttaaggaaaattatcggttccacgcaatcaacggatacattatggatacactccctggccttgtgatggctcaggaccaacgaatcaggtggtacctcctcagcatgggttctaatgagaacatacactccattcacttttcaggacatgtgttcactgtccggaagaaagaagagtataagatggccctctacaatttgtatccaggcgtgtttgagaccgttgaaatgcttccctctaaagctggcatctggagagtagagtgcttgatcggagaacatcttcacgcaggtatgagcaccttgttcctcgtgtacagcaacaaatgtcagaccccacttggcatggccagtggacacattcgcgactttcagatcacagcatctggccagtatggacaatgggccccaaagttggctcgcctccattactccggtagcataaatgcgtggtccactaaagaacctttcagctggattaaggtcgatcttcttgcccccatgatcatccacggcattaagacacagggagcgaggcagaaattctcctccctctacatctcacagttcattattatgtatagtttggacggcaagaagtggcaaacttatagaggtaacagtactggaacagacatggtgttcttcggcaacgttgatagctctggcatcaaacacaacatctttaatcctcccataatagctcggtacatcagattgcatccgacccactacagcattaggagtacactccgaatggagcttatgggttgcgacttgaattcctgttcaatgccactcggaatggagtctaaagccatctctgatgcacagataaccgccagtagctactttacgaacatgtttgctacgtggtcaccctctaaggcaaggcttcatttgcaaggccggtctaatgcctggagacctcaggtgaacaacccgaaagaatggctccaggtggactttcagaagaccatgaaagtaacaggtgtcactactcagggagttaagtccttggatactagcatgtatgtgaaggagttccttatttcctcatcacaagatggccaccagtggaccctcttctttcagaatggtaaggtcaaagtgtttcagggcaatcaagacagcttcacacccgtggtgaacagtcttgatcctccactcttgacacgataccttcgaatccatccacagtcttgggagcaccagattgcattgcgcatggaagtacttggatgcgaggctcaggacctctac

SEQ ID NO: 890 - protein, 1457 aa, synthetic construct
  REGION 1..1457: note = Variant of human B-domain deleted Factor VIII
MQIELSTCFFLCLLRFCFSATRRYYLGAVELSWDYMQSDLGELPVDARFPPRVPKSFPFNTSVVYKKTLFVEFTDHLFNIAKPRPPWMGLLGPTIQAEVYDTVVITLKNMASHPVSLHAVGVSYWKASEGAEYDDQTSQREKEDDKVFPGGSHTYVWQVLKENGPMASDPPCLTYSYLSHVDLVKDLNSGLIGALLVCREGSLAKEKTQTLHKFILLFAVFDEGKSWHSETKNSLMQDRDAASARAWPKMHTVNGYVNRTLPGLIGCHRKSVYWHVIGMGTTPEVHSIFLEGHTFLVRNHRQASLEISPITFLTAQTLLMDLGQFLLFCHISSHQHDGMEAYVKVDSCPEEPQLRMKNNEEAEDYDDDLTDSEMDVVRFDDDNSPSIIQIRSVAKKHPKTWVHYIAAEEEDWDYAPLVLAPDDRSYKSQYLNNGPQRIGRKYKKVRFMAYTDETFKTREAIQHESGILGPLLYGEVGDTLLIIFKNQASRPYNIYPHGITDVRPLYSRRLPKGVKHLKDFPILPGEIFKYKWTVTVEDGPTKSDPRCLTRYYSSFVNMERDLASGLIGPLLICYKESVDQRGNQIMSDKRNVILFSVFDENRSWYLTENIQRFLPNPAGVQLEDPEFQASNIMHSINGYVFDSLQLSVCLHEVAYWYILSIGAQTDFLSVFFSGYTFKHKMVYEDTLTLFPFSGETVFMSMENPGLWILGCHNSDFRNRGMTALLKVSSCDKNTGDYYEDSYEDISAYLDSKNNAIEPRSFSQNPPVLKRHQREGTRTTLQSDQEEIDYDDTISVEMKKEDFDIYDEDENQSPRSFQKKTRHYFIAAVERLWDYGMSSSPHVLRNRAQSGSVPQFKKVVFQEFTDGSFTQPLYRGELNEHLGLLGPYIRAEVEDNIMVTFRNQASRPYSFYSSLISYEEDQRQGAEPRKNFVKPNETKTYFWKVQHHMAPTKDEFDCKAWAYFSDVDLEKDVHSGLIGPLLVCHTNTLNPAHGRQVTVQEFALFFTIFDETKSWYFTENMERNCRAPCNIQMEDPTFKENYRFHAINGYIMDTLPGLVMAQDQRIRWYLLSMGSNENIHSIHFSGHVFTVRKKEEYKMALYNLYPGVFETVEMLPSKAGIWRVECLIGEHLHAGMSTLFLVYSNKCQTPLGMASGHIRDFQITASGQYGQWAPKLARLHYSGSINAWSTKEPFSWIKVDLLAPMIIHGIKTQGARQKFSSLYISQFIIMYSLDGKKWQTYRGNSTGTDMVFFGNVDSSGIKHNIFNPPIIARYIRLHPTHYSIRSTLRMELMGCDLNSCSMPLGMESKAISDAQITASSYFTNMFATWSPSKARLHLQGRSNAWRPQVNNPKEWLQVDFQKTMKVTGVTTQGVKSLDTSMYVKEFLISSSQDGHQWTLFFQNGKVKVFQGNQDSFTPVVNSLDPPLLTRYLRIHPQSWEHQIALRMEVLGCEAQDLY

SEQ ID NO: 891 - DNA, 4371 bp, synthetic construct
  misc_feature 1..4371: note = Variant of human B-domain deleted Factor VIII
  source 1..4371: mol_type = other DNA
atgcagattgaactgtctacctgcttcttcctctgtttgctgaggttctgctttagcgccactagacggtactaccttggcgctgtggagctgtcctgggactatatgcagagtgatttgggagagcttcccgtcgacgcacgatttcctcctcgcgttccaaagtcatttccctttaacacaagcgtggtgtacaagaagacgctcttcgtcgaattcaccgatcacctgttcaatatcgccaaacccagaccaccatggatgggtcttttggggcctaccatacaagcggaggtgtatgacacagttgttatcactctcaagaacatggcttctcatccggtaagtcttcacgcagtgggcgtgtcctactggaaagcttcagaaggagccgagtatgatgatcagacatcccagagggagaaagaagacgacaaggtatttccaggtgggtctcatacctatgtgtggcaagtgctcaaagagaatggccctatggcaagcgatccgccgtgtttgacttacagctacctttcacacgttgacctcgtcaaggacctcaactccgggttgattggagccttgttggtatgcagggaaggatctcttgccaaagagaagacacagaccctccacaagtttatccttctctttgctgtgttcgatgagggcaaaagttggcatagcgaaacgaagaattccctcatgcaggatcgcgacgcagccagcgccagagcttggcccaagatgcacactgtgaacggatatgtcaataggacgcttcctggcttgattgggtgtcatcggaaaagtgtctactggcacgtgatcggaatggggacaacaccagaggtccactccatatttctcgaaggccataccttccttgttcgaaaccacagacaggcatccttggagatctctcccattacctttctcactgcccaaacgctccttatggacttgggtcagttccttctcttctgccatatcagctcacaccagcatgatggtatggaagcttatgtgaaagtcgacagttgtcctgaggagccacagttgcgcatgaagaataatgaagaagccgaggattacgacgacgatctcaccgattctgagatggacgtggtgaggtttgatgacgacaactctccctccatcattcaaatccggagcgtggcgaagaaacaccccaagacttgggtccactatatagcggcggaagaggaggattgggattacgctcctcttgtattggcaccagatgaccgctcatacaaaagccagtacctcaacaacggaccgcagagaattggccggaagtataagaaagtgcgatttatggcctatacagacgaaacctttaagacaagggaggccatccagcatgagagtgggattttgggacctcttctttacggcgaagttggtgataccctcctcatcatcttcaagaatcaagcttctcgcccctataacatttacccacacgggatcactgacgttaggcctttgtatagcagaagacttcccaaaggcgtgaagcatctcaaagacttccccattttgccaggcgagatctttaagtacaaatggaccgtcacagtggaagatggaccgactaaatcagaccctcgatgccttacgcggtactattcctccttcgtgaatatggagagagatttggcaagcggactcataggaccactcctcatctgttacaaggaatctgtagaccagaggggtaaccagattatgagtgataaacgcaatgtgatcctttttagcgtcttcgacgagaaccggtcctggtacttgaccgagaatatacaaaggttccttcccaaccccgcaggcgttcagttggaagaccctgagtttcaggccagcaatattatgcactcaatcaacggctatgtgtttgatagtctccagctttctgtttgcctccatgaagtagcctattggtacatcttgtcaattggtgctcaaacagacttcctctccgtcttcttctccggctacacctttaagcacaagatggtgtatgaggacactctcacactctttccattttctggagaaaccgtgttcatgagcatggagaatccaggcctttggatcttgggttgccacaacagtgattttcgcaatcggggaatgactgctctcctcaaagtcagcagctgtgataagaacacaggcgactattacgaagattcttacgaggacataagtgcctacttggacgagaagaataacgccattgagcccagatcattctcccagaatcctcccgtgcttaaaaggcatcagcgcgaaatcaccagaactactcttcagtctgatcaagaggagattgactatgacgacaccataagcgtggaaatgaagaaggaggatttcgatatctatgacgaagatgagaaccagtctccgcggagctttcagaagaagacgcgacactacttcattgcagcagtcgaaaggctttgggactacggtatgtcatcatcccctcatgtgttgcgcaatagagctcagagtggaagtgttccacagttcaagaaagtcgtctttcaagagtttacagatggcagcttcacacagcctctctatcggggcgagcttaacgaacatttgggactccttggtccctatatccgagccgaagtggaggacaacattatggttacctttaggaatcaagcctctcgcccctacagcttctactcctccctcatcagttatgaggaggatcagagacaaggcgctgaaccacggaagaactttgtgaaaccgaatgagacgaagacctacttctggaaagtacagcaccacatggcccccacaaaagacgaattcgattgcaaagcatgggcgtatttttcagacgttgacttggagaaagatgtacattcaggacttattggtcctttgttggtgtgtcacactaacactctcaatccagcccatggcaggcaggtgacagtccaggaattcgctcttttctttaccatctttgatgagaccaagtcctggtacttcacggaaaacatggagcgcaattgcagagccccctgtaacatacagatggaggaccctacctttaaggaaaattatcggttccacgcaatcaacggatacattatggatacactccctggccttgtgatggctcaggaccaacgaatcaggtggtacctcctcagcatgggttctaatgagaacatacactccattcacttttcaggacatgtgttcactgtccggaagaaagaagagtataagatggccctctacaatttgtatccaggcgtgtttgagaccgttgaaatgcttccctctaaagctggcatctggagagtagagtgcttgatcggagaacatcttcacgcaggtatgagcaccttgttcctcgtgtacagcaacaaatgtcagaccccacttggcatggccagtggacacattcgcgactttcagatcacagcatctggccagtatggacaatgggccccaaagttggctcgcctccattactccggtagcataaatgcgtggtccactaaagaacctttcagctggattaaggtcgatcttcttgcccccatgatcatccacggcattaagacacagggagcgaggcagaaattctcctccctctacatctcacagttcattattatgtatagtttggacggcaagaagtggcaaacttatagaggtaacagtactggaacagacatggtgttcttcggcaacgttgatagctctggcatcaaacacaacatctttaatcctcccataatagctcggtacatcagattgcatccgacccactacagcattaggagtacactccgaatggagcttatgggttgcgacttgaattcctgttcaatgccactcggaatggagtctaaagccatctctgatgcacagataaccgccagtagctactttacgaacatgtttgctacgtggtcaccctctaaggcaaggcttcatttgcaaggccggtctaatgcctggagacctcaggtgaacaacccgaaagaatggctccaggtggactttcagaagaccatgaaagtaacaggtgtcactactcagggagttaagtccttggatactagcatgtatgtgaaggagttccttatttcctcatcacaagatggccaccagtggaccctcttctttcagaatggtaaggtcaaagtgtttcagggcaatcaagacagcttcacacccgtggtgaacagtcttgatcctccactcttgacacgataccttcgaatccatccacagtcttgggagcaccagattgcattgcgcatggaagtacttggatgcgaggctcaggacctctac

SEQ ID NO: 892 - protein, 1457 aa, synthetic construct
  REGION 1..1457: note = Variant of human B-domain deleted Factor VIII
MQIELSTCFFLCLLRFCFSATRRYYLGAVELSWDYMQSDLGELPVDARFPPRVPKSFPFNTSVVYKKTLFVEFTDHLFNIAKPRPPWMGLLGPTIQAEVYDTVVITLKNMASHPVSLHAVGVSYWKASEGAEYDDQTSQREKEDDKVFPGGSHTYVWQVLKENGPMASDPPCLTYSYLSHVDLVKDLNSGLIGALLVCREGSLAKEKTQTLHKFILLFAVFDEGKSWHSETKNSLMQDRDAASARAWPKMHTVNGYVNRTLPGLIGCHRKSVYWHVIGMGTTPEVHSIFLEGHTFLVRNHRQASLEISPITFLTAQTLLMDLGQFLLFCHISSHQHDGMEAYVKVDSCPEEPQLRMKNNEEAEDYDDDLTDSEMDVVRFDDDNSPSIIQIRSVAKKHPKTWVHYIAAEEEDWDYAPLVLAPDDRSYKSQYLNNGPQRIGRKYKKVRFMAYTDETFKTREAIQHESGILGPLLYGEVGDTLLIIFKNQASRPYNIYPHGITDVRPLYSRRLPKGVKHLKDFPILPGEIFKYKWTVTVEDGPTKSDPRCLTRYYSSFVNMERDLASGLIGPLLICYKESVDQRGNQIMSDKRNVILFSVFDENRSWYLTENIQRFLPNPAGVQLEDPEFQASNIMHSINGYVFDSLQLSVCLHEVAYWYILSIGAQTDFLSVFFSGYTFKHKMVYEDTLTLFPFSGETVFMSMENPGLWILGCHNSDFRNRGMTALLKVSSCDKNTGDYYEDSYEDISAYLDEKNNAIEPRSFSQNPPVLKRHQREITRTTLQSDQEEIDYDDTISVEMKKEDFDIYDEDENQSPRSFQKKTRHYFIAAVERLWDYGMSSSPHVLRNRAQSGSVPQFKKVVFQEFTDGSFTQPLYRGELNEHLGLLGPYIRAEVEDNIMVTFRNQASRPYSFYSSLISYEEDQRQGAEPRKNFVKPNETKTYFWKVQHHMAPTKDEFDCKAWAYFSDVDLEKDVHSGLIGPLLVCHTNTLNPAHGRQVTVQEFALFFTIFDETKSWYFTENMERNCRAPCNIQMEDPTFKENYRFHAINGYIMDTLPGLVMAQDQRIRWYLLSMGSNENIHSIHFSGHVFTVRKKEEYKMALYNLYPGVFETVEMLPSKAGIWRVECLIGEHLHAGMSTLFLVYSNKCQTPLGMASGHIRDFQITASGQYGQWAPKLARLHYSGSINAWSTKEPFSWIKVDLLAPMIIHGIKTQGARQKFSSLYISQFIIMYSLDGKKWQTYRGNSTGTDMVFFGNVDSSGIKHNIFNPPIIARYIRLHPTHYSIRSTLRMELMGCDLNSCSMPLGMESKAISDAQITASSYFTNMFATWSPSKARLHLQGRSNAWRPQVNNPKEWLQVDFQKTMKVTGVTTQGVKSLDTSMYVKEFLISSSQDGHQWTLFFQNGKVKVFQGNQDSFTPVVNSLDPPLLTRYLRIHPQSWEHQIALRMEVLGCEAQDLY

SEQ ID NO: 893 - DNA, 4371 bp, synthetic construct
  misc_feature 1..4371: note = Variant of human B-domain deleted Factor VIII
  source 1..4371: mol_type = other DNA
atgcagattgaactgtctacctgcttcttcctctgtttgctgaggttctgctttagcgccactagacggtactaccttggcgctgtggagctgtcctgggactatatgcagagtgatttgggagagcttcccgtcgacgcacgatttcctcctcgcgttccaaagtcatttccctttaacacaagcgtggtgtacaagaagacgctcttcgtcgaattcaccgatcacctgttcaatatcgccaaacccagaccaccatggatgggtcttttggggcctaccatacaagcggaggtgtatgacacagttgttatcactctcaagaacatggcttctcatccggtaagtcttcacgcagtgggcgtgtcctactggaaagcttcagaaggagccgagtatgatgatcagacatcccagagggagaaagaagacgacaaggtatttccaggtgggtctcatacctatgtgtggcaagtgctcaaagagaatggccctatggcaagcgatccgccgtgtttgacttacagctacctttcacacgttgacctcgtcaaggacctcaactccgggttgattggagccttgttggtatgcagggaaggatctcttgccaaagagaagacacagaccctccacaagtttatccttctctttgctgtgttcgatgagggcaaaagttggcatagcgaaacgaagaattccctcatgcaggatcgcgacgcagccagcgccagagcttggcccaagatgcacactgtgaacggatatgtcaataggacgcttcctggcttgattgggtgtcatcggaaaagtgtctactggcacgtgatcggaatggggacaacaccagaggtccactccatatttctcgaaggccataccttccttgttcgaaaccacagacaggcatccttggagatctctcccattacctttctcactgcccaaacgctccttatggacttgggtcagttccttctcttctgccatatcagctcacaccagcatgatggtatggaagcttatgtgaaagtcgacagttgtcctgaggagccacagttgcgcatgaagaataatgaagaagccgaggattacgacgacgatctcaccgattctgagatggacgtggtgaggtttgatgacgacaactctccctccatcattcaaatccggagcgtggcgaagaaacaccccaagacttgggtccactatatagcggcggaagaggaggattgggattacgctcctcttgtattggcaccagatgaccgctcatacaaaagccagtacctcaacaacggaccgcagagaattggccggaagtataagaaagtgcgatttatggcctatacagacgaaacctttaagacaagggaggccatccagcatgagagtgggattttgggacctcttctttacggcgaagttggtgataccctcctcatcatcttcaagaatcaagcttctcgcccctataacatttacccacacgggatcactgacgttaggcctttgtatagcagaagacttcccaaaggcgtgaagcatctcaaagacttccccattttgccaggcgagatctttaagtacaaatggaccgtcacagtggaagatggaccgactaaatcagaccctcgatgccttacgcggtactattcctccttcgtgaatatggagagagatttggcaagcggactcataggaccactcctcatctgttacaaggaatctgtagaccagaggggtaaccagattatgagtgataaacgcaatgtgatcctttttagcgtcttcgacgagaaccggtcctggtacttgaccgagaatatacaaaggttccttcccaaccccgcaggcgttcagttggaagaccctgagtttcaggccagcaatattatgcactcaatcaacggctatgtgtttgatagtctccagctttctgtttgcctccatgaagtagcctattggtacatcttgtcaattggtgctcaaacagacttcctctccgtcttcttctccggctacacctttaagcacaagatggtgtatgaggacactctcacactctttccattttctggagaaaccgtgttcatgagcatggagaatccaggcctttggatcttgggttgccacaacagtgattttcgcaatcggggaatgactgctctcctcaaagtcagcagctgtgattggaacacaggcgactattacgaagattcttacgaggacataagtgcctacttggactccaagaataacgccattgagcccagatcattctcccagaatcctcccgtgcttaaaaggcatcagcgcgaaatcaccagaactactcttcagtctgatcaagaggagattgactatgacgacaccataagcgtggaaatgaagaaggaggatttcgatatctatgacgaagatgagaaccagtctccgcggagctttcagaagaagacgcgacactacttcattgcagcagtcgaaaggctttgggactacggtatgtcatcatcccctcatgtgttgcgcaatagagctcagagtggaagtgttccacagttcaagaaagtcgtctttcaagagtttacagatggcagcttcacacagcctctctatcggggcgagcttaacgaacatttgggactccttggtccctatatccgagccgaagtggaggacaacattatggttacctttaggaatcaagcctctcgcccctacagcttctactcctccctcatcagttatgaggaggatcagagacaaggcgctgaaccacggaagaactttgtgaaaccgaatgagacgaagacctacttctggaaagtacagcaccacatggcccccacaaaagacgaattcgattgcaaagcatgggcgtatttttcagacgttgacttggagaaagatgtacattcaggacttattggtcctttgttggtgtgtcacactaacactctcaatccagcccatggcaggcaggtgacagtccaggaattcgctcttttctttaccatctttgatgagaccaagtcctggtacttcacggaaaacatggagcgcaattgcagagccccctgtaacatacagatggaggaccctacctttaaggaaaattatcggttccacgcaatcaacggatacattatggatacactccctggccttgtgatggctcaggaccaacgaatcaggtggtacctcctcagcatgggttctaatgagaacatacactccattcacttttcaggacatgtgttcactgtccggaagaaagaagagtataagatggccctctacaatttgtatccaggcgtgtttgagaccgttgaaatgcttccctctaaagctggcatctggagagtagagtgcttgatcggagaacatcttcacgcaggtatgagcaccttgttcctcgtgtacagcaacaaatgtcagaccccacttggcatggccagtggacacattcgcgactttcagatcacagcatctggccagtatggacaatgggccccaaagttggctcgcctccattactccggtagcataaatgcgtggtccactaaagaacctttcagctggattaaggtcgatcttcttgcccccatgatcatccacggcattaagacacagggagcgaggcagaaattctcctccctctacatctcacagttcattattatgtatagtttggacggcaagaagtggcaaacttatagaggtaacagtactggaacagacatggtgttcttcggcaacgttgatagctctggcatcaaacacaacatctttaatcctcccataatagctcggtacatcagattgcatccgacccactacagcattaggagtacactccgaatggagcttatgggttgcgacttgaattcctgttcaatgccactcggaatggagtctaaagccatctctgatgcacagataaccgccagtagctactttacgaacatgtttgctacgtggtcaccctctaaggcaaggcttcatttgcaaggccggtctaatgcctggagacctcaggtgaacaacccgaaagaatggctccaggtggactttcagaagaccatgaaagtaacaggtgtcactactcagggagttaagtccttggatactagcatgtatgtgaaggagttccttatttcctcatcacaagatggccaccagtggaccctcttctttcagaatggtaaggtcaaagtgtttcagggcaatcaagacagcttcacacccgtggtgaacagtcttgatcctccactcttgacacgataccttcgaatccatccacagtcttgggagcaccagattgcattgcgcatggaagtacttggatgcgaggctcaggacctctac

SEQ ID NO: 894 - protein, 1457 aa, synthetic construct
  REGION 1..1457: note = Variant of human B-domain deleted Factor VIII
MQIELSTCFFLCLLRFCFSATRRYYLGAVELSWDYMQSDLGELPVDARFPPRVPKSFPFNTSVVYKKTLFVEFTDHLFNIAKPRPPWMGLLGPTIQAEVYDTVVITLKNMASHPVSLHAVGVSYWKASEGAEYDDQTSQREKEDDKVFPGGSHTYVWQVLKENGPMASDPPCLTYSYLSHVDLVKDLNSGLIGALLVCREGSLAKEKTQTLHKFILLFAVFDEGKSWHSETKNSLMQDRDAASARAWPKMHTVNGYVNRTLPGLIGCHRKSVYWHVIGMGTTPEVHSIFLEGHTFLVRNHRQASLEISPITFLTAQTLLMDLGQFLLFCHISSHQHDGMEAYVKVDSCPEEPQLRMKNNEEAEDYDDDLTDSEMDVVRFDDDNSPSIIQIRSVAKKHPKTWVHYIAAEEEDWDYAPLVLAPDDRSYKSQYLNNGPQRIGRKYKKVRFMAYTDETFKTREAIQHESGILGPLLYGEVGDTLLIIFKNQASRPYNIYPHGITDVRPLYSRRLPKGVKHLKDFPILPGEIFKYKWTVTVEDGPTKSDPRCLTRYYSSFVNMERDLASGLIGPLLICYKESVDQRGNQIMSDKRNVILFSVFDENRSWYLTENIQRFLPNPAGVQLEDPEFQASNIMHSINGYVFDSLQLSVCLHEVAYWYILSIGAQTDFLSVFFSGYTFKHKMVYEDTLTLFPFSGETVFMSMENPGLWILGCHNSDFRNRGMTALLKVSSCDWNTGDYYEDSYEDISAYLDSKNNAIEPRSFSQNPPVLKRHQREITRTTLQSDQEEIDYDDTISVEMKKEDFDIYDEDENQSPRSFQKKTRHYFIAAVERLWDYGMSSSPHVLRNRAQSGSVPQFKKVVFQEFTDGSFTQPLYRGELNEHLGLLGPYIRAEVEDNIMVTFRNQASRPYSFYSSLISYEEDQRQGAEPRKNFVKPNETKTYFWKVQHHMAPTKDEFDCKAWAYFSDVDLEKDVHSGLIGPLLVCHTNTLNPAHGRQVTVQEFALFFTIFDETKSWYFTENMERNCRAPCNIQMEDPTFKENYRFHAINGYIMDTLPGLVMAQDQRIRWYLLSMGSNENIHSIHFSGHVFTVRKKEEYKMALYNLYPGVFETVEMLPSKAGIWRVECLIGEHLHAGMSTLFLVYSNKCQTPLGMASGHIRDFQITASGQYGQWAPKLARLHYSGSINAWSTKEPFSWIKVDLLAPMIIHGIKTQGARQKFSSLYISQFIIMYSLDGKKWQTYRGNSTGTDMVFFGNVDSSGIKHNIFNPPIIARYIRLHPTHYSIRSTLRMELMGCDLNSCSMPLGMESKAISDAQITASSYFTNMFATWSPSKARLHLQGRSNAWRPQVNNPKEWLQVDFQKTMKVTGVTTQGVKSLDTSMYVKEFLISSSQDGHQWTLFFQNGKVKVFQGNQDSFTPVVNSLDPPLLTRYLRIHPQSWEHQIALRMEVLGCEAQDLY

SEQ ID NO: 895 - DNA, 4371 bp, synthetic construct
  misc_feature 1..4371: note = Variant of human B-domain deleted Factor VIII
  source 1..4371: mol_type = other DNA
atgcagattgaactgtctacctgcttcttcctctgtttgctgaggttctgctttagcgccactagacggtactaccttggcgctgtggagctgtcctgggactatatgcagagtgatttgggagagcttcccgtcgacgcacgatttcctcctcgcgttccaaagtcatttccctttaacacaagcgtggtgtacaagaagacgctcttcgtcgaattcaccgatcacctgttcaatatcgccaaacccagaccaccatggatgggtcttttggggcctaccatacaagcggaggtgtatgacacagttgttatcactctcaagaacatggcttctcatccggtaagtcttcacgcagtgggcgtgtcctactggaaagcttcagaaggagccgagtatgatgatcagacatcccagagggagaaagaagacgacaaggtatttccaggtgggtctcatacctatgtgtggcaagtgctcaaagagaatggccctatggcaagcgatccgccgtgtttgacttacagctacctttcacacgttgacctcgtcaaggacctcaactccgggttgattggagccttgttggtatgcagggaaggatctcttgccaaagagaagacacagaccctccacaagtttatccttctctttgctgtgttcgatgagggcaaaagttggcatagcgaaacgaagaattccctcatgcaggatcgcgacgcagccagcgccagagcttggcccaagatgcacactgtgaacggatatgtcaataggacgcttcctggcttgattgggtgtcatcggaaaagtgtctactggcacgtgatcggaatggggacaacaccagaggtccactccatatttctcgaaggccataccttccttgttcgaaaccacagacaggcatccttggagatctctcccattacctttctcactgcccaaacgctccttatggacttgggtcagttccttctcttctgccatatcagctcacaccagcatgatggtatggaagcttatgtgaaagtcgacagttgtcctgaggagccacagttgcgcatgaagaataatgaagaagccgaggattacgacgacgatctcaccgattctgagatggacgtggtgaggtttgatgacgacaactctccctccatcattcaaatccggagcgtggcgaagaaacaccccaagacttgggtccactatatagcggcggaagaggaggattgggattacgctcctcttgtattggcaccagatgaccgctcatacaaaagccagtacctcaacaacggaccgcagagaattggccggaagtataagaaagtgcgatttatggcctatacagacgaaacctttaagacaagggaggccatccagcatgagagtgggattttgggacctcttctttacggcgaagttggtgataccctcctcatcatcttcaagaatcaagcttctcgcccctataacatttacccacacgggatcactgacgttaggcctttgtatagcagaagacttcccaaaggcgtgaagcatctcaaagacttccccattttgccaggcgagatctttaagtacaaatggaccgtcacagtggaagatggaccgactaaatcagaccctcgatgccttacgcggtactattcctccttcgtgaatatggagagagatttggcaagcggactcataggaccactcctcatctgttacaaggaatctgtagaccagaggggtaaccagattatgagtgataaacgcaatgtgatcctttttagcgtcttcgacgagaaccggtcctggtacttgaccgagaatatacaaaggttccttcccaaccccgcaggcgttcagttggaagaccctgagtttcaggccagcaatattatgcactcaatcaacggctatgtgtttgatagtctccagctttctgtttgcctccatgaagtagcctattggtacatcttgtcaattggtgctcaaacagacttcctctccgtcttcttctccggctacacctttaagcacaagatggtgtatgaggacactctcacactctttccattttctggagaaaccgtgttcatgagcatggagaatccaggcctttggatcttgggttgccacaacagtgattttcgcaatcggggaatgactgctctcctcaaagtcagcagctgtgataagaacacaggcgactattacgaagattcttacgaggacataagtgcctacttggactccgggaataacgccattgagcccagatcattctcccagaatcctcccgtgcttaaaaggcatcagcgcgaaatcaccagaactactcttcagtctgatcaagaggagattgactatgacgacaccataagcgtggaaatgaagaaggaggatttcgatatctatgacgaagatgagaaccagtctccgcggagctttcagaagaagacgcgacactacttcattgcagcagtcgaaaggctttgggactacggtatgtcatcatcccctcatgtgttgcgcaatagagctcagagtggaagtgttccacagttcaagaaagtcgtctttcaagagtttacagatggcagcttcacacagcctctctatcggggcgagcttaacgaacatttgggactccttggtccctatatccgagccgaagtggaggacaacattatggttacctttaggaatcaagcctctcgcccctacagcttctactcctccctcatcagttatgaggaggatcagagacaaggcgctgaaccacggaagaactttgtgaaaccgaatgagacgaagacctacttctggaaagtacagcaccacatggcccccacaaaagacgaattcgattgcaaagcatgggcgtatttttcagacgttgacttggagaaagatgtacattcaggacttattggtcctttgttggtgtgtcacactaacactctcaatccagcccatggcaggcaggtgacagtccaggaattcgctcttttctttaccatctttgatgagaccaagtcctggtacttcacggaaaacatggagcgcaattgcagagccccctgtaacatacagatggaggaccctacctttaaggaaaattatcggttccacgcaatcaacggatacattatggatacactccctggccttgtgatggctcaggaccaacgaatcaggtggtacctcctcagcatgggttctaatgagaacatacactccattcacttttcaggacatgtgttcactgtccggaagaaagaagagtataagatggccctctacaatttgtatccaggcgtgtttgagaccgttgaaatgcttccctctaaagctggcatctggagagtagagtgcttgatcggagaacatcttcacgcaggtatgagcaccttgttcctcgtgtacagcaacaaatgtcagaccccacttggcatggccagtggacacattcgcgactttcagatcacagcatctggccagtatggacaatgggccccaaagttggctcgcctccattactccggtagcataaatgcgtggtccactaaagaacctttcagctggattaaggtcgatcttcttgcccccatgatcatccacggcattaagacacagggagcgaggcagaaattctcctccctctacatctcacagttcattattatgtatagtttggacggcaagaagtggcaaacttatagaggtaacagtactggaacagacatggtgttcttcggcaacgttgatagctctggcatcaaacacaacatctttaatcctcccataatagctcggtacatcagattgcatccgacccactacagcattaggagtacactccgaatggagcttatgggttgcgacttgaattcctgttcaatgccactcggaatggagtctaaagccatctctgatgcacagataaccgccagtagctactttacgaacatgtttgctacgtggtcaccctctaaggcaaggcttcatttgcaaggccggtctaatgcctggagacctcaggtgaacaacccgaaagaatggctccaggtggactttcagaagaccatgaaagtaacaggtgtcactactcagggagttaagtccttggatactagcatgtatgtgaaggagttccttatttcctcatcacaagatggccaccagtggaccctcttctttcagaatggtaaggtcaaagtgtttcagggcaatcaagacagcttcacacccgtggtgaacagtcttgatcctccactcttgacacgataccttcgaatccatccacagtcttgggagcaccagattgcattgcgcatggaagtacttggatgcgaggctcaggacctctac

SEQ ID NO: 896 - protein, 1457 aa, synthetic construct
  REGION 1..1457: note = Variant of human B-domain deleted Factor VIII
MQIELSTCFFLCLLRFCFSATRRYYLGAVELSWDYMQSDLGELPVDARFPPRVPKSFPFNTSVVYKKTLFVEFTDHLFNIAKPRPPWMGLLGPTIQAEVYDTVVITLKNMASHPVSLHAVGVSYWKASEGAEYDDQTSQREKEDDKVFPGGSHTYVWQVLKENGPMASDPPCLTYSYLSHVDLVKDLNSGLIGALLVCREGSLAKEKTQTLHKFILLFAVFDEGKSWHSETKNSLMQDRDAASARAWPKMHTVNGYVNRTLPGLIGCHRKSVYWHVIGMGTTPEVHSIFLEGHTFLVRNHRQASLEISPITFLTAQTLLMDLGQFLLFCHISSHQHDGMEAYVKVDSCPEEPQLRMKNNEEAEDYDDDLTDSEMDVVRFDDDNSPSIIQIRSVAKKHPKTWVHYIAAEEEDWDYAPLVLAPDDRSYKSQYLNNGPQRIGRKYKKVRFMAYTDETFKTREAIQHESGILGPLLYGEVGDTLLIIFKNQASRPYNIYPHGITDVRPLYSRRLPKGVKHLKDFPILPGEIFKYKWTVTVEDGPTKSDPRCLTRYYSSFVNMERDLASGLIGPLLICYKESVDQRGNQIMSDKRNVILFSVFDENRSWYLTENIQRFLPNPAGVQLEDPEFQASNIMHSINGYVFDSLQLSVCLHEVAYWYILSIGAQTDFLSVFFSGYTFKHKMVYEDTLTLFPFSGETVFMSMENPGLWILGCHNSDFRNRGMTALLKVSSCDKNTGDYYEDSYEDISAYLDSGNNAIEPRSFSQNPPVLKRHQREITRTTLQSDQEEIDYDDTISVEMKKEDFDIYDEDENQSPRSFQKKTRHYFIAAVERLWDYGMSSSPHVLRNRAQSGSVPQFKKVVFQEFTDGSFTQPLYRGELNEHLGLLGPYIRAEVEDNIMVTFRNQASRPYSFYSSLISYEEDQRQGAEPRKNFVKPNETKTYFWKVQHHMAPTKDEFDCKAWAYFSDVDLEKDVHSGLIGPLLVCHTNTLNPAHGRQVTVQEFALFFTIFDETKSWYFTENMERNCRAPCNIQMEDPTFKENYRFHAINGYIMDTLPGLVMAQDQRIRWYLLSMGSNENIHSIHFSGHVFTVRKKEEYKMALYNLYPGVFETVEMLPSKAGIWRVECLIGEHLHAGMSTLFLVYSNKCQTPLGMASGHIRDFQITASGQYGQWAPKLARLHYSGSINAWSTKEPFSWIKVDLLAPMIIHGIKTQGARQKFSSLYISQFIIMYSLDGKKWQTYRGNSTGTDMVFFGNVDSSGIKHNIFNPPIIARYIRLHPTHYSIRSTLRMELMGCDLNSCSMPLGMESKAISDAQITASSYFTNMFATWSPSKARLHLQGRSNAWRPQVNNPKEWLQVDFQKTMKVTGVTTQGVKSLDTSMYVKEFLISSSQDGHQWTLFFQNGKVKVFQGNQDSFTPVVNSLDPPLLTRYLRIHPQSWEHQIALRMEVLGCEAQDLY

SEQ ID NO: 897 - DNA, 4371 bp, synthetic construct
  misc_feature 1..4371: note = Variant of human B-domain deleted Factor VIII
  source 1..4371: mol_type = other DNA
atgcagattgaactgtctacctgcttcttcctctgtttgctgaggttctgctttagcgccactagacggtactaccttggcgctgtggagctgtcctgggactatatgcagagtgatttgggagagcttcccgtcgacgcacgatttcctcctcgcgttccaaagtcatttccctttaacacaagcgtggtgtacaagaagacgctcttcgtcgaattcaccgatcacctgttcaatatcgccaaacccagaccaccatggatgggtcttttggggcctaccatacaagcggaggtgtatgacacagttgttatcactctcaagaacatggcttctcatccggtaagtcttcacgcagtgggcgtgtcctactggaaagcttcagaaggagccgagtatgatgatcagacatcccagagggagaaagaagacgacaaggtatttccaggtgggtctcatacctatgtgtggcaagtgctcaaagagaatggccctatggcaagcgatccgccgtgtttgacttacagctacctttcacacgttgacctcgtcaaggacctcaactccgggttgattggagccttgttggtatgcagggaaggatctcttgccaaagagaagacacagaccctccacaagtttatccttctctttgctgtgttcgatgagggcaaaagttggcatagcgaaacgaagaattccctcatgcaggatcgcgacgcagccagcgccagagcttggcccaagatgcacactgtgaacggatatgtcaataggacgcttcctggcttgattgggtgtcatcggaaaagtgtctactggcacgtgatcggaatggggacaacaccagaggtccactccatatttctcgaaggccataccttccttgttcgaaaccacagacaggcatccttggagatctctcccattacctttctcactgcccaaacgctccttatggacttgggtcagttccttctcttctgccatatcagctcacaccagcatgatggtatggaagcttatgtgaaagtcgacagttgtcctgaggagccacagttgcgcatgaagaataatgaagaagccgaggattacgacgacgatctcaccgattctgagatggacgtggtgaggtttgatgacgacaactctccctccatcattcaaatccggagcgtggcgaagaaacaccccaagacttgggtccactatatagcggcggaagaggaggattgggattacgctcctcttgtattggcaccagatgaccgctcatacaaaagccagtacctcaacaacggaccgcagagaattggccggaagtataagaaagtgcgatttatggcctatacagacgaaacctttaagacaagggaggccatccagcatgagagtgggattttgggacctcttctttacggcgaagttggtgataccctcctcatcatcttcaagaatcaagcttctcgcccctataacatttacccacacgggatcactgacgttaggcctttgtatagcagaagacttcccaaaggcgtgaagcatctcaaagacttccccattttgccaggcgagatctttaagtacaaatggaccgtcacagtggaagatggaccgactaaatcagaccctcgatgccttacgcggtactattcctccttcgtgaatatggagagagatttggcaagcggactcataggaccactcctcatctgttacaaggaatctgtagaccagaggggtaaccagattatgagtgataaacgcaatgtgatcctttttagcgtcttcgacgagaaccggtcctggtacttgaccgagaatatacaaaggttccttcccaaccccgcaggcgttcagttggaagaccctgagtttcaggccagcaatattatgcactcaatcaacggctatgtgtttgatagtctccagctttctgtttgcctccatgaagtagcctattggtacatcttgtcaattggtgctcaaacagacttcctctccgtcttcttctccggctacacctttaagcacaagatggtgtatgaggacactctcacactctttccattttctggagaaaccgtgttcatgagcatggagaatccaggcctttggatcttgggttgccacaacagtgattttcgcaatcggggaatgactgctctcctcaaagtcagcagctgtgataagaacacaggcgactattacgaagattcttacgaggacataagtgcctacttggactccaagaataacgccattgagcccagatcattctcccagaatcctcccgtgcttaaaaggcatcagcgcgaaatcaccagaactactcttcagtctgatcaagaggagattgactatgacgacaccataagcgtggaaatgaagaaggaggatttcgatatctatgacgaagatgaggtgcagtctccgcggagctttcagaagaagacgcgacactacttcattgcagcagtcgaaaggctttgggactacggtatgtcatcatcccctcatgtgttgcgcaatagagctcagagtggaagtgttccacagttcaagaaagtcgtctttcaagagtttacagatggcagcttcacacagcctctctatcggggcgagcttaacgaacatttgggactccttggtccctatatccgagccgaagtggaggacaacattatggttacctttaggaatcaagcctctcgcccctacagcttctactcctccctcatcagttatgaggaggatcagagacaaggcgctgaaccacggaagaactttgtgaaaccgaatgagacgaagacctacttctggaaagtacagcaccacatggcccccacaaaagacgaattcgattgcaaagcatgggcgtatttttcagacgttgacttggagaaagatgtacattcaggacttattggtcctttgttggtgtgtcacactaacactctcaatccagcccatggcaggcaggtgacagtccaggaattcgctcttttctttaccatctttgatgagaccaagtcctggtacttcacggaaaacatggagcgcaattgcagagccccctgtaacatacagatggaggaccctacctttaaggaaaattatcggttccacgcaatcaacggatacattatggatacactccctggccttgtgatggctcaggaccaacgaatcaggtggtacctcctcagcatgggttctaatgagaacatacactccattcacttttcaggacatgtgttcactgtccggaagaaagaagagtataagatggccctctacaatttgtatccaggcgtgtttgagaccgttgaaatgcttccctctaaagctggcatctggagagtagagtgcttgatcggagaacatcttcacgcaggtatgagcaccttgttcctcgtgtacagcaacaaatgtcagaccccacttggcatggccagtggacacattcgcgactttcagatcacagcatctggccagtatggacaatgggccccaaagttggctcgcctccattactccggtagcataaatgcgtggtccactaaagaacctttcagctggattaaggtcgatcttcttgcccccatgatcatccacggcattaagacacagggagcgaggcagaaattctcctccctctacatctcacagttcattattatgtatagtttggacggcaagaagtggcaaacttatagaggtaacagtactggaacagacatggtgttcttcggcaacgttgatagctctggcatcaaacacaacatctttaatcctcccataatagctcggtacatcagattgcatccgacccactacagcattaggagtacactccgaatggagcttatgggttgcgacttgaattcctgttcaatgccactcggaatggagtctaaagccatctctgatgcacagataaccgccagtagctactttacgaacatgtttgctacgtggtcaccctctaaggcaaggcttcatttgcaaggccggtctaatgcctggagacctcaggtgaacaacccgaaagaatggctccaggtggactttcagaagaccatgaaagtaacaggtgtcactactcagggagttaagtccttggatactagcatgtatgtgaaggagttccttatttcctcatcacaagatggccaccagtggaccctcttctttcagaatggtaaggtcaaagtgtttcagggcaatcaagacagcttcacacccgtggtgaacagtcttgatcctccactcttgacacgataccttcgaatccatccacagtcttgggagcaccagattgcattgcgcatggaagtacttggatgcgaggctcaggacctctac

SEQ ID NO: 898 - protein, 1457 aa, synthetic construct
  REGION 1..1457: note = Variant of human B-domain deleted Factor VIII
MQIELSTCFFLCLLRFCFSATRRYYLGAVELSWDYMQSDLGELPVDARFPPRVPKSFPFNTSVVYKKTLFVEFTDHLFNIAKPRPPWMGLLGPTIQAEVYDTVVITLKNMASHPVSLHAVGVSYWKASEGAEYDDQTSQREKEDDKVFPGGSHTYVWQVLKENGPMASDPPCLTYSYLSHVDLVKDLNSGLIGALLVCREGSLAKEKTQTLHKFILLFAVFDEGKSWHSETKNSLMQDRDAASARAWPKMHTVNGYVNRTLPGLIGCHRKSVYWHVIGMGTTPEVHSIFLEGHTFLVRNHRQASLEISPITFLTAQTLLMDLGQFLLFCHISSHQHDGMEAYVKVDSCPEEPQLRMKNNEEAEDYDDDLTDSEMDVVRFDDDNSPSIIQIRSVAKKHPKTWVHYIAAEEEDWDYAPLVLAPDDRSYKSQYLNNGPQRIGRKYKKVRFMAYTDETFKTREAIQHESGILGPLLYGEVGDTLLIIFKNQASRPYNIYPHGITDVRPLYSRRLPKGVKHLKDFPILPGEIFKYKWTVTVEDGPTKSDPRCLTRYYSSFVNMERDLASGLIGPLLICYKESVDQRGNQIMSDKRNVILFSVFDENRSWYLTENIQRFLPNPAGVQLEDPEFQASNIMHSINGYVFDSLQLSVCLHEVAYWYILSIGAQTDFLSVFFSGYTFKHKMVYEDTLTLFPFSGETVFMSMENPGLWILGCHNSDFRNRGMTALLKVSSCDKNTGDYYEDSYEDISAYLDSKNNAIEPRSFSQNPPVLKRHQREITRTTLQSDQEEIDYDDTISVEMKKEDFDIYDEDEVQSPRSFQKKTRHYFIAAVERLWDYGMSSSPHVLRNRAQSGSVPQFKKVVFQEFTDGSFTQPLYRGELNEHLGLLGPYIRAEVEDNIMVTFRNQASRPYSFYSSLISYEEDQRQGAEPRKNFVKPNETKTYFWKVQHHMAPTKDEFDCKAWAYFSDVDLEKDVHSGLIGPLLVCHTNTLNPAHGRQVTVQEFALFFTIFDETKSWYFTENMERNCRAPCNIQMEDPTFKENYRFHAINGYIMDTLPGLVMAQDQRIRWYLLSMGSNENIHSIHFSGHVFTVRKKEEYKMALYNLYPGVFETVEMLPSKAGIWRVECLIGEHLHAGMSTLFLVYSNKCQTPLGMASGHIRDFQITASGQYGQWAPKLARLHYSGSINAWSTKEPFSWIKVDLLAPMIIHGIKTQGARQKFSSLYISQFIIMYSLDGKKWQTYRGNSTGTDMVFFGNVDSSGIKHNIFNPPIIARYIRLHPTHYSIRSTLRMELMGCDLNSCSMPLGMESKAISDAQITASSYFTNMFATWSPSKARLHLQGRSNAWRPQVNNPKEWLQVDFQKTMKVTGVTTQGVKSLDTSMYVKEFLISSSQDGHQWTLFFQNGKVKVFQGNQDSFTPVVNSLDPPLLTRYLRIHPQSWEHQIALRMEVLGCEAQDLY

SEQ ID NO: 899 - DNA, 4371 bp, synthetic construct
  misc_feature 1..4371: note = Variant of human B-domain deleted Factor VIII
  source 1..4371: mol_type = other DNA
atgcagattgaactgtctacctgcttcttcctctgtttgctgaggttctgctttagcgccactagacggtactaccttggcgctgtggagctgtcctgggactatatgcagagtgatttgggagagcttcccgtcgacgcacgatttcctcctcgcgttccaaagtcatttccctttaacacaagcgtggtgtacaagaagacgctcttcgtcgaattcaccgatcacctgttcaatatcgccaaacccagaccaccatggatgggtcttttggggcctaccatacaagcggaggtgtatgacacagttgttatcactctcaagaacatggcttctcatccggtaagtcttcacgcagtgggcgtgtcctactggaaagcttcagaaggagccgagtatgatgatcagacatcccagagggagaaagaagacgacaaggtatttccaggtgggtctcatacctatgtgtggcaagtgctcaaagagaatggccctatggcaagcgatccgccgtgtttgacttacagctacctttcacacgttgacctcgtcaaggacctcaactccgggttgattggagccttgttggtatgcagggaaggatctcttgccaaagagaagacacagaccctccacaagtttatccttctctttgctgtgttcgatgagggcaaaagttggcatagcgaaacgaagaattccctcatgcaggatcgcgacgcagccagcgccagagcttggcccaagatgcacactgtgaacggatatgtcaataggacgcttcctggcttgattgggtgtcatcggaaaagtgtctactggcacgtgatcggaatggggacaacaccagaggtccactccatatttctcgaaggccataccttccttgttcgaaaccacagacaggcatccttggagatctctcccattacctttctcactgcccaaacgctccttatggacttgggtcagttccttctcttctgccatatcagctcacaccagcatgatggtatggaagcttatgtgaaagtcgacagttgtcctgaggagccacagttgcgcatgaagaataatgaagaagccgaggattacgacgacgatctcaccgattctgagatggacgtggtgaggtttgatgacgacaactctccctccatcattcaaatccggagcgtggcgaagaaacaccccaagacttgggtccactatatagcggcggaagaggaggattgggattacgctcctcttgtattggcaccagatgaccgctcatacaaaagccagtacctcaacaacggaccgcagagaattggccggaagtataagaaagtgcgatttatggcctatacagacgaaacctttaagacaagggaggccatccagcatgagagtgggattttgggacctcttctttacggcgaagttggtgataccctcctcatcatcttcaagaatcaagcttctcgcccctataacatttacccacacgggatcactgacgttaggcctttgtatagcagaagacttcccaaaggcgtgaagcatctcaaagacttccccattttgccaggcgagatctttaagtacaaatggaccgtcacagtggaagatggaccgactaaatcagaccctcgatgccttacgcggtactattcctccttcgtgaatatggagagagatttggcaagcggactcataggaccactcctcatctgttacaaggaatctgtagaccagaggggtaaccagattatgagtgataaacgcaatgtgatcctttttagcgtcttcgacgagaaccggtcctggtacttgaccgagaatatacaaaggttccttcccaaccccgcaggcgttcagttggaagaccctgagtttcaggccagcaatattatgcactcaatcaacggctatgtgtttgatagtctccagctttctgtttgcctccatgaagtagcctattggtacatcttgtcaattggtgctcaaacagacttcctctccgtcttcttctccggctacacctttaagcacaagatggtgtatgaggacactctcacactctttccattttctggagaaaccgtgttcatgagcatggagaatccaggcctttggatcttgggttgccacaacagtgattttcgcaatcggggaatgactgctctcctcaaagtcagcagctgtgataagaacacaggcgactattacgaagattcttacgaggacataagtgcctacttggactccaagaataacgccattgagcccagatcattctcccagaatcctcccgtgcttaaaaggcatcagcgcgaaatcaccagaactactcttcagtctgatcaagaggagattgactatgacgacaccataagcgtggaaatgaagaaggaggatttcgatatctatgacgaagatgagaaccagtctccgcggagctttcagaagaagacgcgacactacttcattgcagcagtcgaaaggctttgggactacggtatgtcatcatcccctcatgtgttgcgcaatagagctcagagtggaagtgttccacagttcaagaaagtcgtctttcaagagtttacagatggcagcttcacacagcctctctatcggggcgagcttaacgaacatttgggactccttggtccctatatccgagccgaagtggaggacaacattatggttacctttaggaatcaagcctctcgcccctacagcttctactcctccctcatcagttatgaggaggatcagagacaaggcgctgaaccacggaagaactttgtgaaaccgaatgagacggttacctacttctggaaagtacagcaccacatggcccccacaaaagacgaattcgattgcaaagcatgggcgtatttttcagacgttgacttggagaaagatgtacattcaggacttattggtcctttgttggtgtgtcacactaacactctcaatccagcccatggcaggcaggtgacagtccaggaattcgctcttttctttaccatctttgatgagaccaagtcctggtacttcacggaaaacatggagcgcaattgcagagccccctgtaacatacagatggaggaccctacctttaaggaaaattatcggttccacgcaatcaacggatacattatggatacactccctggccttgtgatggctcaggaccaacgaatcaggtggtacctcctcagcatgggttctaatgagaacatacactccattcacttttcaggacatgtgttcactgtccggaagaaagaagagtataagatggccctctacaatttgtatccaggcgtgtttgagaccgttgaaatgcttccctctaaagctggcatctggagagtagagtgcttgatcggagaacatcttcacgcaggtatgagcaccttgttcctcgtgtacagcaacaaatgtcagaccccacttggcatggccagtggacacattcgcgactttcagatcacagcatctggccagtatggacaatgggccccaaagttggctcgcctccattactccggtagcataaatgcgtggtccactaaagaacctttcagctggattaaggtcgatcttcttgcccccatgatcatccacggcattaagacacagggagcgaggcagaaattctcctccctctacatctcacagttcattattatgtatagtttggacggcaagaagtggcaaacttatagaggtaacagtactggaacagacatggtgttcttcggcaacgttgatagctctggcatcaaacacaacatctttaatcctcccataatagctcggtacatcagattgcatccgacccactacagcattaggagtacactccgaatggagcttatgggttgcgacttgaattcctgttcaatgccactcggaatggagtctaaagccatctctgatgcacagataaccgccagtagctactttacgaacatgtttgctacgtggtcaccctctaaggcaaggcttcatttgcaaggccggtctaatgcctggagacctcaggtgaacaacccgaaagaatggctccaggtggactttcagaagaccatgaaagtaacaggtgtcactactcagggagttaagtccttggatactagcatgtatgtgaaggagttccttatttcctcatcacaagatggccaccagtggaccctcttctttcagaatggtaaggtcaaagtgtttcagggcaatcaagacagcttcacacccgtggtgaacagtcttgatcctccactcttgacacgataccttcgaatccatccacagtcttgggagcaccagattgcattgcgcatggaagtacttggatgcgaggctcaggacctctac

SEQ ID NO: 900 - protein, 1457 aa, synthetic construct
  REGION 1..1457: note = Variant of human B-domain deleted Factor VIII
MQIELSTCFFLCLLRFCFSATRRYYLGAVELSWDYMQSDLGELPVDARFPPRVPKSFPFNTSVVYKKTLFVEFTDHLFNIAKPRPPWMGLLGPTIQAEVYDTVVITLKNMASHPVSLHAVGVSYWKASEGAEYDDQTSQREKEDDKVFPGGSHTYVWQVLKENGPMASDPPCLTYSYLSHVDLVKDLNSGLIGALLVCREGSLAKEKTQTLHKFILLFAVFDEGKSWHSETKNSLMQDRDAASARAWPKMHTVNGYVNRTLPGLIGCHRKSVYWHVIGMGTTPEVHSIFLEGHTFLVRNHRQASLEISPITFLTAQTLLMDLGQFLLFCHISSHQHDGMEAYVKVDSCPEEPQLRMKNNEEAEDYDDDLTDSEMDVVRFDDDNSPSIIQIRSVAKKHPKTWVHYIAAEEEDWDYAPLVLAPDDRSYKSQYLNNGPQRIGRKYKKVRFMAYTDETFKTREAIQHESGILGPLLYGEVGDTLLIIFKNQASRPYNIYPHGITDVRPLYSRRLPKGVKHLKDFPILPGEIFKYKWTVTVEDGPTKSDPRCLTRYYSSFVNMERDLASGLIGPLLICYKESVDQRGNQIMSDKRNVILFSVFDENRSWYLTENIQRFLPNPAGVQLEDPEFQASNIMHSINGYVFDSLQLSVCLHEVAYWYILSIGAQTDFLSVFFSGYTFKHKMVYEDTLTLFPFSGETVFMSMENPGLWILGCHNSDFRNRGMTALLKVSSCDKNTGDYYEDSYEDISAYLDSKNNAIEPRSFSQNPPVLKRHQREITRTTLQSDQEEIDYDDTISVEMKKEDFDIYDEDENQSPRSFQKKTRHYFIAAVERLWDYGMSSSPHVLRNRAQSGSVPQFKKVVFQEFTDGSFTQPLYRGELNEHLGLLGPYIRAEVEDNIMVTFRNQASRPYSFYSSLISYEEDQRQGAEPRKNFVKPNETVTYFWKVQHHMAPTKDEFDCKAWAYFSDVDLEKDVHSGLIGPLLVCHTNTLNPAHGRQVTVQEFALFFTIFDETKSWYFTENMERNCRAPCNIQMEDPTFKENYRFHAINGYIMDTLPGLVMAQDQRIRWYLLSMGSNENIHSIHFSGHVFTVRKKEEYKMALYNLYPGVFETVEMLPSKAGIWRVECLIGEHLHAGMSTLFLVYSNKCQTPLGMASGHIRDFQITASGQYGQWAPKLARLHYSGSINAWSTKEPFSWIKVDLLAPMIIHGIKTQGARQKFSSLYISQFIIMYSLDGKKWQTYRGNSTGTDMVFFGNVDSSGIKHNIFNPPIIARYIRLHPTHYSIRSTLRMELMGCDLNSCSMPLGMESKAISDAQITASSYFTNMFATWSPSKARLHLQGRSNAWRPQVNNPKEWLQVDFQKTMKVTGVTTQGVKSLDTSMYVKEFLISSSQDGHQWTLFFQNGKVKVFQGNQDSFTPVVNSLDPPLLTRYLRIHPQSWEHQIALRMEVLGCEAQDLY

SEQ ID NO: 901 - DNA, 4371 bp, synthetic construct
  misc_feature 1..4371: note = Variant of human B-domain deleted Factor VIII
  source 1..4371: mol_type = other DNA
atgcagattgaactgtctacctgcttcttcctctgtttgctgaggttctgctttagcgccactagacggtactaccttggcgctgtggagctgtcctgggactatatgcagagtgatttgggagagcttcccgtcgacgcacgatttcctcctcgcgttccaaagtcatttccctttaacacaagcgtggtgtacaagaagacgctcttcgtcgaattcaccgatcacctgttcaatatcgccaaacccagaccaccatggatgggtcttttggggcctaccatacaagcggaggtgtatgacacagttgttatcactctcaagaacatggcttctcatccggtaagtcttcacgcagtgggcgtgtcctactggaaagcttcagaaggagccgagtatgatgatcagacatcccagagggagaaagaagacgacaaggtatttccaggtgggtctcatacctatgtgtggcaagtgctcaaagagaatggccctatggcaagcgatccgccgtgtttgacttacagctacctttcacacgttgacctcgtcaaggacctcaactccgggttgattggagccttgttggtatgcagggaaggatctcttgccaaagagaagacacagaccctccacaagtttatccttctctttgctgtgttcgatgagggcaaaagttggcatagcgaaacgaagaattccctcatgcaggatcgcgacgcagccagcgccagagcttggcccaagatgcacactgtgaacggatatgtcaataggacgcttcctggcttgattgggtgtcatcggaaaagtgtctactggcacgtgatcggaatggggacaacaccagaggtccactccatatttctcgaaggccataccttccttgttcgaaaccacagacaggcatccttggagatctctcccattacctttctcactgcccaaacgctccttatggacttgggtcagttccttctcttctgccatatcagctcacaccagcatgatggtatggaagcttatgtgaaagtcgacagttgtcctgaggagccacagttgcgcatgaagaataatgaagaagccgaggattacgacgacgatctcaccgattctgagatggacgtggtgaggtttgatgacgacaactctccctccatcattcaaatccggagcgtggcgaagaaacaccccaagacttgggtccactatatagcggcggaagaggaggattgggattacgctcctcttgtattggcaccagatgaccgctcatacaaaagccagtacctcaacaacggaccgcagagaattggccggaagtataagaaagtgcgatttatggcctatacagacgaaacctttaagacaagggaggccatccagcatgagagtgggattttgggacctcttctttacggcgaagttggtgataccctcctcatcatcttcaagaatcaagcttctcgcccctataacatttacccacacgggatcactgacgttaggcctttgtatagcagaagacttcccaaaggcgtgaagcatctcaaagacttccccattttgccaggcgagatctttaagtacaaatggaccgtcacagtggaagatggaccgactaaatcagaccctcgatgccttacgcggtactattcctccttcgtgaatatggagagagatttggcaagcggactcataggaccactcctcatctgttacaaggaatctgtagaccagaggggtaaccagattatgagtgataaacgcaatgtgatcctttttagcgtcttcgacgagaaccggtcctggtacttgaccgagaatatacaaaggttccttcccaaccccgcaggcgttcagttggaagaccctgagtttcaggccagcaatattatgcactcaatcaacggctatgtgtttgatagtctccagctttctgtttgcctccatgaagtagcctattggtacatcttgtcaattggtgctcaaacagacttcctctccgtcttcttctccggctacacctttaagcacaagatggtgtatgaggacactctcacactctttccattttctggagaaaccgtgttcatgagcatggagaatccaggcctttggatcttgggttgccacaacagtgattttcgcaatcggggaatgactgctctcctcaaagtcagcagctgtgataagaacacaggcgactattacgaagattcttacgaggacataagtgattacttggactccaagaataacgccattgagcccagatcattctcccagaatcctcccgtgcttaaaaggcatcagcgcgaaatcaccagaactactcttcagtctgatcaagaggagattgactatgacgacaccataagcgtggaaatgaagaaggaggatttcgatatctatgacgaagatgagaaccagtctccgcggagctttcagaagaagacgcgacactacttcattgcagcagtcgaaaggctttgggactacggtatgtcatcatcccctcatgtgttgcgcaatagagctcagagtggaagtgttccacagttcaagaaagtcgtctttcaagagtttacagatggcagcttcacacagcctctctatcggggcgagcttaacgaacatttgggactccttggtccctatatccgagccgaagtggaggacaacattatggttacctttaggaatcaagcctctcgcccctacagcttctactcctccctcatcagttatgaggaggatcagagacaaggcgctgaaccacggaagaactttgtgaaaccgaatgagacgaagacctacttctggaaagtacagcaccacatggcccccacaaaagacgaattcgattgcaaagcatgggcgtatttttcagacgttgacttggagaaagatgtacattcaggacttattggtcctttgttggtgtgtcacactaacactctcaatccagcccatggcaggcaggtgacagtccaggaattcgctcttttctttaccatctttgatgagaccaagtcctggtacttcacggaaaacatggagcgcaattgcagagccccctgtaacatacagatggaggaccctacctttaaggaaaattatcggttccacgcaatcaacggatacattatggatacactccctggccttgtgatggctcaggaccaacgaatcaggtggtacctcctcagcatgggttctaatgagaacatacactccattcacttttcaggacatgtgttcactgtccggaagaaagaagagtataagatggccctctacaatttgtatccaggcgtgtttgagaccgttgaaatgcttccctctaaagctggcatctggagagtagagtgcttgatcggagaacatcttcacgcaggtatgagcaccttgttcctcgtgtacagcaacaaatgtcagaccccacttggcatggccagtggacacattcgcgactttcagatcacagcatctggccagtatggacaatgggccccaaagttggctcgcctccattactccggtagcataaatgcgtggtccactaaagaacctttcagctggattaaggtcgatcttcttgcccccatgatcatccacggcattaagacacagggagcgaggcagaaattctcctccctctacatctcacagttcattattatgtatagtttggacggcaagaagtggcaaacttatagaggtaacagtactggaacagacatggtgttcttcggcaacgttgatagctctggcatcaaacacaacatctttaatcctcccataatagctcggtacatcagattgcatccgacccactacagcattaggagtacactccgaatggagcttatgggttgcgacttgaattcctgttcaatgccactcggaatggagtctaaagccatctctgatgcacagataaccgccagtagctactttacgaacatgtttgctacgtggtcaccctctaaggcaaggcttcatttgcaaggccggtctaatgcctggagacctcaggtgaacaacccgaaagaatggctccaggtggactttcagaagaccatgaaagtaacaggtgtcactactcagggagttaagtccttggatactagcatgtatgtgaaggagttccttatttcctcatcacaagatggccaccagtggaccctcttctttcagaatggtaaggtcaaagtgtttcagggcaatcaagacagcttcacacccgtggtgaacagtcttgatcctccactcttgacacgataccttcgaatccatccacagtcttgggagcaccagattgcattgcgcatggaagtacttggatgcgaggctcaggacctctac

SEQ ID NO: 902 - protein, 1457 aa, synthetic construct
  REGION 1..1457: note = Variant of human B-domain deleted Factor VIII
MQIELSTCFFLCLLRFCFSATRRYYLGAVELSWDYMQSDLGELPVDARFPPRVPKSFPFNTSVVYKKTLFVEFTDHLFNIAKPRPPWMGLLGPTIQAEVYDTVVITLKNMASHPVSLHAVGVSYWKASEGAEYDDQTSQREKEDDKVFPGGSHTYVWQVLKENGPMASDPPCLTYSYLSHVDLVKDLNSGLIGALLVCREGSLAKEKTQTLHKFILLFAVFDEGKSWHSETKNSLMQDRDAASARAWPKMHTVNGYVNRTLPGLIGCHRKSVYWHVIGMGTTPEVHSIFLEGHTFLVRNHRQASLEISPITFLTAQTLLMDLGQFLLFCHISSHQHDGMEAYVKVDSCPEEPQLRMKNNEEAEDYDDDLTDSEMDVVRFDDDNSPSIIQIRSVAKKHPKTWVHYIAAEEEDWDYAPLVLAPDDRSYKSQYLNNGPQRIGRKYKKVRFMAYTDETFKTREAIQHESGILGPLLYGEVGDTLLIIFKNQASRPYNIYPHGITDVRPLYSRRLPKGVKHLKDFPILPGEIFKYKWTVTVEDGPTKSDPRCLTRYYSSFVNMERDLASGLIGPLLICYKESVDQRGNQIMSDKRNVILFSVFDENRSWYLTENIQRFLPNPAGVQLEDPEFQASNIMHSINGYVFDSLQLSVCLHEVAYWYILSIGAQTDFLSVFFSGYTFKHKMVYEDTLTLFPFSGETVFMSMENPGLWILGCHNSDFRNRGMTALLKVSSCDKNTGDYYEDSYEDISDYLDSKNNAIEPRSFSQNPPVLKRHQREITRTTLQSDQEEIDYDDTISVEMKKEDFDIYDEDENQSPRSFQKKTRHYFIAAVERLWDYGMSSSPHVLRNRAQSGSVPQFKKVVFQEFTDGSFTQPLYRGELNEHLGLLGPYIRAEVEDNIMVTFRNQASRPYSFYSSLISYEEDQRQGAEPRKNFVKPNETKTYFWKVQHHMAPTKDEFDCKAWAYFSDVDLEKDVHSGLIGPLLVCHTNTLNPAHGRQVTVQEFALFFTIFDETKSWYFTENMERNCRAPCNIQMEDPTFKENYRFHAINGYIMDTLPGLVMAQDQRIRWYLLSMGSNENIHSIHFSGHVFTVRKKEEYKMALYNLYPGVFETVEMLPSKAGIWRVECLIGEHLHAGMSTLFLVYSNKCQTPLGMASGHIRDFQITASGQYGQWAPKLARLHYSGSINAWSTKEPFSWIKVDLLAPMIIHGIKTQGARQKFSSLYISQFIIMYSLDGKKWQTYRGNSTGTDMVFFGNVDSSGIKHNIFNPPIIARYIRLHPTHYSIRSTLRMELMGCDLNSCSMPLGMESKAISDAQITASSYFTNMFATWSPSKARLHLQGRSNAWRPQVNNPKEWLQVDFQKTMKVTGVTTQGVKSLDTSMYVKEFLISSSQDGHQWTLFFQNGKVKVFQGNQDSFTPVVNSLDPPLLTRYLRIHPQSWEHQIALRMEVLGCEAQDLY

SEQ ID NO: 903 - DNA, 4371 bp, synthetic construct
  misc_feature 1..4371: note = Variant of human B-domain deleted Factor VIII
  source 1..4371: mol_type = other DNA
atgcagattgaactgtctacctgcttcttcctctgtttgctgaggttctgctttagcgccactagacggtactaccttggcgctgtggagctgtcctgggactatatgcagagtgatttgggagagcttcccgtcgacgcacgatttcctcctcgcgttccaaagtcatttccctttaacacaagcgtggtgtacaagaagacgctcttcgtcgaattcaccgatcacctgttcaatatcgccaaacccagaccaccatggatgggtcttttggggcctaccatacaagcggaggtgtatgacacagttgttatcactctcaagaacatggcttctcatccggtaagtcttcacgcagtgggcgtgtcctactggaaagcttcagaaggagccgagtatgatgatcagacatcccagagggagaaagaagacgacaaggtatttccaggtgggtctcatacctatgtgtggcaagtgctcaaagagaatggccctatggcaagcgatccgccgtgtttgacttacagctacctttcacacgttgacctcgtcaaggacctcaactccgggttgattggagccttgttggtatgcagggaaggatctcttgccaaagagaagacacagaccctccacaagtttatccttctctttgctgtgttcgatgagggcaaaagttggcatagcgaaacgaagaattccctcatgcaggatcgcgacgcagccagcgccagagcttggcccaagatgcacactgtgaacggatatgtcaataggacgcttcctggcttgattgggtgtcatcggaaaagtgtctactggcacgtgatcggaatggggacaacaccagaggtccactccatatttctcgaaggccataccttccttgttcgaaaccacagacaggcatccttggagatctctcccattacctttctcactgcccaaacgctccttatggacttgggtcagttccttctcttctgccatatcagctcacaccagcatgatggtatggaagcttatgtgaaagtcgacagttgtcctgaggagccacagttgcgcatgaagaataatgaagaagccgaggattacgacgacgatctcaccgattctgagatggacgtggtgaggtttgatgacgacaactctccctccatcattcaaatccggagcgtggcgaagaaacaccccaagacttgggtccactatatagcggcggaagaggaggattgggattacgctcctcttgtattggcaccagatgaccgctcatacaaaagccagtacctcaacaacggaccgcagagaattggccggaagtataagaaagtgcgatttatggcctatacagacgaaacctttaagacaagggaggccatccagcatgagagtgggattttgggacctcttctttacggcgaagttggtgataccctcctcatcatcttcaagaatcaagcttctcgcccctataacatttacccacacgggatcactgacgttaggcctttgtatagcagaagacttcccaaaggcgtgaagcatctcaaagacttccccattttgccaggcgagatctttaagtacaaatggaccgtcacagtggaagatggaccgactaaatcagaccctcgatgccttacgcggtactattcctccttcgtgaatatggagagagatttggcaagcggactcataggaccactcctcatctgttacaaggaatctgtagaccagaggggtaaccagattatgagtgataaacgcaatgtgatcctttttagcgtcttcgacgagaaccggtcctggtacttgaccgagaatatacaaaggttccttcccaaccccgcaggcgttcagttggaagaccctgagtttcaggccagcaatattatgcactcaatcaacggctatgtgtttgatagtctccagctttctgtttgcctccatgaagtagcctattggtacatcttgtcaattggtgctcaaacagacttcctctccgtcttcttctccggctacacctttaagcacaagatggtgtatgaggacactctcacactctttccattttctggagaaaccgtgttcatgagcatggagaatccaggcctttggatcttgggttgccacaacagtgattttcgcaatcggggaatgactgctctcctcaaagtcagcagctgtgataagaacacaggcgactattacgaagattcttacgaggacataagtgcctacttggactccaagaataacgggattgagcccagatcattctcccagaatcctcccgtgcttaaaaggcatcagcgcgaaatcaccagaactactcttcagtctgatcaagaggagattgactatgacgacaccataagcgtggaaatgaagaaggaggatttcgatatctatgacgaagatgagaaccagtctccgcggagctttcagaagaagacgcgacactacttcattgcagcagtcgaaaggctttgggactacggtatgtcatcatcccctcatgtgttgcgcaatagagctcagagtggaagtgttccacagttcaagaaagtcgtctttcaagagtttacagatggcagcttcacacagcctctctatcggggcgagcttaacgaacatttgggactccttggtccctatatccgagccgaagtggaggacaacattatggttacctttaggaatcaagcctctcgcccctacagcttctactcctccctcatcagttatgaggaggatcagagacaaggcgctgaaccacggaagaactttgtgaaaccgaatgagacgaagacctacttctggaaagtacagcaccacatggcccccacaaaagacgaattcgattgcaaagcatgggcgtatttttcagacgttgacttggagaaagatgtacattcaggacttattggtcctttgttggtgtgtcacactaacactctcaatccagcccatggcaggcaggtgacagtccaggaattcgctcttttctttaccatctttgatgagaccaagtcctggtacttcacggaaaacatggagcgcaattgcagagccccctgtaacatacagatggaggaccctacctttaaggaaaattatcggttccacgcaatcaacggatacattatggatacactccctggccttgtgatggctcaggaccaacgaatcaggtggtacctcctcagcatgggttctaatgagaacatacactccattcacttttcaggacatgtgttcactgtccggaagaaagaagagtataagatggccctctacaatttgtatccaggcgtgtttgagaccgttgaaatgcttccctctaaagctggcatctggagagtagagtgcttgatcggagaacatcttcacgcaggtatgagcaccttgttcctcgtgtacagcaacaaatgtcagaccccacttggcatggccagtggacacattcgcgactttcagatcacagcatctggccagtatggacaatgggccccaaagttggctcgcctccattactccggtagcataaatgcgtggtccactaaagaacctttcagctggattaaggtcgatcttcttgcccccatgatcatccacggcattaagacacagggagcgaggcagaaattctcctccctctacatctcacagttcattattatgtatagtttggacggcaagaagtggcaaacttatagaggtaacagtactggaacagacatggtgttcttcggcaacgttgatagctctggcatcaaacacaacatctttaatcctcccataatagctcggtacatcagattgcatccgacccactacagcattaggagtacactccgaatggagcttatgggttgcgacttgaattcctgttcaatgccactcggaatggagtctaaagccatctctgatgcacagataaccgccagtagctactttacgaacatgtttgctacgtggtcaccctctaaggcaaggcttcatttgcaaggccggtctaatgcctggagacctcaggtgaacaacccgaaagaatggctccaggtggactttcagaagaccatgaaagtaacaggtgtcactactcagggagttaagtccttggatactagcatgtatgtgaaggagttccttatttcctcatcacaagatggccaccagtggaccctcttctttcagaatggtaaggtcaaagtgtttcagggcaatcaagacagcttcacacccgtggtgaacagtcttgatcctccactcttgacacgataccttcgaatccatccacagtcttgggagcaccagattgcattgcgcatggaagtacttggatgcgaggctcaggacctctac

SEQ ID NO: 904 - protein, 1457 aa, synthetic construct
  REGION 1..1457: note = Variant of human B-domain deleted Factor VIII
MQIELSTCFFLCLLRFCFSATRRYYLGAVELSWDYMQSDLGELPVDARFPPRVPKSFPFNTSVVYKKTLFVEFTDHLFNIAKPRPPWMGLLGPTIQAEVYDTVVITLKNMASHPVSLHAVGVSYWKASEGAEYDDQTSQREKEDDKVFPGGSHTYVWQVLKENGPMASDPPCLTYSYLSHVDLVKDLNSGLIGALLVCREGSLAKEKTQTLHKFILLFAVFDEGKSWHSETKNSLMQDRDAASARAWPKMHTVNGYVNRTLPGLIGCHRKSVYWHVIGMGTTPEVHSIFLEGHTFLVRNHRQASLEISPITFLTAQTLLMDLGQFLLFCHISSHQHDGMEAYVKVDSCPEEPQLRMKNNEEAEDYDDDLTDSEMDVVRFDDDNSPSIIQIRSVAKKHPKTWVHYIAAEEEDWDYAPLVLAPDDRSYKSQYLNNGPQRIGRKYKKVRFMAYTDETFKTREAIQHESGILGPLLYGEVGDTLLIIFKNQASRPYNIYPHGITDVRPLYSRRLPKGVKHLKDFPILPGEIFKYKWTVTVEDGPTKSDPRCLTRYYSSFVNMERDLASGLIGPLLICYKESVDQRGNQIMSDKRNVILFSVFDENRSWYLTENIQRFLPNPAGVQLEDPEFQASNIMHSINGYVFDSLQLSVCLHEVAYWYILSIGAQTDFLSVFFSGYTFKHKMVYEDTLTLFPFSGETVFMSMENPGLWILGCHNSDFRNRGMTALLKVSSCDKNTGDYYEDSYEDISAYLDSKNNGIEPRSFSQNPPVLKRHQREITRTTLQSDQEEIDYDDTISVEMKKEDFDIYDEDENQSPRSFQKKTRHYFIAAVERLWDYGMSSSPHVLRNRAQSGSVPQFKKVVFQEFTDGSFTQPLYRGELNEHLGLLGPYIRAEVEDNIMVTFRNQASRPYSFYSSLISYEEDQRQGAEPRKNFVKPNETKTYFWKVQHHMAPTKDEFDCKAWAYFSDVDLEKDVHSGLIGPLLVCHTNTLNPAHGRQVTVQEFALFFTIFDETKSWYFTENMERNCRAPCNIQMEDPTFKENYRFHAINGYIMDTLPGLVMAQDQRIRWYLLSMGSNENIHSIHFSGHVFTVRKKEEYKMALYNLYPGVFETVEMLPSKAGIWRVECLIGEHLHAGMSTLFLVYSNKCQTPLGMASGHIRDFQITASGQYGQWAPKLARLHYSGSINAWSTKEPFSWIKVDLLAPMIIHGIKTQGARQKFSSLYISQFIIMYSLDGKKWQTYRGNSTGTDMVFFGNVDSSGIKHNIFNPPIIARYIRLHPTHYSIRSTLRMELMGCDLNSCSMPLGMESKAISDAQITASSYFTNMFATWSPSKARLHLQGRSNAWRPQVNNPKEWLQVDFQKTMKVTGVTTQGVKSLDTSMYVKEFLISSSQDGHQWTLFFQNGKVKVFQGNQDSFTPVVNSLDPPLLTRYLRIHPQSWEHQIALRMEVLGCEAQDLY

SEQ ID NO: 905 - DNA, 4371 bp, synthetic construct
  misc_feature 1..4371: note = Variant of human B-domain deleted Factor VIII
  source 1..4371: mol_type = other DNA
atgcagattgaactgtctacctgcttcttcctctgtttgctgaggttctgctttagcgccactagacggtactaccttggcgctgtggagctgtcctgggactatatgcagagtgatttgggagagcttcccgtcgacgcacgatttcctcctcgcgttccaaagtcatttccctttaacacaagcgtggtgtacaagaagacgctcttcgtcgaattcaccgatcacctgttcaatatcgccaaacccagaccaccatggatgggtcttttggggcctaccatacaagcggaggtgtatgacacagttgttatcactctcaagaacatggcttctcatccggtaagtcttcacgcagtgggcgtgtcctactggaaagcttcagaaggagccgagtatgatgatcagacatcccagagggagaaagaagacgacaaggtatttccaggtgggtctcatacctatgtgtggcaagtgctcaaagagaatggccctatggcaagcgatccgccgtgtttgacttacagctacctttcacacgttgacctcgtcaaggacctcaactccgggttgattggagccttgttggtatgcagggaaggatctcttgccaaagagaagacacagaccctccacaagtttatccttctctttgctgtgttcgatgagggcaaaagttggcatagcgaaacgaagaattccctcatgcaggatcgcgacgcagccagcgccagagcttggcccaagatgcacactgtgaacggatatgtcaataggacgcttcctggcttgattgggtgtcatcggaaaagtgtctactggcacgtgatcggaatggggacaacaccagaggtccactccatatttctcgaaggccataccttccttgttcgaaaccacagacaggcatccttggagatctctcccattacctttctcactgcccaaacgctccttatggacttgggtcagttccttctcttctgccatatcagctcacaccagcatgatggtatggaagcttatgtgaaagtcgacagttgtcctgaggagccacagttgcgcatgaagaataatgaagaagccgaggattacgacgacgatctcaccgattctgagatggacgtggtgaggtttgatgacgacaactctccctccatcattcaaatccggagcggggcgaagaaacaccccaagacttgggtccactatatagcggtggaagaggaggattgggattacgctcctcttgtattggcaccagatgaccgctcatacaaaagccagtacctcaacaacggaccgcagagaattggccggaagtataagaaagtgcgatttatggcctatacagacgaaacctttaagacaagggaggccatccagcatgagagtgggattttgggacctcttctttacggcgaagttggtgataccctcctcatcatcttcaagaatcaagcttctcgcccctataacatttacccacacgggatcactgacgttaggcctttgtatagcagaagacttcccaaaggcgtgaagcatctcaaagacttccccattttgccaggcgagatctttaagtacaaatggaccgtcacagtggaagatggaccgactaaatcagaccctcgatgccttacgcggtactattcctccttcgtgaatatggagagagatttggcaagcggactcataggaccactcctcatctgttacaaggaatctgtagaccagaggggtaaccagattatgagtgataaacgcaatgtgatcctttttagcgtcttcgacgagaaccggtcctggtacttgaccgagaatatacaaaggttccttcccaaccccgcaggcgttcagttggaagaccctgagtttcaggccagcaatattatgcactcaatcaacggctatgtgtttgatagtctccagctttctgtttgcctccatgaagtagcctattggtacatcttgtcaattggtgctcaaacagacttcctctccgtcttcttctccggctacacctttaagcacaagatggtgtatgaggacactctcacactctttccattttctggagaaaccgtgttcatgagcatggagaatccaggcctttggatcttgggttgccacaacagtgattttcgcaatcggggaatgactgctctcctcaaagtcagcagctgtgataagaacacaggcgactattacgaagattcttacgaggacataagtgcctacttggactccaagaataacgccattgagcccagatcattctcccagaatcctcccgtgcttaaaaggcatcagcgcgaaatcaccagaactactcttcagtctgatcaagaggagattgactatgacgacaccataagcgtggaaatgaagaaggaggatttcgatatctatgacgaagatgagaaccagtctccgcggagctttcagaagaagacgcgacactacttcattgcagcagtcgaaaggctttgggactacggtatgtcatcatcccctcatgtgttgcgcaatagagctcagagtggaagtgttccacagttcaagaaagtcgtctttcaagagtttacagatggcagcttcacacagcctctctatcggggcgagcttaacgaacatttgggactccttggtccctatatccgagccgaagtggaggacaacattatggttacctttaggaatcaagcctctcgcccctacagcttctactcctccctcatcagttatgaggaggatcagagacaaggcgctgaaccacggaagaactttgtgaaaccgaatgagacgaagacctacttctggaaagtacagcaccacatggcccccacaaaagacgaattcgattgcaaagcatgggcgtatttttcagacgttgacttggagaaagatgtacattcaggacttattggtcctttgttggtgtgtcacactaacactctcaatccagcccatggcaggcaggtgacagtccaggaattcgctcttttctttaccatctttgatgagaccaagtcctggtacttcacggaaaacatggagcgcaattgcagagccccctgtaacatacagatggaggaccctacctttaaggaaaattatcggttccacgcaatcaacggatacattatggatacactccctggccttgtgatggctcaggaccaacgaatcaggtggtacctcctcagcatgggttctaatgagaacatacactccattcacttttcaggacatgtgttcactgtccggaagaaagaagagtataagatggccctctacaatttgtatccaggcgtgtttgagaccgttgaaatgcttccctctaaagctggcatctggagagtagagtgcttgatcggagaacatcttcacgcaggtatgagcaccttgttcctcgtgtacagcaacaaatgtcagaccccacttggcatggccagtggacacattcgcgactttcagatcacagcatctggccagtatggacaatgggccccaaagttggctcgcctccattactccggtagcataaatgcgtggtccactaaagaacctttcagctggattaaggtcgatcttcttgcccccatgatcatccacggcattaagacacagggagcgaggcagaaattctcctccctctacatctcacagttcattattatgtatagtttggacggcaagaagtggcaaacttatagaggtaacagtactggaacagacatggtgttcttcggcaacgttgatagctctggcatcaaacacaacatctttaatcctcccataatagctcggtacatcagattgcatccgacccactacagcattaggagtacactccgaatggagcttatgggttgcgacttgaattcctgttcaatgccactcggaatggagtctaaagccatctctgatgcacagataaccgccagtagctactttacgaacatgtttgctacgtggtcaccctctaaggcaaggcttcatttgcaaggccggtctaatgcctggagacctcaggtgaacaacccgaaagaatggctccaggtggactttcagaagaccatgaaagtaacaggtgtcactactcagggagttaagtccttggatactagcatgtatgtgaaggagttccttatttcctcatcacaagatggccaccagtggaccctcttctttcagaatggtaaggtcaaagtgtttcagggcaatcaagacagcttcacacccgtggtgaacagtcttgatcctccactcttgacacgataccttcgaatccatccacagtcttgggagcaccagattgcattgcgcatggaagtacttggatgcgaggctcaggacctctac

SEQ ID NO: 906 - protein, 1457 aa, synthetic construct
  REGION 1..1457: note = Variant of human B-domain deleted Factor VIII
MQIELSTCFFLCLLRFCFSATRRYYLGAVELSWDYMQSDLGELPVDARFPPRVPKSFPFNTSVVYKKTLFVEFTDHLFNIAKPRPPWMGLLGPTIQAEVYDTVVITLKNMASHPVSLHAVGVSYWKASEGAEYDDQTSQREKEDDKVFPGGSHTYVWQVLKENGPMASDPPCLTYSYLSHVDLVKDLNSGLIGALLVCREGSLAKEKTQTLHKFILLFAVFDEGKSWHSETKNSLMQDRDAASARAWPKMHTVNGYVNRTLPGLIGCHRKSVYWHVIGMGTTPEVHSIFLEGHTFLVRNHRQASLEISPITFLTAQTLLMDLGQFLLFCHISSHQHDGMEAYVKVDSCPEEPQLRMKNNEEAEDYDDDLTDSEMDVVRFDDDNSPSIIQIRSGAKKHPKTWVHYIAVEEEDWDYAPLVLAPDDRSYKSQYLNNGPQRIGRKYKKVRFMAYTDETFKTREAIQHESGILGPLLYGEVGDTLLIIFKNQASRPYNIYPHGITDVRPLYSRRLPKGVKHLKDFPILPGEIFKYKWTVTVEDGPTKSDPRCLTRYYSSFVNMERDLASGLIGPLLICYKESVDQRGNQIMSDKRNVILFSVFDENRSWYLTENIQRFLPNPAGVQLEDPEFQASNIMHSINGYVFDSLQLSVCLHEVAYWYILSIGAQTDFLSVFFSGYTFKHKMVYEDTLTLFPFSGETVFMSMENPGLWILGCHNSDFRNRGMTALLKVSSCDKNTGDYYEDSYEDISAYLDSKNNAIEPRSFSQNPPVLKRHQREITRTTLQSDQEEIDYDDTISVEMKKEDFDIYDEDENQSPRSFQKKTRHYFIAAVERLWDYGMSSSPHVLRNRAQSGSVPQFKKVVFQEFTDGSFTQPLYRGELNEHLGLLGPYIRAEVEDNIMVTFRNQASRPYSFYSSLISYEEDQRQGAEPRKNFVKPNETKTYFWKVQHHMAPTKDEFDCKAWAYFSDVDLEKDVHSGLIGPLLVCHTNTLNPAHGRQVTVQEFALFFTIFDETKSWYFTENMERNCRAPCNIQMEDPTFKENYRFHAINGYIMDTLPGLVMAQDQRIRWYLLSMGSNENIHSIHFSGHVFTVRKKEEYKMALYNLYPGVFETVEMLPSKAGIWRVECLIGEHLHAGMSTLFLVYSNKCQTPLGMASGHIRDFQITASGQYGQWAPKLARLHYSGSINAWSTKEPFSWIKVDLLAPMIIHGIKTQGARQKFSSLYISQFIIMYSLDGKKWQTYRGNSTGTDMVFFGNVDSSGIKHNIFNPPIIARYIRLHPTHYSIRSTLRMELMGCDLNSCSMPLGMESKAISDAQITASSYFTNMFATWSPSKARLHLQGRSNAWRPQVNNPKEWLQVDFQKTMKVTGVTTQGVKSLDTSMYVKEFLISSSQDGHQWTLFFQNGKVKVFQGNQDSFTPVVNSLDPPLLTRYLRIHPQSWEHQIALRMEVLGCEAQDLY

SEQ ID NO: 907 - DNA, 4371 bp, synthetic construct
  misc_feature 1..4371: note = Variant of human B-domain deleted Factor VIII
  source 1..4371: mol_type = other DNA
atgcagattgaactgtctacctgcttcttcctctgtttgctgaggttctgctttagcgccactagacggtactaccttggcgctgtggagctgtcctgggactatatgcagagtgatttgggagagcttcccgtcgacgcacgatttcctcctcgcgttccaaagtcatttccctttaacacaagcgtggtgtacaagaagacgctcttcgtcgaattcaccgatcacctgttcaatatcgccaaacccagaccaccatggatgggtcttttggggcctaccatacaagcggaggtgtatgacacagttgttatcactctcaagaacatggcttctcatccggtaagtcttcacgcagtgggcgtgtcctactggaaagcttcagaaggagccgagtatgatgatcagacatcccagagggagaaagaagacgacaaggtatttccaggtgggtctcatacctatgtgtggcaagtgctcaaagagaatggccctatggcaagcgatccgccgtgtttgacttacagctacctttcacacgttgacctcgtcaaggacctcaactccgggttgattggagccttgttggtatgcagggaaggatctcttgccaaagagaagacacagaccctccacaagtttatccttctctttgctgtgttcgatgagggcaaaagttggcatagcgaaacgaagaattccctcatgcaggatcgcgacgcagccagcgccagagcttggcccaagatgcacactgtgaacggatatgtcaataggacgcttcctggcttgattgggtgtcatcggaaaagtgtctactggcacgtgatcggaatggggacaacaccagaggtccactccatatttctcgaaggccataccttccttgttcgaaaccacagacaggcatccttggagatctctcccattacctttctcactgcccaaacgctccttatggacttgggtcagttccttctcttctgccatatcagctcacaccagcatgatggtatggaagcttatgtgaaagtcgacagttgtcctgaggagccacagttgcgcatgaagaataatgaagaagccgaggattacgacgacgatctcaccgattctgagatggacgtggtgaggtttgatgacgacaactctccctccatcattcaaatccggagcgtggcgaagaaacaccccaagacttgggtccactatatagcggcggaagaggaggattgggattacgctcctcttgtattggcaccagatgaccgctcatacaaaagccagtacctcaacaacggaccgcagagaattggccggaagtataagaaagtgcgatttatggcctatacagacgaaacctttaagacaagggaggccatccagcatgagagtgggattttgggacctcttctttacggcgaagttggtgataccctcctcatcatcttcaagaatcaagcttctcgcccctataacatttacccacacgggatcactgacgttaggcctttgtatagcagaagacttcccaaaggcgtgaagcatctcaaagacttccccattttgccaggcgagatctttaagtacaaatggaccgtcacagtggaagatggaccgactaaatcagaccctcgatgccttacgcggtactattcctccttcgtgaatatggagagagatttggcaagcggactcataggaccactcctcatctgttacaaggaatctgtagaccagaggggtaaccagattatgagtgataaacgcaatgtgatcctttttagcgtcttcgacgagaaccggtcctggtacttgaccgagaatatacaaaggttccttcccaaccccgcaggcgttcagttggaagaccctgagtttcaggccagcaatattatgcactcaatcaacggctatgtgtttgatagtctccagctttctgtttgcctccatgaagtagcctattggtacatcttgtcaattggtgctcaaacagacttcctctccgtcttcttctccggctacacctttaagcacaagatggtgtatgaggacactctcacactctttccattttctggagaaaccgtgttcatgagcatggagaatccaggcctttggatcttgggttgccacaacagtgattttcgcaatcggggaatgactgctctcctcaaagtcagcagctgtgataagaacacaggcgactattacgaagattcttacgaggacataagtgcctacttggactccaagaataacgccattgagcccagatcattctcccagaatcctcccgtgcttaaaaggcatcagcgcgaaatcaccagaactactcttcagtctgatcaagaggagattgactatgacgacaccataagcgtggaatggaagaaggaggatttcgatatctatgacgaagatgagaaccagtctccgcggagctttcagaagaagacgcgacactacttcattgcagcagtcgaaaggctttgggactacggtatgtcatcatcccctcatgtgttgcgcaatagagctcagagtggaagtgttccacagttcaagaaagtcgtctttcaagagtttacagatggcagcttcacacagcctctctatcggggcgagcttaacgaacatttgggactccttggtccctatatccgagccgaagtggaggacaacattatggttacctttaggaatcaagcctctcgcccctacagcttctactcctccctcatcagttatgaggaggatcagagacaaggcgctgaaccacggaagaactttgtgaaaccgaatgagacgaagacctacttctggaaagtacagcaccacatggcccccacaaaagacgaattcgattgcaaagcatgggcgtatttttcagacgttgacttggagaaagatgtacattcaggacttattggtcctttgttggtgtgtcacactaacactctcaatccagcccatggcaggcaggtgacagtccaggaattcgctcttttctttaccatctttgatgagaccaagtcctggtacttcacggaaaacatggagcgcaattgcagagccccctgtaacatacagatggaggaccctacctttaaggaaaattatcggttccacgcaatcaacggatacattatggatacactccctggccttgtgatggctcaggaccaacgaatcaggtggtacctcctcagcatgggttctaatgagaacatacactccattcacttttcaggacatgtgttcactgtccggaagaaagaagagtataagatggccctctacaatttgtatccaggcgtgtttgagaccgttgaaatgcttccctctaaagctggcatctggagagtagagtgcttgatcggagaacatcttcacgcaggtatgagcaccttgttcctcgtgtacagcaacaaatgtcagaccccacttggcatggccagtggacacattcgcgactttcagatcacagcatctggccagtatggacaatgggccccaaagttggctcgcctccattactccggtagcataaatgcgtggtccactaaagaacctttcagctggattaaggtcgatcttcttgcccccatgatcatccacggcattaagacacagggagcgaggcagaaattctcctccctctacatctcacagttcattattatgtatagtttggacggcaagaagtggcaaacttatagaggtaacagtactggaacagacatggtgttcttcggcaacgttgatagctctggcatcaaacacaacatctttaatcctcccataatagctcggtacatcagattgcatccgacccactacagcattaggagtacactccgaatggagcttatgggttgcgacttgaattcctgttcaatgccactcggaatggagtctaaagccatctctgatgcacagataaccgccagtagctactttacgaacatgtttgctacgtggtcaccctctaaggcaaggcttcatttgcaaggccggtctaatgcctggagacctcaggtgaacaacccgaaagaatggctccaggtggactttcagaagaccatgaaagtaacaggtgtcactactcagggagttaagtccttggatactagcatgtatgtgaaggagttccttatttcctcatcacaagatggccaccagtggaccctcttctttcagaatggtaaggtcaaagtgtttcagggcaatcaagacagcttcacacccgtggtgaacagtcttgatcctccactcttgacacgataccttcgaatccatccacagtcttgggagcaccagattgcattgcgcatggaagtacttggatgcgaggctcaggacctctac

SEQ ID NO: 908 - protein, 1457 aa, synthetic construct
  REGION 1..1457: note = Variant of human B-domain deleted Factor VIII
MQIELSTCFFLCLLRFCFSATRRYYLGAVELSWDYMQSDLGELPVDARFPPRVPKSFPFNTSVVYKKTLFVEFTDHLFNIAKPRPPWMGLLGPTIQAEVYDTVVITLKNMASHPVSLHAVGVSYWKASEGAEYDDQTSQREKEDDKVFPGGSHTYVWQVLKENGPMASDPPCLTYSYLSHVDLVKDLNSGLIGALLVCREGSLAKEKTQTLHKFILLFAVFDEGKSWHSETKNSLMQDRDAASARAWPKMHTVNGYVNRTLPGLIGCHRKSVYWHVIGMGTTPEVHSIFLEGHTFLVRNHRQASLEISPITFLTAQTLLMDLGQFLLFCHISSHQHDGMEAYVKVDSCPEEPQLRMKNNEEAEDYDDDLTDSEMDVVRFDDDNSPSIIQIRSVAKKHPKTWVHYIAAEEEDWDYAPLVLAPDDRSYKSQYLNNGPQRIGRKYKKVRFMAYTDETFKTREAIQHESGILGPLLYGEVGDTLLIIFKNQASRPYNIYPHGITDVRPLYSRRLPKGVKHLKDFPILPGEIFKYKWTVTVEDGPTKSDPRCLTRYYSSFVNMERDLASGLIGPLLICYKESVDQRGNQIMSDKRNVILFSVFDENRSWYLTENIQRFLPNPAGVQLEDPEFQASNIMHSINGYVFDSLQLSVCLHEVAYWYILSIGAQTDFLSVFFSGYTFKHKMVYEDTLTLFPFSGETVFMSMENPGLWILGCHNSDFRNRGMTALLKVSSCDKNTGDYYEDSYEDISAYLDSKNNAIEPRSFSQNPPVLKRHQREITRTTLQSDQEEIDYDDTISVEWKKEDFDIYDEDENQSPRSFQKKTRHYFIAAVERLWDYGMSSSPHVLRNRAQSGSVPQFKKVVFQEFTDGSFTQPLYRGELNEHLGLLGPYIRAEVEDNIMVTFRNQASRPYSFYSSLISYEEDQRQGAEPRKNFVKPNETKTYFWKVQHHMAPTKDEFDCKAWAYFSDVDLEKDVHSGLIGPLLVCHTNTLNPAHGRQVTVQEFALFFTIFDETKSWYFTENMERNCRAPCNIQMEDPTFKENYRFHAINGYIMDTLPGLVMAQDQRIRWYLLSMGSNENIHSIHFSGHVFTVRKKEEYKMALYNLYPGVFETVEMLPSKAGIWRVECLIGEHLHAGMSTLFLVYSNKCQTPLGMASGHIRDFQITASGQYGQWAPKLARLHYSGSINAWSTKEPFSWIKVDLLAPMIIHGIKTQGARQKFSSLYISQFIIMYSLDGKKWQTYRGNSTGTDMVFFGNVDSSGIKHNIFNPPIIARYIRLHPTHYSIRSTLRMELMGCDLNSCSMPLGMESKAISDAQITASSYFTNMFATWSPSKARLHLQGRSNAWRPQVNNPKEWLQVDFQKTMKVTGVTTQGVKSLDTSMYVKEFLISSSQDGHQWTLFFQNGKVKVFQGNQDSFTPVVNSLDPPLLTRYLRIHPQSWEHQIALRMEVLGCEAQDLY

SEQ ID NO: 909 - DNA, 4371 bp, synthetic construct
  misc_feature 1..4371: note = Variant of human B-domain deleted Factor VIII
  source 1..4371: mol_type = other DNA
atgcagattgaactgtctacctgcttcttcctctgtttgctgaggttctgctttagcgccactagacggtactaccttggcgctgtggagctgtcctgggactatatgcagagtgatttgggagagcttcccgtcgacgcacgatttcctcctcgcgttccaaagtcatttccctttaacacaagcgtggtgtacaagaagacgctcttcgtcgaattcaccgatcacctgttcaatatcgccaaacccagaccaccatggatgggtcttttggggcctaccatacaagcggaggtgtatgacacagttgttatcactctcaagaacatggcttctcatccggtaagtcttcacgcagtgggcgtgtcctactggaaagcttcagaaggagccgagtatgatgatcagacatcccagagggagaaagaagacgacaaggtatttccaggtgggtctcatacctatgtgtggcaagtgctcaaagagaatggccctatggcaagcgatccgccgtgtttgacttacagctacctttcacacgttgacctcgtcaaggacctcaactccgggttgattggagccttgttggtatgcagggaaggatctcttgccaaagagaagacacagaccctccacaagtttatccttctctttgctgtgttcgatgagggcaaaagttggcatagcgaaacgaagaattccctcatgcaggatcgcgacgcagccagcgccagagcttggcccaagatgcacactgtgaacggatatgtcaataggacgcttcctggcttgattgggtgtcatcggaaaagtgtctactggcacgtgatcggaatggggacaacaccagaggtccactccatatttctcgaaggccataccttccttgttcgaaaccacagacaggcatccttggagatctctcccattacctttctcactgcccaaacgctccttatggacttgggtcagttccttctcttctgccatatcagctcacaccagcatgatggtatggaagcttatgtgaaagtcgacagttgtcctgaggagccacagttgcgcatgaagaataatgaagaagccgaggattacgacgacgatctcaccgattctgagatggacgtggtgaggtttgatgacgacaactctccctccatcattcaaatccggagcgtggcgaagaaacaccccaagacttgggtccactatatagcggcggaagaggaggattgggattacgctcctcttgtattggcaccagatgaccgctcatacaaaagccagtacctcaacaacggaccgcagagaattggccggaagtataagaaagtgcgatttatggcctatacagacgaaacctttaagacaagggaggccatccagcatgagagtgggattttgggacctcttctttacggcgaagttggtgataccctcctcatcatcttcaagaatcaagcttctcgcccctataacatttacccacacgggatcactgacgttaggcctttgtatagcagaagacttcccaaaggcgtgaagcatctcaaagacttccccattttgccaggcgagatctttaagtacaaatggaccgtcacagtggaagatggaccgactaaatcagaccctcgatgccttacgcggtactattcctccttcgtgaatatggagagagatttggcaagcggactcataggaccactcctcatctgttacaaggaatctgtagaccagaggggtaaccagattatgagtgataaacgcaatgtgatcctttttagcgtcttcgacgagaaccggtcctggtacttgaccgagaatatacaaaggttccttcccaaccccgcaggcgttcagttggaagaccctgagtttcaggccagcaatattatgcactcaatcaacggctatgtgtttgatagtctccagctttctgtttgcctccatgaagtagcctattggtacatcttgtcaattggtgctcaaacagacttcctctccgtcttcttctccggctacacctttaagcacaagatggtgtatgaggacactctcacactctttccattttctggagaaaccgtgttcatgagcatggagaatccaggcctttggatcttgggttgccacaacagtgattttcgcaatcggggaatgactgctctcctcaaagtcagcagctgtgataagaacacaggcgactattacgaagattcttacgaggacataagtgcctacttggactccaagaataacgccattgagcccagatcattctcccagaatcctcccgtgcttaaaaggcatcagcgcgaaatcaccagaactactcttcagtctgatcaagaggagattgactatgacgacaccataagcgtggaaatgaagaaggaggatttcgatatctatgacgaagatgagaaccagtctccgcggagctttcagaaggtgacgcgacactacttcattgcagcagtcgaaaggctttgggactacggtatgtcatcatcccctcatgtgttgcgcaatagagctcagagtggaagtgttccacagttcaagaaagtcgtctttcaagagtttacagatggcagcttcacacagcctctctatcggggcgagcttaacgaacatttgggactccttggtccctatatccgagccgaagtggaggacaacattatggttacctttaggaatcaagcctctcgcccctacagcttctactcctccctcatcagttatgaggaggatcagagacaaggcgctgaaccacggaagaactttgtgaaaccgaatgagacgaagacctacttctggaaagtacagcaccacatggcccccacaaaagacgaattcgattgcaaagcatgggcgtatttttcagacgttgacttggagaaagatgtacattcaggacttattggtcctttgttggtgtgtcacactaacactctcaatccagcccatggcaggcaggtgacagtccaggaattcgctcttttctttaccatctttgatgagaccaagtcctggtacttcacggaaaacatggagcgcaattgcagagccccctgtaacatacagatggaggaccctacctttaaggaaaattatcggttccacgcaatcaacggatacattatggatacactccctggccttgtgatggctcaggaccaacgaatcaggtggtacctcctcagcatgggttctaatgagaacatacactccattcacttttcaggacatgtgttcactgtccggaagaaagaagagtataagatggccctctacaatttgtatccaggcgtgtttgagaccgttgaaatgcttccctctaaagctggcatctggagagtagagtgcttgatcggagaacatcttcacgcaggtatgagcaccttgttcctcgtgtacagcaacaaatgtcagaccccacttggcatggccagtggacacattcgcgactttcagatcacagcatctggccagtatggacaatgggccccaaagttggctcgcctccattactccggtagcataaatgcgtggtccactaaagaacctttcagctggattaaggtcgatcttcttgcccccatgatcatccacggcattaagacacagggagcgaggcagaaattctcctccctctacatctcacagttcattattatgtatagtttggacggcaagaagtggcaaacttatagaggtaacagtactggaacagacatggtgttcttcggcaacgttgatagctctggcatcaaacacaacatctttaatcctcccataatagctcggtacatcagattgcatccgacccactacagcattaggagtacactccgaatggagcttatgggttgcgacttgaattcctgttcaatgccactcggaatggagtctaaagccatctctgatgcacagataaccgccagtagctactttacgaacatgtttgctacgtggtcaccctctaaggcaaggcttcatttgcaaggccggtctaatgcctggagacctcaggtgaacaacccgaaagaatggctccaggtggactttcagaagaccatgaaagtaacaggtgtcactactcagggagttaagtccttggatactagcatgtatgtgaaggagttccttatttcctcatcacaagatggccaccagtggaccctcttctttcagaatggtaaggtcaaagtgtttcagggcaatcaagacagcttcacacccgtggtgaacagtcttgatcctccactcttgacacgataccttcgaatccatccacagtcttgggagcaccagattgcattgcgcatggaagtacttggatgcgaggctcaggacctctac

SEQ ID NO: 910 - protein, 1457 aa, synthetic construct
  REGION 1..1457: note = Variant of human B-domain deleted Factor VIII
MQIELSTCFFLCLLRFCFSATRRYYLGAVELSWDYMQSDLGELPVDARFPPRVPKSFPFNTSVVYKKTLFVEFTDHLFNIAKPRPPWMGLLGPTIQAEVYDTVVITLKNMASHPVSLHAVGVSYWKASEGAEYDDQTSQREKEDDKVFPGGSHTYVWQVLKENGPMASDPPCLTYSYLSHVDLVKDLNSGLIGALLVCREGSLAKEKTQTLHKFILLFAVFDEGKSWHSETKNSLMQDRDAASARAWPKMHTVNGYVNRTLPGLIGCHRKSVYWHVIGMGTTPEVHSIFLEGHTFLVRNHRQASLEISPITFLTAQTLLMDLGQFLLFCHISSHQHDGMEAYVKVDSCPEEPQLRMKNNEEAEDYDDDLTDSEMDVVRFDDDNSPSIIQIRSVAKKHPKTWVHYIAAEEEDWDYAPLVLAPDDRSYKSQYLNNGPQRIGRKYKKVRFMAYTDETFKTREAIQHESGILGPLLYGEVGDTLLIIFKNQASRPYNIYPHGITDVRPLYSRRLPKGVKHLKDFPILPGEIFKYKWTVTVEDGPTKSDPRCLTRYYSSFVNMERDLASGLIGPLLICYKESVDQRGNQIMSDKRNVILFSVFDENRSWYLTENIQRFLPNPAGVQLEDPEFQASNIMHSINGYVFDSLQLSVCLHEVAYWYILSIGAQTDFLSVFFSGYTFKHKMVYEDTLTLFPFSGETVFMSMENPGLWILGCHNSDFRNRGMTALLKVSSCDKNTGDYYEDSYEDISAYLDSKNNAIEPRSFSQNPPVLKRHQREITRTTLQSDQEEIDYDDTISVEMKKEDFDIYDEDENQSPRSFQKVTRHYFIAAVERLWDYGMSSSPHVLRNRAQSGSVPQFKKVVFQEFTDGSFTQPLYRGELNEHLGLLGPYIRAEVEDNIMVTFRNQASRPYSFYSSLISYEEDQRQGAEPRKNFVKPNETKTYFWKVQHHMAPTKDEFDCKAWAYFSDVDLEKDVHSGLIGPLLVCHTNTLNPAHGRQVTVQEFALFFTIFDETKSWYFTENMERNCRAPCNIQMEDPTFKENYRFHAINGYIMDTLPGLVMAQDQRIRWYLLSMGSNENIHSIHFSGHVFTVRKKEEYKMALYNLYPGVFETVEMLPSKAGIWRVECLIGEHLHAGMSTLFLVYSNKCQTPLGMASGHIRDFQITASGQYGQWAPKLARLHYSGSINAWSTKEPFSWIKVDLLAPMIIHGIKTQGARQKFSSLYISQFIIMYSLDGKKWQTYRGNSTGTDMVFFGNVDSSGIKHNIFNPPIIARYIRLHPTHYSIRSTLRMELMGCDLNSCSMPLGMESKAISDAQITASSYFTNMFATWSPSKARLHLQGRSNAWRPQVNNPKEWLQVDFQKTMKVTGVTTQGVKSLDTSMYVKEFLISSSQDGHQWTLFFQNGKVKVFQGNQDSFTPVVNSLDPPLLTRYLRIHPQSWEHQIALRMEVLGCEAQDLY

SEQ ID NO: 911 - DNA, 4371 bp, synthetic construct
  misc_feature 1..4371: note = Variant of human B-domain deleted Factor VIII
  source 1..4371: mol_type = other DNA
atgcagattgaactgtctacctgcttcttcctctgtttgctgaggttctgctttagcgccactagacggtactaccttggcgctgtggagctgtcctgggactatatgcagagtgatttgggagagcttcccgtcgacgcacgatttcctcctcgcgttccaaagtcatttccctttaacacaagcgtggtgtacaagaagacgctcttcgtcgaattcaccgatcacctgttcaatatcgccaaacccagaccaccatggatgggtcttttggggcctaccatacaagcggaggtgtatgacacagttgttatcactctcaagaacatggcttctcatccggtaagtcttcacgcagtgggcgtgtcctactggaaagcttcagaaggagccgagtatgatgatcagacatcccagagggagaaagaagacgacaaggtatttccaggtgggtctcatacctatgtgtggcaagtgctcaaagagaatggccctatggcaagcgatccgccgtgtttgacttacagctacctttcacacgttgacctcgtcaaggacctcaactccgggttgattggagccttgttggtatgcagggaaggatctcttgccaaagagaagacacagaccctccacaagtttatccttctctttgctgtgttcgatgagggcaaaagttggcatagcgaaacgaagaattccctcatgcaggatcgcgacgcagccagcgccagagcttggcccaagatgcacactgtgaacggatatgtcaataggacgcttcctggcttgattgggtgtcatcggaaaagtgtctactggcacgtgatcggaatggggacaacaccagaggtccactccatatttctcgaaggccataccttccttgttcgaaaccacagacaggcatccttggagatctctcccattacctttctcactgcccaaacgctccttatggacttgggtcagttccttctcttctgccatatcagctcacaccagcatgatggtatggaagcttatgtgaaagtcgacagttgtcctgaggagccacagttgcgcatgaagaataatgaagaagccgaggattacgacgacgatctcaccgattctgagatggacgtggtgaggtttgatgacgacaactctccctccatcattcaaatccggagcggggcgaagaaacaccccaagacttgggtccactatatagcggcggaagaggaggattgggattacgctcctcttgtattggcaccagatgaccgctcatacaaaagccagtacctcaacaacggaccgcagagaattggccggaagtataagaaagtgcgatttatggcctatacagacgaaacctttaagacaagggaggccatccagcatgagagtgggattttgggacctcttctttacggcgaagttggtgataccctcctcatcatcttcaagaatcaagcttctcgcccctataacatttacccacacgggatcactgacgttaggcctttgtatagcagaagacttcccaaaggcgtgaagcatctcaaagacttccccattttgccaggcgagatctttaagtacaaatggaccgtcacagtggaagatggaccgactaaatcagaccctcgatgccttacgcggtactattcctccttcgtgaatatggagagagatttggcaagcggactcataggaccactcctcatctgttacaaggaatctgtagaccagaggggtaaccagattatgagtgataaacgcaatgtgatcctttttagcgtcttcgacgagaaccggtcctggtacttgaccgagaatatacaaaggttccttcccaaccccgcaggcgttcagttggaagaccctgagtttcaggccagcaatattatgcactcaatcaacggctatgtgtttgatagtctccagctttctgtttgcctccatgaagtagcctattggtacatcttgtcaattggtgctcaaacagacttcctctccgtcttcttctccggctacacctttaagcacaagatggtgtatgaggacactctcacactctttccattttctggagaaaccgtgttcatgagcatggagaatccaggcctttggatcttgggttgccacaacagtgattttcgcaatcggggaatgactgctctcctcaaagtcagcagctgtgataagaacacaggcgactattacgaagattcttacgaggacataagtgcctacttggactccaagaataacgccattgagcccagatcattctcccagaatcctcccgtgcttaaaaggcatcagcgcgaaatcaccagaactactcttcagtctgatcaagaggagattgactatgacgacaccataagcgtggaaatgaagaaggaggatttcgatatctatgacgaagatgagaaccagtctccgcggagctttcagaagaagacgcgacactacttcattgcagcagtcgaaaggctttgggactacggtatgtcatcatcccctcatgtgttgcgcaatagagctcagagtggaagtgttccacagttcaagaaagtcgtctttcaagagtttacagatggcagcttcacacagcctctctatcggggcgagcttaacgaacatttgggactccttggtccctatatccgagccgaagtggaggacaacattatggttacctttaggaatcaagcctctcgcccctacagcttctactcctccctcatcagttatgaggaggatcagagacaaggcgctgaaccacggaagaactttgtgaaaccgaatgagacgaagacctacttctggaaagtacagcaccacatggcccccacaaaagacgaattcgattgcaaagcatgggcgtatttttcagacgttgacttggagaaagatgtacattcaggacttattggtcctttgttggtgtgtcacactaacactctcaatccagcccatggcaggcaggtgacagtccaggaattcgctcttttctttaccatctttgatgagaccaagtcctggtacttcacggaaaacatggagcgcaattgcagagccccctgtaacatacagatggaggaccctacctttaaggaaaattatcggttccacgcaatcaacggatacattatggatacactccctggccttgtgatggctcaggaccaacgaatcaggtggtacctcctcagcatgggttctaatgagaacatacactccattcacttttcaggacatgtgttcactgtccggaagaaagaagagtataagatggccctctacaatttgtatccaggcgtgtttgagaccgttgaaatgcttccctctaaagctggcatctggagagtagagtgcttgatcggagaacatcttcacgcaggtatgagcaccttgttcctcgtgtacagcaacaaatgtcagaccccacttggcatggccagtggacacattcgcgactttcagatcacagcatctggccagtatggacaatgggccccaaagttggctcgcctccattactccggtagcataaatgcgtggtccactaaagaacctttcagctggattaaggtcgatcttcttgcccccatgatcatccacggcattaagacacagggagcgaggcagaaattctcctccctctacatctcacagttcattattatgtatagtttggacggcaagaagtggcaaacttatagaggtaacagtactggaacagacatggtgttcttcggcaacgttgatagctctggcatcaaacacaacatctttaatcctcccataatagctcggtacatcagattgcatccgacccactacagcattaggagtacactccgaatggagcttatgggttgcgacttgaattcctgttcaatgccactcggaatggagtctaaagccatctctgatgcacagataaccgccagtagctactttacgaacatgtttgctacgtggtcaccctctaaggcaaggcttcatttgcaaggccggtctaatgcctggagacctcaggtgaacaacccgaaagaatggctccaggtggactttcagaagaccatgaaagtaacaggtgtcactactcagggagttaagtccttggatactagcatgtatgtgaaggagttccttatttcctcatcacaagatggccaccagtggaccctcttctttcagaatggtaaggtcaaagtgtttcagggcaatcaagacagcttcacacccgtggtgaacagtcttgatcctccactcttgacacgataccttcgaatccatccacagtcttgggagcaccagattgcattgcgcatggaagtacttggatgcgaggctcaggacctctac

SEQ ID NO: 912 - protein, 1457 aa, synthetic construct
  REGION 1..1457: note = Variant of human B-domain deleted Factor VIII
MQIELSTCFFLCLLRFCFSATRRYYLGAVELSWDYMQSDLGELPVDARFPPRVPKSFPFNTSVVYKKTLFVEFTDHLFNIAKPRPPWMGLLGPTIQAEVYDTVVITLKNMASHPVSLHAVGVSYWKASEGAEYDDQTSQREKEDDKVFPGGSHTYVWQVLKENGPMASDPPCLTYSYLSHVDLVKDLNSGLIGALLVCREGSLAKEKTQTLHKFILLFAVFDEGKSWHSETKNSLMQDRDAASARAWPKMHTVNGYVNRTLPGLIGCHRKSVYWHVIGMGTTPEVHSIFLEGHTFLVRNHRQASLEISPITFLTAQTLLMDLGQFLLFCHISSHQHDGMEAYVKVDSCPEEPQLRMKNNEEAEDYDDDLTDSEMDVVRFDDDNSPSIIQIRSGAKKHPKTWVHYIAAEEEDWDYAPLVLAPDDRSYKSQYLNNGPQRIGRKYKKVRFMAYTDETFKTREAIQHESGILGPLLYGEVGDTLLIIFKNQASRPYNIYPHGITDVRPLYSRRLPKGVKHLKDFPILPGEIFKYKWTVTVEDGPTKSDPRCLTRYYSSFVNMERDLASGLIGPLLICYKESVDQRGNQIMSDKRNVILFSVFDENRSWYLTENIQRFLPNPAGVQLEDPEFQASNIMHSINGYVFDSLQLSVCLHEVAYWYILSIGAQTDFLSVFFSGYTFKHKMVYEDTLTLFPFSGETVFMSMENPGLWILGCHNSDFRNRGMTALLKVSSCDKNTGDYYEDSYEDISAYLDSKNNAIEPRSFSQNPPVLKRHQREITRTTLQSDQEEIDYDDTISVEMKKEDFDIYDEDENQSPRSFQKKTRHYFIAAVERLWDYGMSSSPHVLRNRAQSGSVPQFKKVVFQEFTDGSFTQPLYRGELNEHLGLLGPYIRAEVEDNIMVTFRNQASRPYSFYSSLISYEEDQRQGAEPRKNFVKPNETKTYFWKVQHHMAPTKDEFDCKAWAYFSDVDLEKDVHSGLIGPLLVCHTNTLNPAHGRQVTVQEFALFFTIFDETKSWYFTENMERNCRAPCNIQMEDPTFKENYRFHAINGYIMDTLPGLVMAQDQRIRWYLLSMGSNENIHSIHFSGHVFTVRKKEEYKMALYNLYPGVFETVEMLPSKAGIWRVECLIGEHLHAGMSTLFLVYSNKCQTPLGMASGHIRDFQITASGQYGQWAPKLARLHYSGSINAWSTKEPFSWIKVDLLAPMIIHGIKTQGARQKFSSLYISQFIIMYSLDGKKWQTYRGNSTGTDMVFFGNVDSSGIKHNIFNPPIIARYIRLHPTHYSIRSTLRMELMGCDLNSCSMPLGMESKAISDAQITASSYFTNMFATWSPSKARLHLQGRSNAWRPQVNNPKEWLQVDFQKTMKVTGVTTQGVKSLDTSMYVKEFLISSSQDGHQWTLFFQNGKVKVFQGNQDSFTPVVNSLDPPLLTRYLRIHPQSWEHQIALRMEVLGCEAQDLY

SEQ ID NO: 913 - DNA, 4371 bp, synthetic construct
  misc_feature 1..4371: note = Variant of human B-domain deleted Factor VIII
  source 1..4371: mol_type = other DNA
atgcagattgaactgtctacctgcttcttcctctgtttgctgaggttctgctttagcgccactagacggtactaccttggcgctgtggagctgtcctgggactatatgcagagtgatttgggagagcttcccgtcgacgcacgatttcctcctcgcgttccaaagtcatttccctttaacacaagcgtggtgtacaagaagacgctcttcgtcgaattcaccgatcacctgttcaatatcgccaaacccagaccaccatggatgggtcttttggggcctaccatacaagcggaggtgtatgacacagttgttatcactctcaagaacatggcttctcatccggtaagtcttcacgcagtgggcgtgtcctactggaaagcttcagaaggagccgagtatgatgatcagacatcccagagggagaaagaagacgacaaggtatttccaggtgggtctcatacctatgtgtggcaagtgctcaaagagaatggccctatggcaagcgatccgccgtgtttgacttacagctacctttcacacgttgacctcgtcaaggacctcaactccgggttgattggagccttgttggtatgcagggaaggatctcttgccaaagagaagacacagaccctccacaagtttatccttctctttgctgtgttcgatgagggcaaaagttggcatagcgaaacgaagaattccctcatgcaggatcgcgacgcagccagcgccagagcttggcccaagatgcacactgtgaacggatatgtcaataggacgcttcctggcttgattgggtgtcatcggaaaagtgtctactggcacgtgatcggaatggggacaacaccagaggtccactccatatttctcgaaggccataccttccttgttcgaaaccacagacaggcatccttggagatctctcccattacctttctcactgcccaaacgctccttatggacttgggtcagttccttctcttctgccatatcagctcacaccagcatgatggtatggaagcttatgtgaaagtcgacagttgtcctgaggagccacagttgcgcatgaagaataatgaagaagccgaggattacgacgacgatctcaccgattctgagatggacgtggtgaggtttgatgacgacaactctccctccatcattcaaatccggagcgtggcgaagaaacaccccaagacttgggtccactatatagcggcggaagaggaggattgggattacgctcctcttgtattggcaccagatgaccgctcatacaaaagccagtacctcaacaacggaccgcagagaattggccggaagtataagaaagtgcgatttatggcctatacagacgaaacctttaagacaagggaggccatccagcatgagagtgggattttgggacctcttctttacggcgaagttggtgataccctcctcatcatcttcaagaatcaagcttctcgcccctataacatttacccacacgggatcactgacgttaggcctttgtatagcagaagacttcccaaaggcgtgaagcatctcaaagacttccccattttgccaggcgagatctttaagtacaaatggaccgtcacagtggaagatggaccgactaaatcagaccctcgatgccttacgcggtactattcctccttcgtgaatatggagagagatttggcaagcggactcataggaccactcctcatctgttacaaggaatctgtagaccagaggggtaaccagattatgagtgataaacgcaatgtgatcctttttagcgtcttcgacgagaaccggtcctggtacttgaccgagaatatacaaaggttccttcccaaccccgcaggcgttcagttggaagaccctgagtttcaggccagcaatattatgcactcaatcaacggctatgtgtttgatagtctccagctttctgtttgcctccatgaagtagcctattggtacatcttgtcaattggtgctcaaacagacttcctctccgtcttcttctccggctacacctttaagcacaagatggtgtatgaggacactctcacactctttccattttctggagaaaccgtgttcatgagcatggagaatccaggcctttggatcttgggttgccacaacagtgattttcgcaatcggggaatgactgctctcctcaaagtcagcagctgtgataagaacacaggcgactattacgaagattcttacgaggacataagtgcctacttggactccaagaataacgccattgagcccagatcattctcccagaatcctcccgtgcttaaaaggcatcagcgcgaaatcaccagaactactcttcagtctgatcaagaggagtgggactatgacgacaccataagcgtggaaatgaagaaggaggatttcgatatctatgacgaagatgagaaccagtctccgcggagctttcagaagaagacgcgacactacttcattgcagcagtcgaaaggctttgggactacggtatgtcatcatcccctcatgtgttgcgcaatagagctcagagtggaagtgttccacagttcaagaaagtcgtctttcaagagtttacagatggcagcttcacacagcctctctatcggggcgagcttaacgaacatttgggactccttggtccctatatccgagccgaagtggaggacaacattatggttacctttaggaatcaagcctctcgcccctacagcttctactcctccctcatcagttatgaggaggatcagagacaaggcgctgaaccacggaagaactttgtgaaaccgaatgagacgaagacctacttctggaaagtacagcaccacatggcccccacaaaagacgaattcgattgcaaagcatgggcgtatttttcagacgttgacttggagaaagatgtacattcaggacttattggtcctttgttggtgtgtcacactaacactctcaatccagcccatggcaggcaggtgacagtccaggaattcgctcttttctttaccatctttgatgagaccaagtcctggtacttcacggaaaacatggagcgcaattgcagagccccctgtaacatacagatggaggaccctacctttaaggaaaattatcggttccacgcaatcaacggatacattatggatacactccctggccttgtgatggctcaggaccaacgaatcaggtggtacctcctcagcatgggttctaatgagaacatacactccattcacttttcaggacatgtgttcactgtccggaagaaagaagagtataagatggccctctacaatttgtatccaggcgtgtttgagaccgttgaaatgcttccctctaaagctggcatctggagagtagagtgcttgatcggagaacatcttcacgcaggtatgagcaccttgttcctcgtgtacagcaacaaatgtcagaccccacttggcatggccagtggacacattcgcgactttcagatcacagcatctggccagtatggacaatgggccccaaagttggctcgcctccattactccggtagcataaatgcgtggtccactaaagaacctttcagctggattaaggtcgatcttcttgcccccatgatcatccacggcattaagacacagggagcgaggcagaaattctcctccctctacatctcacagttcattattatgtatagtttggacggcaagaagtggcaaacttatagaggtaacagtactggaacagacatggtgttcttcggcaacgttgatagctctggcatcaaacacaacatctttaatcctcccataatagctcggtacatcagattgcatccgacccactacagcattaggagtacactccgaatggagcttatgggttgcgacttgaattcctgttcaatgccactcggaatggagtctaaagccatctctgatgcacagataaccgccagtagctactttacgaacatgtttgctacgtggtcaccctctaaggcaaggcttcatttgcaaggccggtctaatgcctggagacctcaggtgaacaacccgaaagaatggctccaggtggactttcagaagaccatgaaagtaacaggtgtcactactcagggagttaagtccttggatactagcatgtatgtgaaggagttccttatttcctcatcacaagatggccaccagtggaccctcttctttcagaatggtaaggtcaaagtgtttcagggcaatcaagacagcttcacacccgtggtgaacagtcttgatcctccactcttgacacgataccttcgaatccatccacagtcttgggagcaccagattgcattgcgcatggaagtacttggatgcgaggctcaggacctctac

SEQ ID NO: 914 - protein, 1457 aa, synthetic construct
  REGION 1..1457: note = Variant of human B-domain deleted Factor VIII
MQIELSTCFFLCLLRFCFSATRRYYLGAVELSWDYMQSDLGELPVDARFPPRVPKSFPFNTSVVYKKTLFVEFTDHLFNIAKPRPPWMGLLGPTIQAEVYDTVVITLKNMASHPVSLHAVGVSYWKASEGAEYDDQTSQREKEDDKVFPGGSHTYVWQVLKENGPMASDPPCLTYSYLSHVDLVKDLNSGLIGALLVCREGSLAKEKTQTLHKFILLFAVFDEGKSWHSETKNSLMQDRDAASARAWPKMHTVNGYVNRTLPGLIGCHRKSVYWHVIGMGTTPEVHSIFLEGHTFLVRNHRQASLEISPITFLTAQTLLMDLGQFLLFCHISSHQHDGMEAYVKVDSCPEEPQLRMKNNEEAEDYDDDLTDSEMDVVRFDDDNSPSIIQIRSVAKKHPKTWVHYIAAEEEDWDYAPLVLAPDDRSYKSQYLNNGPQRIGRKYKKVRFMAYTDETFKTREAIQHESGILGPLLYGEVGDTLLIIFKNQASRPYNIYPHGITDVRPLYSRRLPKGVKHLKDFPILPGEIFKYKWTVTVEDGPTKSDPRCLTRYYSSFVNMERDLASGLIGPLLICYKESVDQRGNQIMSDKRNVILFSVFDENRSWYLTENIQRFLPNPAGVQLEDPEFQASNIMHSINGYVFDSLQLSVCLHEVAYWYILSIGAQTDFLSVFFSGYTFKHKMVYEDTLTLFPFSGETVFMSMENPGLWILGCHNSDFRNRGMTALLKVSSCDKNTGDYYEDSYEDISAYLDSKNNAIEPRSFSQNPPVLKRHQREITRTTLQSDQEEWDYDDTISVEMKKEDFDIYDEDENQSPRSFQKKTRHYFIAAVERLWDYGMSSSPHVLRNRAQSGSVPQFKKVVFQEFTDGSFTQPLYRGELNEHLGLLGPYIRAEVEDNIMVTFRNQASRPYSFYSSLISYEEDQRQGAEPRKNFVKPNETKTYFWKVQHHMAPTKDEFDCKAWAYFSDVDLEKDVHSGLIGPLLVCHTNTLNPAHGRQVTVQEFALFFTIFDETKSWYFTENMERNCRAPCNIQMEDPTFKENYRFHAINGYIMDTLPGLVMAQDQRIRWYLLSMGSNENIHSIHFSGHVFTVRKKEEYKMALYNLYPGVFETVEMLPSKAGIWRVECLIGEHLHAGMSTLFLVYSNKCQTPLGMASGHIRDFQITASGQYGQWAPKLARLHYSGSINAWSTKEPFSWIKVDLLAPMIIHGIKTQGARQKFSSLYISQFIIMYSLDGKKWQTYRGNSTGTDMVFFGNVDSSGIKHNIFNPPIIARYIRLHPTHYSIRSTLRMELMGCDLNSCSMPLGMESKAISDAQITASSYFTNMFATWSPSKARLHLQGRSNAWRPQVNNPKEWLQVDFQKTMKVTGVTTQGVKSLDTSMYVKEFLISSSQDGHQWTLFFQNGKVKVFQGNQDSFTPVVNSLDPPLLTRYLRIHPQSWEHQIALRMEVLGCEAQDLY

SEQ ID NO: 915 - DNA, 4371 bp, synthetic construct
  misc_feature 1..4371: note = Variant of human B-domain deleted Factor VIII
  source 1..4371: mol_type = other DNA
atgcagattgaactgtctacctgcttcttcctctgtttgctgaggttctgctttagcgccactagacggtactaccttggcgctgtggagctgtcctgggactatatgcagagtgatttgggagagcttcccgtcgacgcacgatttcctcctcgcgttccaaagtcatttccctttaacacaagcgtggtgtacaagaagacgctcttcgtcgaattcaccgatcacctgttcaatatcgccaaacccagaccaccatggatgggtcttttggggcctaccatacaagcggaggtgtatgacacagttgttatcactctcaagaacatggcttctcatccggtaagtcttcacgcagtgggcgtgtcctactggaaagcttcagaaggagccgagtatgatgatcagacatcccagagggagaaagaagacgacaaggtatttccaggtgggtctcatacctatgtgtggcaagtgctcaaagagaatggccctatggcaagcgatccgccgtgtttgacttacagctacctttcacacgttgacctcgtcaaggacctcaactccgggttgattggagccttgttggtatgcagggaaggatctcttgccaaagagaagacacagaccctccacaagtttatccttctctttgctgtgttcgatgagggcaaaagttggcatagcgaaacgaagaattccctcatgcaggatcgcgacgcagccagcgccagagcttggcccaagatgcacactgtgaacggatatgtcaataggacgcttcctggcttgattgggtgtcatcggaaaagtgtctactggcacgtgatcggaatggggacaacaccagaggtccactccatatttctcgaaggccataccttccttgttcgaaaccacagacaggcatccttggagatctctcccattacctttctcactgcccaaacgctccttatggacttgggtcagttccttctcttctgccatatcagctcacaccagcatgatggtatggaagcttatgtgaaagtcgacagttgtcctgaggagccacagttgcgcatgaagaataatgaagaagccgaggattacgacgacgatctcaccgattctgagatggacgtggtgaggtttgatgacgacaactctccctccatcattcaaatccggagccgggcgaagaaacaccccaagacttgggtccactatatagcggcggaagaggaggattgggattacgctcctcttgtattggcaccagatgaccgctcatacaaaagccagtacctcaacaacggaccgcagagaattggccggaagtataagaaagtgcgatttatggcctatacagacgaaacctttaagacaagggaggccatccagcatgagagtgggattttgggacctcttctttacggcgaagttggtgataccctcctcatcatcttcaagaatcaagcttctcgcccctataacatttacccacacgggatcactgacgttaggcctttgtatagcagaagacttcccaaaggcgtgaagcatctcaaagacttccccattttgccaggcgagatctttaagtacaaatggaccgtcacagtggaagatggaccgactaaatcagaccctcgatgccttacgcggtactattcctccttcgtgaatatggagagagatttggcaagcggactcataggaccactcctcatctgttacaaggaatctgtagaccagaggggtaaccagattatgagtgataaacgcaatgtgatcctttttagcgtcttcgacgagaaccggtcctggtacttgaccgagaatatacaaaggttccttcccaaccccgcaggcgttcagttggaagaccctgagtttcaggccagcaatattatgcactcaatcaacggctatgtgtttgatagtctccagctttctgtttgcctccatgaagtagcctattggtacatcttgtcaattggtgctcaaacagacttcctctccgtcttcttctccggctacacctttaagcacaagatggtgtatgaggacactctcacactctttccattttctggagaaaccgtgttcatgagcatggagaatccaggcctttggatcttgggttgccacaacagtgattttcgcaatcggggaatgactgctctcctcaaagtcagcagctgtgataagaacacaggcgactattacgaagattcttacgaggacataagtgcctacttggactccaagaataacgccattgagcccagatcattctcccagaatcctcccgtgcttaaaaggcatcagcgcgaaatcaccagaactactcttcagtctgatcaagaggagattgactatgacgacaccataagcgtggaaatgaagaaggaggatttcgatatctatgacgaagatgagaaccagtctccgcggagctttcagaagaagacgcgacactacttcattgcagcagtcgaaaggctttgggactacggtatgtcatcatcccctcatgtgttgcgcaatagagctcagagtggaagtgttccacagttcaagaaagtcgtctttcaagagtttacagatggcagcttcacacagcctctctatcggggcgagcttaacgaacatttgggactccttggtccctatatccgagccgaagtggaggacaacattatggttacctttaggaatcaagcctctcgcccctacagcttctactcctccctcatcagttatgaggaggatcagagacaaggcgctgaaccacggaagaactttgtgaaaccgaatgagacgaagacctacttctggaaagtacagcaccacatggcccccacaaaagacgaattcgattgcaaagcatgggcgtatttttcagacgttgacttggagaaagatgtacattcaggacttattggtcctttgttggtgtgtcacactaacactctcaatccagcccatggcaggcaggtgacagtccaggaattcgctcttttctttaccatctttgatgagaccaagtcctggtacttcacggaaaacatggagcgcaattgcagagccccctgtaacatacagatggaggaccctacctttaaggaaaattatcggttccacgcaatcaacggatacattatggatacactccctggccttgtgatggctcaggaccaacgaatcaggtggtacctcctcagcatgggttctaatgagaacatacactccattcacttttcaggacatgtgttcactgtccggaagaaagaagagtataagatggccctctacaatttgtatccaggcgtgtttgagaccgttgaaatgcttccctctaaagctggcatctggagagtagagtgcttgatcggagaacatcttcacgcaggtatgagcaccttgttcctcgtgtacagcaacaaatgtcagaccccacttggcatggccagtggacacattcgcgactttcagatcacagcatctggccagtatggacaatgggccccaaagttggctcgcctccattactccggtagcataaatgcgtggtccactaaagaacctttcagctggattaaggtcgatcttcttgcccccatgatcatccacggcattaagacacagggagcgaggcagaaattctcctccctctacatctcacagttcattattatgtatagtttggacggcaagaagtggcaaacttatagaggtaacagtactggaacagacatggtgttcttcggcaacgttgatagctctggcatcaaacacaacatctttaatcctcccataatagctcggtacatcagattgcatccgacccactacagcattaggagtacactccgaatggagcttatgggttgcgacttgaattcctgttcaatgccactcggaatggagtctaaagccatctctgatgcacagataaccgccagtagctactttacgaacatgtttgctacgtggtcaccctctaaggcaaggcttcatttgcaaggccggtctaatgcctggagacctcaggtgaacaacccgaaagaatggctccaggtggactttcagaagaccatgaaagtaacaggtgtcactactcagggagttaagtccttggatactagcatgtatgtgaaggagttccttatttcctcatcacaagatggccaccagtggaccctcttctttcagaatggtaaggtcaaagtgtttcagggcaatcaagacagcttcacacccgtggtgaacagtcttgatcctccactcttgacacgataccttcgaatccatccacagtcttgggagcaccagattgcattgcgcatggaagtacttggatgcgaggctcaggacctctac

SEQ ID NO: 916 - protein, 1457 aa, synthetic construct
  REGION 1..1457: note = Variant of human B-domain deleted Factor VIII
MQIELSTCFFLCLLRFCFSATRRYYLGAVELSWDYMQSDLGELPVDARFPPRVPKSFPFNTSVVYKKTLFVEFTDHLFNIAKPRPPWMGLLGPTIQAEVYDTVVITLKNMASHPVSLHAVGVSYWKASEGAEYDDQTSQREKEDDKVFPGGSHTYVWQVLKENGPMASDPPCLTYSYLSHVDLVKDLNSGLIGALLVCREGSLAKEKTQTLHKFILLFAVFDEGKSWHSETKNSLMQDRDAASARAWPKMHTVNGYVNRTLPGLIGCHRKSVYWHVIGMGTTPEVHSIFLEGHTFLVRNHRQASLEISPITFLTAQTLLMDLGQFLLFCHISSHQHDGMEAYVKVDSCPEEPQLRMKNNEEAEDYDDDLTDSEMDVVRFDDDNSPSIIQIRSRAKKHPKTWVHYIAAEEEDWDYAPLVLAPDDRSYKSQYLNNGPQRIGRKYKKVRFMAYTDETFKTREAIQHESGILGPLLYGEVGDTLLIIFKNQASRPYNIYPHGITDVRPLYSRRLPKGVKHLKDFPILPGEIFKYKWTVTVEDGPTKSDPRCLTRYYSSFVNMERDLASGLIGPLLICYKESVDQRGNQIMSDKRNVILFSVFDENRSWYLTENIQRFLPNPAGVQLEDPEFQASNIMHSINGYVFDSLQLSVCLHEVAYWYILSIGAQTDFLSVFFSGYTFKHKMVYEDTLTLFPFSGETVFMSMENPGLWILGCHNSDFRNRGMTALLKVSSCDKNTGDYYEDSYEDISAYLDSKNNAIEPRSFSQNPPVLKRHQREITRTTLQSDQEEIDYDDTISVEMKKEDFDIYDEDENQSPRSFQKKTRHYFIAAVERLWDYGMSSSPHVLRNRAQSGSVPQFKKVVFQEFTDGSFTQPLYRGELNEHLGLLGPYIRAEVEDNIMVTFRNQASRPYSFYSSLISYEEDQRQGAEPRKNFVKPNETKTYFWKVQHHMAPTKDEFDCKAWAYFSDVDLEKDVHSGLIGPLLVCHTNTLNPAHGRQVTVQEFALFFTIFDETKSWYFTENMERNCRAPCNIQMEDPTFKENYRFHAINGYIMDTLPGLVMAQDQRIRWYLLSMGSNENIHSIHFSGHVFTVRKKEEYKMALYNLYPGVFETVEMLPSKAGIWRVECLIGEHLHAGMSTLFLVYSNKCQTPLGMASGHIRDFQITASGQYGQWAPKLARLHYSGSINAWSTKEPFSWIKVDLLAPMIIHGIKTQGARQKFSSLYISQFIIMYSLDGKKWQTYRGNSTGTDMVFFGNVDSSGIKHNIFNPPIIARYIRLHPTHYSIRSTLRMELMGCDLNSCSMPLGMESKAISDAQITASSYFTNMFATWSPSKARLHLQGRSNAWRPQVNNPKEWLQVDFQKTMKVTGVTTQGVKSLDTSMYVKEFLISSSQDGHQWTLFFQNGKVKVFQGNQDSFTPVVNSLDPPLLTRYLRIHPQSWEHQIALRMEVLGCEAQDLY

SEQ ID NO: 917 - DNA, 4371 bp, synthetic construct
  misc_feature 1..4371: note = Variant of human B-domain deleted Factor VIII
  source 1..4371: mol_type = other DNA
atgcagattgaactgtctacctgcttcttcctctgtttgctgaggttctgctttagcgccactagacggtactaccttggcgctgtggagctgtcctgggactatatgcagagtgatttgggagagcttcccgtcgacgcacgatttcctcctcgcgttccaaagtcatttccctttaacacaagcgtggtgtacaagaagacgctcttcgtcgaattcaccgatcacctgttcaatatcgccaaacccagaccaccatggatgggtcttttggggcctaccatacaagcggaggtgtatgacacagttgttatcactctcaagaacatggcttctcatccggtaagtcttcacgcagtgggcgtgtcctactggaaagcttcagaaggagccgagtatgatgatcagacatcccagagggagaaagaagacgacaaggtatttccaggtgggtctcatacctatgtgtggcaagtgctcaaagagaatggccctatggcaagcgatccgccgtgtttgacttacagctacctttcacacgttgacctcgtcaaggacctcaactccgggttgattggagccttgttggtatgcagggaaggatctcttgccaaagagaagacacagaccctccacaagtttatccttctctttgctgtgttcgatgagggcaaaagttggcatagcgaaacgaagaattccctcatgcaggatcgcgacgcagccagcgccagagcttggcccaagatgcacactgtgaacggatatgtcaataggacgcttcctggcttgattgggtgtcatcggaaaagtgtctactggcacgtgatcggaatggggacaacaccagaggtccactccatatttctcgaaggccataccttccttgttcgaaaccacagacaggcatccttggagatctctcccattacctttctcactgcccaaacgctccttatggacttgggtcagttccttctcttctgccatatcagctcacaccagcatgatggtatggaagcttatgtgaaagtcgacagttgtcctgaggagccacagttgcgcatgaagaataatgaagaagccgaggattacgacgacgatctcaccgattctgagatggacgtggtgaggtttgatgacgacaactctccctccatcattcaaatccggagcgtggcgaagaaacaccccaagacttgggtccactatatagcggcggaagaggaggattgggattacgctcctcttgtattggcaccagatgaccgctcatacaaaagccagtacctcaacaacggaccgcagagaattggccggaagtataagaaagtgcgatttatggcctatacagacgaaacctttaagacaagggaggccatccagcatgagagtgggattttgggacctcttctttacggcgaagttggtgataccctcctcatcatcttcaagaatcaagcttctcgcccctataacatttacccacacgggatcactgacgttaggcctttgtatagcagaagacttcccaaaggcgtgaagcatctcaaagacttccccattttgccaggcgagatctttaagtacaaatggaccgtcacagtggaagatggaccgactaaatcagaccctcgatgccttacgcggtactattcctccttcgtgaatatggagagagatttggcaagcggactcataggaccactcctcatctgttacaaggaatctgtagaccagaggggtaaccagattatgagtgataaacgcaatgtgatcctttttagcgtcttcgacgagaaccggtcctggtacttgaccgagaatatacaaaggttccttcccaaccccgcaggcgttcagttggaagaccctgagtttcaggccagcaatattatgcactcaatcaacggctatgtgtttgatagtctccagctttctgtttgcctccatgaagtagcctattggtacatcttgtcaattggtgctcaaacagacttcctctccgtcttcttctccggctacacctttaagcacaagatggtgtatgaggacactctcacactctttccattttctggagaaaccgtgttcatgagcatggagaatccaggcctttggatcttgggttgccacaacagtgattttcgcaatcggggaatgactgctctcctcaaagtcagcagctgtgataagaacacaggcgactattacgaagattcttacgaggacataagtgcctacttggactccaagaataacgccattgagcccagatcattctcccagaatcctcccgtgcttaaaaggcatcagcgcgaaatcaccagaactactcttcagtctgatcaagaggagattgactatgacgacaccataagcgtggaaatgaagaaggaggatgtggatatctatgacgaagatgagaaccagtctccgcggagctttcagaagaagacgcgacactacttcattgcagcagtcgaaaggctttgggactacggtatgtcatcatcccctcatgtgttgcgcaatagagctcagagtggaagtgttccacagttcaagaaagtcgtctttcaagagtttacagatggcagcttcacacagcctctctatcggggcgagcttaacgaacatttgggactccttggtccctatatccgagccgaagtggaggacaacattatggttacctttaggaatcaagcctctcgcccctacagcttctactcctccctcatcagttatgaggaggatcagagacaaggcgctgaaccacggaagaactttgtgaaaccgaatgagacgaagacctacttctggaaagtacagcaccacatggcccccacaaaagacgaattcgattgcaaagcatgggcgtatttttcagacgttgacttggagaaagatgtacattcaggacttattggtcctttgttggtgtgtcacactaacactctcaatccagcccatggcaggcaggtgacagtccaggaattcgctcttttctttaccatctttgatgagaccaagtcctggtacttcacggaaaacatggagcgcaattgcagagccccctgtaacatacagatggaggaccctacctttaaggaaaattatcggttccacgcaatcaacggatacattatggatacactccctggccttgtgatggctcaggaccaacgaatcaggtggtacctcctcagcatgggttctaatgagaacatacactccattcacttttcaggacatgtgttcactgtccggaagaaagaagagtataagatggccctctacaatttgtatccaggcgtgtttgagaccgttgaaatgcttccctctaaagctggcatctggagagtagagtgcttgatcggagaacatcttcacgcaggtatgagcaccttgttcctcgtgtacagcaacaaatgtcagaccccacttggcatggccagtggacacattcgcgactttcagatcacagcatctggccagtatggacaatgggccccaaagttggctcgcctccattactccggtagcataaatgcgtggtccactaaagaacctttcagctggattaaggtcgatcttcttgcccccatgatcatccacggcattaagacacagggagcgaggcagaaattctcctccctctacatctcacagttcattattatgtatagtttggacggcaagaagtggcaaacttatagaggtaacagtactggaacagacatggtgttcttcggcaacgttgatagctctggcatcaaacacaacatctttaatcctcccataatagctcggtacatcagattgcatccgacccactacagcattaggagtacactccgaatggagcttatgggttgcgacttgaattcctgttcaatgccactcggaatggagtctaaagccatctctgatgcacagataaccgccagtagctactttacgaacatgtttgctacgtggtcaccctctaaggcaaggcttcatttgcaaggccggtctaatgcctggagacctcaggtgaacaacccgaaagaatggctccaggtggactttcagaagaccatgaaagtaacaggtgtcactactcagggagttaagtccttggatactagcatgtatgtgaaggagttccttatttcctcatcacaagatggccaccagtggaccctcttctttcagaatggtaaggtcaaagtgtttcagggcaatcaagacagcttcacacccgtggtgaacagtcttgatcctccactcttgacacgataccttcgaatccatccacagtcttgggagcaccagattgcattgcgcatggaagtacttggatgcgaggctcaggacctctac

SEQ ID NO: 918 - protein, 1457 aa, synthetic construct
  REGION 1..1457: note = Variant of human B-domain deleted Factor VIII
MQIELSTCFFLCLLRFCFSATRRYYLGAVELSWDYMQSDLGELPVDARFPPRVPKSFPFNTSVVYKKTLFVEFTDHLFNIAKPRPPWMGLLGPTIQAEVYDTVVITLKNMASHPVSLHAVGVSYWKASEGAEYDDQTSQREKEDDKVFPGGSHTYVWQVLKENGPMASDPPCLTYSYLSHVDLVKDLNSGLIGALLVCREGSLAKEKTQTLHKFILLFAVFDEGKSWHSETKNSLMQDRDAASARAWPKMHTVNGYVNRTLPGLIGCHRKSVYWHVIGMGTTPEVHSIFLEGHTFLVRNHRQASLEISPITFLTAQTLLMDLGQFLLFCHISSHQHDGMEAYVKVDSCPEEPQLRMKNNEEAEDYDDDLTDSEMDVVRFDDDNSPSIIQIRSVAKKHPKTWVHYIAAEEEDWDYAPLVLAPDDRSYKSQYLNNGPQRIGRKYKKVRFMAYTDETFKTREAIQHESGILGPLLYGEVGDTLLIIFKNQASRPYNIYPHGITDVRPLYSRRLPKGVKHLKDFPILPGEIFKYKWTVTVEDGPTKSDPRCLTRYYSSFVNMERDLASGLIGPLLICYKESVDQRGNQIMSDKRNVILFSVFDENRSWYLTENIQRFLPNPAGVQLEDPEFQASNIMHSINGYVFDSLQLSVCLHEVAYWYILSIGAQTDFLSVFFSGYTFKHKMVYEDTLTLFPFSGETVFMSMENPGLWILGCHNSDFRNRGMTALLKVSSCDKNTGDYYEDSYEDISAYLDSKNNAIEPRSFSQNPPVLKRHQREITRTTLQSDQEEIDYDDTISVEMKKEDVDIYDEDENQSPRSFQKKTRHYFIAAVERLWDYGMSSSPHVLRNRAQSGSVPQFKKVVFQEFTDGSFTQPLYRGELNEHLGLLGPYIRAEVEDNIMVTFRNQASRPYSFYSSLISYEEDQRQGAEPRKNFVKPNETKTYFWKVQHHMAPTKDEFDCKAWAYFSDVDLEKDVHSGLIGPLLVCHTNTLNPAHGRQVTVQEFALFFTIFDETKSWYFTENMERNCRAPCNIQMEDPTFKENYRFHAINGYIMDTLPGLVMAQDQRIRWYLLSMGSNENIHSIHFSGHVFTVRKKEEYKMALYNLYPGVFETVEMLPSKAGIWRVECLIGEHLHAGMSTLFLVYSNKCQTPLGMASGHIRDFQITASGQYGQWAPKLARLHYSGSINAWSTKEPFSWIKVDLLAPMIIHGIKTQGARQKFSSLYISQFIIMYSLDGKKWQTYRGNSTGTDMVFFGNVDSSGIKHNIFNPPIIARYIRLHPTHYSIRSTLRMELMGCDLNSCSMPLGMESKAISDAQITASSYFTNMFATWSPSKARLHLQGRSNAWRPQVNNPKEWLQVDFQKTMKVTGVTTQGVKSLDTSMYVKEFLISSSQDGHQWTLFFQNGKVKVFQGNQDSFTPVVNSLDPPLLTRYLRIHPQSWEHQIALRMEVLGCEAQDLY

SEQ ID NO: 919 - DNA, 4371 bp, synthetic construct
  misc_feature 1..4371: note = Variant of human B-domain deleted Factor VIII
  source 1..4371: mol_type = other DNA
atgcagattgaactgtctacctgcttcttcctctgtttgctgaggttctgctttagcgccactagacggtactaccttggcgctgtggagctgtcctgggactatatgcagagtgatttgggagagcttcccgtcgacgcacgatttcctcctcgcgttccaaagtcatttccctttaacacaagcgtggtgtacaagaagacgctcttcgtcgaattcaccgatcacctgttcaatatcgccaaacccagaccaccatggatgggtcttttggggcctaccatacaagcggaggtgtatgacacagttgttatcactctcaagaacatggcttctcatccggtaagtcttcacgcagtgggcgtgtcctactggaaagcttcagaaggagccgagtatgatgatcagacatcccagagggagaaagaagacgacaaggtatttccaggtgggtctcatacctatgtgtggcaagtgctcaaagagaatggccctatggcaagcgatccgccgtgtttgacttacagctacctttcacacgttgacctcgtcaaggacctcaactccgggttgattggagccttgttggtatgcagggaaggatctcttgccaaagagaagacacagaccctccacaagtttatccttctctttgctgtgttcgatgagggcaaaagttggcatagcgaaacgaagaattccctcatgcaggatcgcgacgcagccagcgccagagcttggcccaagatgcacactgtgaacggatatgtcaataggacgcttcctggcttgattgggtgtcatcggaaaagtgtctactggcacgtgatcggaatggggacaacaccagaggtccactccatatttctcgaaggccataccttccttgttcgaaaccacagacaggcatccttggagatctctcccattacctttctcactgcccaaacgctccttatggacttgggtcagttccttctcttctgccatatcagctcacaccagcatgatggtatggaagcttatgtgaaagtcgacagttgtcctgaggagccacagttgcgcatgaagaataatgaagaagccgaggattacgacgacgatctcaccgattctgagatggacgtggtgaggtttgatgacgacaactctccctccatcattcaaatccggagcgtggcgaagaaacaccccaagacttgggtccactatatagcggcggaagaggaggattgggattacgctcctcttgtattggcaccagatgaccgctcatacaaaagccagtacctcaacaacggaccgcagagaattggccggaagtataagaaagtgcgatttatggcctatacagacgaaacctttaagacaagggaggccatccagcatgagagtgggattttgggacctcttctttacggcgaagttggtgataccctcctcatcatcttcaagaatcaagcttctcgcccctataacatttacccacacgggatcactgacgttaggcctttgtatagcagaagacttcccaaaggcgtgaagcatctcaaagacttccccattttgccaggcgagatctttaagtacaaatggaccgtcacagtggaagatggaccgactaaatcagaccctcgatgccttacgcggtactattcctccttcgtgaatatggagagagatttggcaagcggactcataggaccactcctcatctgttacaaggaatctgtagaccagaggggtaaccagattatgagtgataaacgcaatgtgatcctttttagcgtcttcgacgagaaccggtcctggtacttgaccgagaatatacaaaggttccttcccaaccccgcaggcgttcagttggaagaccctgagtttcaggccagcaatattatgcactcaatcaacggctatgtgtttgatagtctccagctttctgtttgcctccatgaagtagcctattggtacatcttgtcaattggtgctcaaacagacttcctctccgtcttcttctccggctacacctttaagcacaagatggtgtatgaggacactctcacactctttccattttctggagaaaccgtgttcatgagcatggagaatccaggcctttggatcttgggttgccacaacagtgattttcgcaatcggggaatgactgctctcctcaaagtcagcagctgtgataagaacacaggcgactattacgaagattcttacgaggacataagtgcctacttggactccaagaataacgccattgagcccagatcattctcccagaatcctcccgtgcttaaaaggcatcagcgcgaagagaccagaactactcttcagtctgatcaagaggagattgactatgacgacaccataagcgtggaaatgaagaaggaggatttcgatatctatgacgaagatgagaaccagtctccgcggagctttcagaagaagacgcgacactacttcattgcagcagtcgaaaggctttgggactacggtatgtcatcatcccctcatgtgttgcgcaatagagctcagagtggaagtgttccacagttcaagaaagtcgtctttcaagagtttacagatggcagcttcacacagcctctctatcggggcgagcttaacgaacatttgggactccttggtccctatatccgagccgaagtggaggacaacattatggttacctttaggaatcaagcctctcgcccctacagcttctactcctccctcatcagttatgaggaggatcagagacaaggcgctgaaccacggaagaactttgtgaaaccgaatgagacgaagacctacttctggaaagtacagcaccacatggcccccacaaaagacgaattcgattgcaaagcatgggcgtatttttcagacgttgacttggagaaagatgtacattcaggacttattggtcctttgttggtgtgtcacactaacactctcaatccagcccatggcaggcaggtgacagtccaggaattcgctcttttctttaccatctttgatgagaccaagtcctggtacttcacggaaaacatggagcgcaattgcagagccccctgtaacatacagatggaggaccctacctttaaggaaaattatcggttccacgcaatcaacggatacattatggatacactccctggccttgtgatggctcaggaccaacgaatcaggtggtacctcctcagcatgggttctaatgagaacatacactccattcacttttcaggacatgtgttcactgtccggaagaaagaagagtataagatggccctctacaatttgtatccaggcgtgtttgagaccgttgaaatgcttccctctaaagctggcatctggagagtagagtgcttgatcggagaacatcttcacgcaggtatgagcaccttgttcctcgtgtacagcaacaaatgtcagaccccacttggcatggccagtggacacattcgcgactttcagatcacagcatctggccagtatggacaatgggccccaaagttggctcgcctccattactccggtagcataaatgcgtggtccactaaagaacctttcagctggattaaggtcgatcttcttgcccccatgatcatccacggcattaagacacagggagcgaggcagaaattctcctccctctacatctcacagttcattattatgtatagtttggacggcaagaagtggcaaacttatagaggtaacagtactggaacagacatggtgttcttcggcaacgttgatagctctggcatcaaacacaacatctttaatcctcccataatagctcggtacatcagattgcatccgacccactacagcattaggagtacactccgaatggagcttatgggttgcgacttgaattcctgttcaatgccactcggaatggagtctaaagccatctctgatgcacagataaccgccagtagctactttacgaacatgtttgctacgtggtcaccctctaaggcaaggcttcatttgcaaggccggtctaatgcctggagacctcaggtgaacaacccgaaagaatggctccaggtggactttcagaagaccatgaaagtaacaggtgtcactactcagggagttaagtccttggatactagcatgtatgtgaaggagttccttatttcctcatcacaagatggccaccagtggaccctcttctttcagaatggtaaggtcaaagtgtttcagggcaatcaagacagcttcacacccgtggtgaacagtcttgatcctccactcttgacacgataccttcgaatccatccacagtcttgggagcaccagattgcattgcgcatggaagtacttggatgcgaggctcaggacctctac

SEQ ID NO: 920 - protein, 1457 aa, synthetic construct
  REGION 1..1457: note = Variant of human B-domain deleted Factor VIII
MQIELSTCFFLCLLRFCFSATRRYYLGAVELSWDYMQSDLGELPVDARFPPRVPKSFPFNTSVVYKKTLFVEFTDHLFNIAKPRPPWMGLLGPTIQAEVYDTVVITLKNMASHPVSLHAVGVSYWKASEGAEYDDQTSQREKEDDKVFPGGSHTYVWQVLKENGPMASDPPCLTYSYLSHVDLVKDLNSGLIGALLVCREGSLAKEKTQTLHKFILLFAVFDEGKSWHSETKNSLMQDRDAASARAWPKMHTVNGYVNRTLPGLIGCHRKSVYWHVIGMGTTPEVHSIFLEGHTFLVRNHRQASLEISPITFLTAQTLLMDLGQFLLFCHISSHQHDGMEAYVKVDSCPEEPQLRMKNNEEAEDYDDDLTDSEMDVVRFDDDNSPSIIQIRSVAKKHPKTWVHYIAAEEEDWDYAPLVLAPDDRSYKSQYLNNGPQRIGRKYKKVRFMAYTDETFKTREAIQHESGILGPLLYGEVGDTLLIIFKNQASRPYNIYPHGITDVRPLYSRRLPKGVKHLKDFPILPGEIFKYKWTVTVEDGPTKSDPRCLTRYYSSFVNMERDLASGLIGPLLICYKESVDQRGNQIMSDKRNVILFSVFDENRSWYLTENIQRFLPNPAGVQLEDPEFQASNIMHSINGYVFDSLQLSVCLHEVAYWYILSIGAQTDFLSVFFSGYTFKHKMVYEDTLTLFPFSGETVFMSMENPGLWILGCHNSDFRNRGMTALLKVSSCDKNTGDYYEDSYEDISAYLDSKNNAIEPRSFSQNPPVLKRHQREETRTTLQSDQEEIDYDDTISVEMKKEDFDIYDEDENQSPRSFQKKTRHYFIAAVERLWDYGMSSSPHVLRNRAQSGSVPQFKKVVFQEFTDGSFTQPLYRGELNEHLGLLGPYIRAEVEDNIMVTFRNQASRPYSFYSSLISYEEDQRQGAEPRKNFVKPNETKTYFWKVQHHMAPTKDEFDCKAWAYFSDVDLEKDVHSGLIGPLLVCHTNTLNPAHGRQVTVQEFALFFTIFDETKSWYFTENMERNCRAPCNIQMEDPTFKENYRFHAINGYIMDTLPGLVMAQDQRIRWYLLSMGSNENIHSIHFSGHVFTVRKKEEYKMALYNLYPGVFETVEMLPSKAGIWRVECLIGEHLHAGMSTLFLVYSNKCQTPLGMASGHIRDFQITASGQYGQWAPKLARLHYSGSINAWSTKEPFSWIKVDLLAPMIIHGIKTQGARQKFSSLYISQFIIMYSLDGKKWQTYRGNSTGTDMVFFGNVDSSGIKHNIFNPPIIARYIRLHPTHYSIRSTLRMELMGCDLNSCSMPLGMESKAISDAQITASSYFTNMFATWSPSKARLHLQGRSNAWRPQVNNPKEWLQVDFQKTMKVTGVTTQGVKSLDTSMYVKEFLISSSQDGHQWTLFFQNGKVKVFQGNQDSFTPVVNSLDPPLLTRYLRIHPQSWEHQIALRMEVLGCEAQDLY

SEQ ID NO: 921 - DNA, 4371 bp, synthetic construct
  misc_feature 1..4371: note = Variant of human B-domain deleted Factor VIII
  source 1..4371: mol_type = other DNA
atgcagattgaactgtctacctgcttcttcctctgtttgctgaggttctgctttagcgccactagacggtactaccttggcgctgtggagctgtcctgggactatatgcagagtgatttgggagagcttcccgtcgacgcacgatttcctcctcgcgttccaaagtcatttccctttaacacaagcgtggtgtacaagaagacgctcttcgtcgaattcaccgatcacctgttcaatatcgccaaacccagaccaccatggatgggtcttttggggcctaccatacaagcggaggtgtatgacacagttgttatcactctcaagaacatggcttctcatccggtaagtcttcacgcagtgggcgtgtcctactggaaagcttcagaaggagccgagtatgatgatcagacatcccagagggagaaagaagacgacaaggtatttccaggtgggtctcatacctatgtgtggcaagtgctcaaagagaatggccctatggcaagcgatccgccgtgtttgacttacagctacctttcacacgttgacctcgtcaaggacctcaactccgggttgattggagccttgttggtatgcagggaaggatctcttgccaaagagaagacacagaccctccacaagtttatccttctctttgctgtgttcgatgagggcaaaagttggcatagcgaaacgaagaattccctcatgcaggatcgcgacgcagccagcgccagagcttggcccaagatgcacactgtgaacggatatgtcaataggacgcttcctggcttgattgggtgtcatcggaaaagtgtctactggcacgtgatcggaatggggacaacaccagaggtccactccatatttctcgaaggccataccttccttgttcgaaaccacagacaggcatccttggagatctctcccattacctttctcactgcccaaacgctccttatggacttgggtcagttccttctcttctgccatatcagctcacaccagcatgatggtatggaagcttatgtgaaagtcgacagttgtcctgaggagccacagttgcgcatgaagaataatgaagaagccgaggattacgacgacgatctcaccgattctgagatggacgtggtgaggtttgatgacgacaactctccctccatcattcaaatccggagcgtggcgaagaaacaccccaagacttgggtccactatatagcggcggaagaggaggattgggattacgctcctcttgtattggcaccagatgaccgctcatacaaaagccagtacctcaacaacggaccgcagagaattggccggaagtataagaaagtgcgatttatggcctatacagacgaaacctttaagacaagggaggccatccagcatgagagtgggattttgggacctcttctttacggcgaagttggtgataccctcctcatcatcttcaagaatcaagcttctcgcccctataacatttacccacacgggatcactgacgttaggcctttgtatagcagaagacttcccaaaggcgtgaagcatctcaaagacttccccattttgccaggcgagatctttaagtacaaatggaccgtcacagtggaagatggaccgactaaatcagaccctcgatgccttacgcggtactattcctccttcgtgaatatggagagagatttggcaagcggactcataggaccactcctcatctgttacaaggaatctgtagaccagaggggtaaccagattatgagtgataaacgcaatgtgatcctttttagcgtcttcgacgagaaccggtcctggtacttgaccgagaatatacaaaggttccttcccaaccccgcaggcgttcagttggaagaccctgagtttcaggccagcaatattatgcactcaatcaacggctatgtgtttgatagtctccagctttctgtttgcctccatgaagtagcctattggtacatcttgtcaattggtgctcaaacagacttcctctccgtcttcttctccggctacacctttaagcacaagatggtgtatgaggacactctcacactctttccattttctggagaaaccgtgttcatgagcatggagaatccaggcctttggatcttgggttgccacaacagtgattttcgcaatcggggaatgactgctctcctcaaagtcagcagctgtgataagaacacaggcgactattacgaagattcttacgaggacataagtgcctacttggactccaagaataacgccattgagcccagatcattctcccagaatcctcccgtgcttaaaaggcatcagcgcgaaatcaccagaactactcttcagtctgatcaagaggagattgactatgacgacaccataagcgtggaaatgaagaaggaggatttcgatatctatgacgaagatgagaaccagtctccgcggagctttcagaagaagacgcgacactacttcattgcagcagtcgaaaggctttgggactacggtatgtcatcatcccctcatgtgttgcgcaatagagctcagagtggaagtgttccacagttcaagaaagtcgtctttcaagagtttacagatggcagcttcacacagcctctctatcggggcgagcttaacgaacatttgggactccttggtccctatatccgagccgaagtggaggacaacattatggttacctttaggaatcaagcctctcgcccctacagcttctactcctccctcatcagttatgaggaggatcagagacaacctgctgaaccacggaagaactttgtgaaaccgaatgagacgaagacctacttctggaaagtacagcaccacatggcccccacaaaagacgaattcgattgcaaagcatgggcgtatttttcagacgttgacttggagaaagatgtacattcaggacttattggtcctttgttggtgtgtcacactaacactctcaatccagcccatggcaggcaggtgacagtccaggaattcgctcttttctttaccatctttgatgagaccaagtcctggtacttcacggaaaacatggagcgcaattgcagagccccctgtaacatacagatggaggaccctacctttaaggaaaattatcggttccacgcaatcaacggatacattatggatacactccctggccttgtgatggctcaggaccaacgaatcaggtggtacctcctcagcatgggttctaatgagaacatacactccattcacttttcaggacatgtgttcactgtccggaagaaagaagagtataagatggccctctacaatttgtatccaggcgtgtttgagaccgttgaaatgcttccctctaaagctggcatctggagagtagagtgcttgatcggagaacatcttcacgcaggtatgagcaccttgttcctcgtgtacagcaacaaatgtcagaccccacttggcatggccagtggacacattcgcgactttcagatcacagcatctggccagtatggacaatgggccccaaagttggctcgcctccattactccggtagcataaatgcgtggtccactaaagaacctttcagctggattaaggtcgatcttcttgcccccatgatcatccacggcattaagacacagggagcgaggcagaaattctcctccctctacatctcacagttcattattatgtatagtttggacggcaagaagtggcaaacttatagaggtaacagtactggaacagacatggtgttcttcggcaacgttgatagctctggcatcaaacacaacatctttaatcctcccataatagctcggtacatcagattgcatccgacccactacagcattaggagtacactccgaatggagcttatgggttgcgacttgaattcctgttcaatgccactcggaatggagtctaaagccatctctgatgcacagataaccgccagtagctactttacgaacatgtttgctacgtggtcaccctctaaggcaaggcttcatttgcaaggccggtctaatgcctggagacctcaggtgaacaacccgaaagaatggctccaggtggactttcagaagaccatgaaagtaacaggtgtcactactcagggagttaagtccttggatactagcatgtatgtgaaggagttccttatttcctcatcacaagatggccaccagtggaccctcttctttcagaatggtaaggtcaaagtgtttcagggcaatcaagacagcttcacacccgtggtgaacagtcttgatcctccactcttgacacgataccttcgaatccatccacagtcttgggagcaccagattgcattgcgcatggaagtacttggatgcgaggctcaggacctctac

SEQ ID NO: 922 - protein, 1457 aa, synthetic construct
  REGION 1..1457: note = Variant of human B-domain deleted Factor VIII
MQIELSTCFFLCLLRFCFSATRRYYLGAVELSWDYMQSDLGELPVDARFPPRVPKSFPFNTSVVYKKTLFVEFTDHLFNIAKPRPPWMGLLGPTIQAEVYDTVVITLKNMASHPVSLHAVGVSYWKASEGAEYDDQTSQREKEDDKVFPGGSHTYVWQVLKENGPMASDPPCLTYSYLSHVDLVKDLNSGLIGALLVCREGSLAKEKTQTLHKFILLFAVFDEGKSWHSETKNSLMQDRDAASARAWPKMHTVNGYVNRTLPGLIGCHRKSVYWHVIGMGTTPEVHSIFLEGHTFLVRNHRQASLEISPITFLTAQTLLMDLGQFLLFCHISSHQHDGMEAYVKVDSCPEEPQLRMKNNEEAEDYDDDLTDSEMDVVRFDDDNSPSIIQIRSVAKKHPKTWVHYIAAEEEDWDYAPLVLAPDDRSYKSQYLNNGPQRIGRKYKKVRFMAYTDETFKTREAIQHESGILGPLLYGEVGDTLLIIFKNQASRPYNIYPHGITDVRPLYSRRLPKGVKHLKDFPILPGEIFKYKWTVTVEDGPTKSDPRCLTRYYSSFVNMERDLASGLIGPLLICYKESVDQRGNQIMSDKRNVILFSVFDENRSWYLTENIQRFLPNPAGVQLEDPEFQASNIMHSINGYVFDSLQLSVCLHEVAYWYILSIGAQTDFLSVFFSGYTFKHKMVYEDTLTLFPFSGETVFMSMENPGLWILGCHNSDFRNRGMTALLKVSSCDKNTGDYYEDSYEDISAYLDSKNNAIEPRSFSQNPPVLKRHQREITRTTLQSDQEEIDYDDTISVEMKKEDFDIYDEDENQSPRSFQKKTRHYFIAAVERLWDYGMSSSPHVLRNRAQSGSVPQFKKVVFQEFTDGSFTQPLYRGELNEHLGLLGPYIRAEVEDNIMVTFRNQASRPYSFYSSLISYEEDQRQPAEPRKNFVKPNETKTYFWKVQHHMAPTKDEFDCKAWAYFSDVDLEKDVHSGLIGPLLVCHTNTLNPAHGRQVTVQEFALFFTIFDETKSWYFTENMERNCRAPCNIQMEDPTFKENYRFHAINGYIMDTLPGLVMAQDQRIRWYLLSMGSNENIHSIHFSGHVFTVRKKEEYKMALYNLYPGVFETVEMLPSKAGIWRVECLIGEHLHAGMSTLFLVYSNKCQTPLGMASGHIRDFQITASGQYGQWAPKLARLHYSGSINAWSTKEPFSWIKVDLLAPMIIHGIKTQGARQKFSSLYISQFIIMYSLDGKKWQTYRGNSTGTDMVFFGNVDSSGIKHNIFNPPIIARYIRLHPTHYSIRSTLRMELMGCDLNSCSMPLGMESKAISDAQITASSYFTNMFATWSPSKARLHLQGRSNAWRPQVNNPKEWLQVDFQKTMKVTGVTTQGVKSLDTSMYVKEFLISSSQDGHQWTLFFQNGKVKVFQGNQDSFTPVVNSLDPPLLTRYLRIHPQSWEHQIALRMEVLGCEAQDLY

SEQ ID NO: 923 - DNA, 4371 bp, synthetic construct
  misc_feature 1..4371: note = Variant of human B-domain deleted Factor VIII
  source 1..4371: mol_type = other DNA
atgcagattgaactgtctacctgcttcttcctctgtttgctgaggttctgctttagcgccactagacggtactaccttggcgctgtggagctgtcctgggactatatgcagagtgatttgggagagcttcccgtcgacgcacgatttcctcctcgcgttccaaagtcatttccctttaacacaagcgtggtgtacaagaagacgctcttcgtcgaattcaccgatcacctgttcaatatcgccaaacccagaccaccatggatgggtcttttggggcctaccatacaagcggaggtgtatgacacagttgttatcactctcaagaacatggcttctcatccggtaagtcttcacgcagtgggcgtgtcctactggaaagcttcagaaggagccgagtatgatgatcagacatcccagagggagaaagaagacgacaaggtatttccaggtgggtctcatacctatgtgtggcaagtgctcaaagagaatggccctatggcaagcgatccgccgtgtttgacttacagctacctttcacacgttgacctcgtcaaggacctcaactccgggttgattggagccttgttggtatgcagggaaggatctcttgccaaagagaagacacagaccctccacaagtttatccttctctttgctgtgttcgatgagggcaaaagttggcatagcgaaacgaagaattccctcatgcaggatcgcgacgcagccagcgccagagcttggcccaagatgcacactgtgaacggatatgtcaataggacgcttcctggcttgattgggtgtcatcggaaaagtgtctactggcacgtgatcggaatggggacaacaccagaggtccactccatatttctcgaaggccataccttccttgttcgaaaccacagacaggcatccttggagatctctcccattacctttctcactgcccaaacgctccttatggacttgggtcagttccttctcttctgccatatcagctcacaccagcatgatggtatggaagcttatgtgaaagtcgacagttgtcctgaggagccacagttgcgcatgaagaataatgaagaagccgaggattacgacgacgatctcaccgattctgagatggacgtggtgaggtttgatgacgacaactctccctccatcattcaaatccggagcgtggcgaagaaacaccccaagacttgggtccactatatagcggcggaagaggaggattgggattacgctcctcttgtattggcaccagatgaccgctcatacaaaagccagtacctcaacaacggaccgcagagaattggccggaagtataagaaagtgcgatttatggcctatacagacgaaacctttaagacaagggaggccatccagcatgagagtgggattttgggacctcttctttacggcgaagttggtgataccctcctcatcatcttcaagaatcaagcttctcgcccctataacatttacccacacgggatcactgacgttaggcctttgtatagcagaagacttcccaaaggcgtgaagcatctcaaagacttccccattttgccaggcgagatctttaagtacaaatggaccgtcacagtggaagatggaccgactaaatcagaccctcgatgccttacgcggtactattcctccttcgtgaatatggagagagatttggcaagcggactcataggaccactcctcatctgttacaaggaatctgtagaccagaggggtaaccagattatgagtgataaacgcaatgtgatcctttttagcgtcttcgacgagaaccggtcctggtacttgaccgagaatatacaaaggttccttcccaaccccgcaggcgttcagttggaagaccctgagtttcaggccagcaatattatgcactcaatcaacggctatgtgtttgatagtctccagctttctgtttgcctccatgaagtagcctattggtacatcttgtcaattggtgctcaaacagacttcctctccgtcttcttctccggctacacctttaagcacaagatggtgtatgaggacactctcacactctttccattttctggagaaaccgtgttcatgagcatggagaatccaggcctttggatcttgggttgccacaacagtgattttcgcaatcggggaatgactgctctcctcaaagtcagcagctgtgatgggaacacaggcgactattacgaagattcttacgaggacataagtgcctacttggactccaagaataacgccattgagcccagatcattctcccagaatcctcccgtgcttaaaaggcatcagcgcgaaatcaccagaactactcttcagtctgatcaagaggagattgactatgacgacaccataagcgtggaaatgaagaaggaggatttcgatatctatgacgaagatgagaaccagtctccgcggagctttcagaagaagacgcgacactacttcattgcagcagtcgaaaggctttgggactacggtatgtcatcatcccctcatgtgttgcgcaatagagctcagagtggaagtgttccacagttcaagaaagtcgtctttcaagagtttacagatggcagcttcacacagcctctctatcggggcgagcttaacgaacatttgggactccttggtccctatatccgagccgaagtggaggacaacattatggttacctttaggaatcaagcctctcgcccctacagcttctactcctccctcatcagttatgaggaggatcagagacaaggcgctgaaccacggaagaactttgtgaaaccgaatgagacgaagacctacttctggaaagtacagcaccacatggcccccacaaaagacgaattcgattgcaaagcatgggcgtatttttcagacgttgacttggagaaagatgtacattcaggacttattggtcctttgttggtgtgtcacactaacactctcaatccagcccatggcaggcaggtgacagtccaggaattcgctcttttctttaccatctttgatgagaccaagtcctggtacttcacggaaaacatggagcgcaattgcagagccccctgtaacatacagatggaggaccctacctttaaggaaaattatcggttccacgcaatcaacggatacattatggatacactccctggccttgtgatggctcaggaccaacgaatcaggtggtacctcctcagcatgggttctaatgagaacatacactccattcacttttcaggacatgtgttcactgtccggaagaaagaagagtataagatggccctctacaatttgtatccaggcgtgtttgagaccgttgaaatgcttccctctaaagctggcatctggagagtagagtgcttgatcggagaacatcttcacgcaggtatgagcaccttgttcctcgtgtacagcaacaaatgtcagaccccacttggcatggccagtggacacattcgcgactttcagatcacagcatctggccagtatggacaatgggccccaaagttggctcgcctccattactccggtagcataaatgcgtggtccactaaagaacctttcagctggattaaggtcgatcttcttgcccccatgatcatccacggcattaagacacagggagcgaggcagaaattctcctccctctacatctcacagttcattattatgtatagtttggacggcaagaagtggcaaacttatagaggtaacagtactggaacagacatggtgttcttcggcaacgttgatagctctggcatcaaacacaacatctttaatcctcccataatagctcggtacatcagattgcatccgacccactacagcattaggagtacactccgaatggagcttatgggttgcgacttgaattcctgttcaatgccactcggaatggagtctaaagccatctctgatgcacagataaccgccagtagctactttacgaacatgtttgctacgtggtcaccctctaaggcaaggcttcatttgcaaggccggtctaatgcctggagacctcaggtgaacaacccgaaagaatggctccaggtggactttcagaagaccatgaaagtaacaggtgtcactactcagggagttaagtccttggatactagcatgtatgtgaaggagttccttatttcctcatcacaagatggccaccagtggaccctcttctttcagaatggtaaggtcaaagtgtttcagggcaatcaagacagcttcacacccgtggtgaacagtcttgatcctccactcttgacacgataccttcgaatccatccacagtcttgggagcaccagattgcattgcgcatggaagtacttggatgcgaggctcaggacctctac

SEQ ID NO: 924 - protein, 1457 aa, synthetic construct
  REGION 1..1457: note = Variant of human B-domain deleted Factor VIII
MQIELSTCFFLCLLRFCFSATRRYYLGAVELSWDYMQSDLGELPVDARFPPRVPKSFPFNTSVVYKKTLFVEFTDHLFNIAKPRPPWMGLLGPTIQAEVYDTVVITLKNMASHPVSLHAVGVSYWKASEGAEYDDQTSQREKEDDKVFPGGSHTYVWQVLKENGPMASDPPCLTYSYLSHVDLVKDLNSGLIGALLVCREGSLAKEKTQTLHKFILLFAVFDEGKSWHSETKNSLMQDRDAASARAWPKMHTVNGYVNRTLPGLIGCHRKSVYWHVIGMGTTPEVHSIFLEGHTFLVRNHRQASLEISPITFLTAQTLLMDLGQFLLFCHISSHQHDGMEAYVKVDSCPEEPQLRMKNNEEAEDYDDDLTDSEMDVVRFDDDNSPSIIQIRSVAKKHPKTWVHYIAAEEEDWDYAPLVLAPDDRSYKSQYLNNGPQRIGRKYKKVRFMAYTDETFKTREAIQHESGILGPLLYGEVGDTLLIIFKNQASRPYNIYPHGITDVRPLYSRRLPKGVKHLKDFPILPGEIFKYKWTVTVEDGPTKSDPRCLTRYYSSFVNMERDLASGLIGPLLICYKESVDQRGNQIMSDKRNVILFSVFDENRSWYLTENIQRFLPNPAGVQLEDPEFQASNIMHSINGYVFDSLQLSVCLHEVAYWYILSIGAQTDFLSVFFSGYTFKHKMVYEDTLTLFPFSGETVFMSMENPGLWILGCHNSDFRNRGMTALLKVSSCDGNTGDYYEDSYEDISAYLDSKNNAIEPRSFSQNPPVLKRHQREITRTTLQSDQEEIDYDDTISVEMKKEDFDIYDEDENQSPRSFQKKTRHYFIAAVERLWDYGMSSSPHVLRNRAQSGSVPQFKKVVFQEFTDGSFTQPLYRGELNEHLGLLGPYIRAEVEDNIMVTFRNQASRPYSFYSSLISYEEDQRQGAEPRKNFVKPNETKTYFWKVQHHMAPTKDEFDCKAWAYFSDVDLEKDVHSGLIGPLLVCHTNTLNPAHGRQVTVQEFALFFTIFDETKSWYFTENMERNCRAPCNIQMEDPTFKENYRFHAINGYIMDTLPGLVMAQDQRIRWYLLSMGSNENIHSIHFSGHVFTVRKKEEYKMALYNLYPGVFETVEMLPSKAGIWRVECLIGEHLHAGMSTLFLVYSNKCQTPLGMASGHIRDFQITASGQYGQWAPKLARLHYSGSINAWSTKEPFSWIKVDLLAPMIIHGIKTQGARQKFSSLYISQFIIMYSLDGKKWQTYRGNSTGTDMVFFGNVDSSGIKHNIFNPPIIARYIRLHPTHYSIRSTLRMELMGCDLNSCSMPLGMESKAISDAQITASSYFTNMFATWSPSKARLHLQGRSNAWRPQVNNPKEWLQVDFQKTMKVTGVTTQGVKSLDTSMYVKEFLISSSQDGHQWTLFFQNGKVKVFQGNQDSFTPVVNSLDPPLLTRYLRIHPQSWEHQIALRMEVLGCEAQDLY

SEQ ID NO: 925 - DNA, 4371 bp, synthetic construct
  misc_feature 1..4371: note = Variant of human B-domain deleted Factor VIII
  source 1..4371: mol_type = other DNA
atgcagattgaactgtctacctgcttcttcctctgtttgctgaggttctgctttagcgccactagacggtactaccttggcgctgtggagctgtcctgggactatatgcagagtgatttgggagagcttcccgtcgacgcacgatttcctcctcgcgttccaaagtcatttccctttaacacaagcgtggtgtacaagaagacgctcttcgtcgaattcaccgatcacctgttcaatatcgccaaacccagaccaccatggatgggtcttttggggcctaccatacaagcggaggtgtatgacacagttgttatcactctcaagaacatggcttctcatccggtaagtcttcacgcagtgggcgtgtcctactggaaagcttcagaaggagccgagtatgatgatcagacatcccagagggagaaagaagacgacaaggtatttccaggtgggtctcatacctatgtgtggcaagtgctcaaagagaatggccctatggcaagcgatccgccgtgtttgacttacagctacctttcacacgttgacctcgtcaaggacctcaactccgggttgattggagccttgttggtatgcagggaaggatctcttgccaaagagaagacacagaccctccacaagtttatccttctctttgctgtgttcgatgagggcaaaagttggcatagcgaaacgaagaattccctcatgcaggatcgcgacgcagccagcgccagagcttggcccaagatgcacactgtgaacggatatgtcaataggacgcttcctggcttgattgggtgtcatcggaaaagtgtctactggcacgtgatcggaatggggacaacaccagaggtccactccatatttctcgaaggccataccttccttgttcgaaaccacagacaggcatccttggagatctctcccattacctttctcactgcccaaacgctccttatggacttgggtcagttccttctcttctgccatatcagctcacaccagcatgatggtatggaagcttatgtgaaagtcgacagttgtcctgaggagccacagttgcgcatgaagaataatgaagaagccgaggattacgacgacgatctcaccgattctgagatggacgtggtgaggtttgatgacgacaactctccctccatcattcaaatccggagcgtggcgaagaaacaccccaagacttgggtccactatatagcggcggaagaggaggattgggattacgctcctcttgtattggcaccagatgaccgctcatacaaaagccagtacctcaacaacggaccgcagagaattggccggaagtataagaaagtgcgatttatggcctatacagacgaaacctttaagacaagggaggccatccagcatgagagtgggattttgggacctcttctttacggcgaagttggtgataccctcctcatcatcttcaagaatcaagcttctcgcccctataacatttacccacacgggatcactgacgttaggcctttgtatagcagaagacttcccaaaggcgtgaagcatctcaaagacttccccattttgccaggcgagatctttaagtacaaatggaccgtcacagtggaagatggaccgactaaatcagaccctcgatgccttacgcggtactattcctccttcgtgaatatggagagagatttggcaagcggactcataggaccactcctcatctgttacaaggaatctgtagaccagaggggtaaccagattatgagtgataaacgcaatgtgatcctttttagcgtcttcgacgagaaccggtcctggtacttgaccgagaatatacaaaggttccttcccaaccccgcaggcgttcagttggaagaccctgagtttcaggccagcaatattatgcactcaatcaacggctatgtgtttgatagtctccagctttctgtttgcctccatgaagtagcctattggtacatcttgtcaattggtgctcaaacagacttcctctccgtcttcttctccggctacacctttaagcacaagatggtgtatgaggacactctcacactctttccattttctggagaaaccgtgttcatgagcatggagaatccaggcctttggatcttgggttgccacaacagtgattttcgcaatcggggaatgactgctctcctcaaagtcagcagctgtgataagaacacaggcgactattacgaagattcttacgaggacataagtgcctacttggactccaagaataacgccattgagcccagatcattctcccagaatcctcccgtgcttaaaaggcatcagcgcgaaatcaccagaactactcttcagtctgatcaagaggagattgactatgacgacaccataagcgtggaaatgaagaaggaggatttcgatatctatgacgaagatgagaacttttctccgcggagctttcagaagaagacgcgacactacttcattgcagcagtcgaaaggctttgggactacggtatgtcatcatcccctcatgtgttgcgcaatagagctcagagtggaagtgttccacagttcaagaaagtcgtctttcaagagtttacagatggcagcttcacacagcctctctatcggggcgagcttaacgaacatttgggactccttggtccctatatccgagccgaagtggaggacaacattatggttacctttaggaatcaagcctctcgcccctacagcttctactcctccctcatcagttatgaggaggatcagagacaaggcgctgaaccacggaagaactttgtgaaaccgaatgagacgaagacctacttctggaaagtacagcaccacatggcccccacaaaagacgaattcgattgcaaagcatgggcgtatttttcagacgttgacttggagaaagatgtacattcaggacttattggtcctttgttggtgtgtcacactaacactctcaatccagcccatggcaggcaggtgacagtccaggaattcgctcttttctttaccatctttgatgagaccaagtcctggtacttcacggaaaacatggagcgcaattgcagagccccctgtaacatacagatggaggaccctacctttaaggaaaattatcggttccacgcaatcaacggatacattatggatacactccctggccttgtgatggctcaggaccaacgaatcaggtggtacctcctcagcatgggttctaatgagaacatacactccattcacttttcaggacatgtgttcactgtccggaagaaagaagagtataagatggccctctacaatttgtatccaggcgtgtttgagaccgttgaaatgcttccctctaaagctggcatctggagagtagagtgcttgatcggagaacatcttcacgcaggtatgagcaccttgttcctcgtgtacagcaacaaatgtcagaccccacttggcatggccagtggacacattcgcgactttcagatcacagcatctggccagtatggacaatgggccccaaagttggctcgcctccattactccggtagcataaatgcgtggtccactaaagaacctttcagctggattaaggtcgatcttcttgcccccatgatcatccacggcattaagacacagggagcgaggcagaaattctcctccctctacatctcacagttcattattatgtatagtttggacggcaagaagtggcaaacttatagaggtaacagtactggaacagacatggtgttcttcggcaacgttgatagctctggcatcaaacacaacatctttaatcctcccataatagctcggtacatcagattgcatccgacccactacagcattaggagtacactccgaatggagcttatgggttgcgacttgaattcctgttcaatgccactcggaatggagtctaaagccatctctgatgcacagataaccgccagtagctactttacgaacatgtttgctacgtggtcaccctctaaggcaaggcttcatttgcaaggccggtctaatgcctggagacctcaggtgaacaacccgaaagaatggctccaggtggactttcagaagaccatgaaagtaacaggtgtcactactcagggagttaagtccttggatactagcatgtatgtgaaggagttccttatttcctcatcacaagatggccaccagtggaccctcttctttcagaatggtaaggtcaaagtgtttcagggcaatcaagacagcttcacacccgtggtgaacagtcttgatcctccactcttgacacgataccttcgaatccatccacagtcttgggagcaccagattgcattgcgcatggaagtacttggatgcgaggctcaggacctctac

SEQ ID NO: 926 - protein, 1457 aa, synthetic construct
  REGION 1..1457: note = Variant of human B-domain deleted Factor VIII
MQIELSTCFFLCLLRFCFSATRRYYLGAVELSWDYMQSDLGELPVDARFPPRVPKSFPFNTSVVYKKTLFVEFTDHLFNIAKPRPPWMGLLGPTIQAEVYDTVVITLKNMASHPVSLHAVGVSYWKASEGAEYDDQTSQREKEDDKVFPGGSHTYVWQVLKENGPMASDPPCLTYSYLSHVDLVKDLNSGLIGALLVCREGSLAKEKTQTLHKFILLFAVFDEGKSWHSETKNSLMQDRDAASARAWPKMHTVNGYVNRTLPGLIGCHRKSVYWHVIGMGTTPEVHSIFLEGHTFLVRNHRQASLEISPITFLTAQTLLMDLGQFLLFCHISSHQHDGMEAYVKVDSCPEEPQLRMKNNEEAEDYDDDLTDSEMDVVRFDDDNSPSIIQIRSVAKKHPKTWVHYIAAEEEDWDYAPLVLAPDDRSYKSQYLNNGPQRIGRKYKKVRFMAYTDETFKTREAIQHESGILGPLLYGEVGDTLLIIFKNQASRPYNIYPHGITDVRPLYSRRLPKGVKHLKDFPILPGEIFKYKWTVTVEDGPTKSDPRCLTRYYSSFVNMERDLASGLIGPLLICYKESVDQRGNQIMSDKRNVILFSVFDENRSWYLTENIQRFLPNPAGVQLEDPEFQASNIMHSINGYVFDSLQLSVCLHEVAYWYILSIGAQTDFLSVFFSGYTFKHKMVYEDTLTLFPFSGETVFMSMENPGLWILGCHNSDFRNRGMTALLKVSSCDKNTGDYYEDSYEDISAYLDSKNNAIEPRSFSQNPPVLKRHQREITRTTLQSDQEEIDYDDTISVEMKKEDFDIYDEDENFSPRSFQKKTRHYFIAAVERLWDYGMSSSPHVLRNRAQSGSVPQFKKVVFQEFTDGSFTQPLYRGELNEHLGLLGPYIRAEVEDNIMVTFRNQASRPYSFYSSLISYEEDQRQGAEPRKNFVKPNETKTYFWKVQHHMAPTKDEFDCKAWAYFSDVDLEKDVHSGLIGPLLVCHTNTLNPAHGRQVTVQEFALFFTIFDETKSWYFTENMERNCRAPCNIQMEDPTFKENYRFHAINGYIMDTLPGLVMAQDQRIRWYLLSMGSNENIHSIHFSGHVFTVRKKEEYKMALYNLYPGVFETVEMLPSKAGIWRVECLIGEHLHAGMSTLFLVYSNKCQTPLGMASGHIRDFQITASGQYGQWAPKLARLHYSGSINAWSTKEPFSWIKVDLLAPMIIHGIKTQGARQKFSSLYISQFIIMYSLDGKKWQTYRGNSTGTDMVFFGNVDSSGIKHNIFNPPIIARYIRLHPTHYSIRSTLRMELMGCDLNSCSMPLGMESKAISDAQITASSYFTNMFATWSPSKARLHLQGRSNAWRPQVNNPKEWLQVDFQKTMKVTGVTTQGVKSLDTSMYVKEFLISSSQDGHQWTLFFQNGKVKVFQGNQDSFTPVVNSLDPPLLTRYLRIHPQSWEHQIALRMEVLGCEAQDLY

SEQ ID NO: 927 - DNA, 4371 bp, synthetic construct
  misc_feature 1..4371: note = Variant of human B-domain deleted Factor VIII
  source 1..4371: mol_type = other DNA
atgcagattgaactgtctacctgcttcttcctctgtttgctgaggttctgctttagcgccactagacggtactaccttggcgctgtggagctgtcctgggactatatgcagagtgatttgggagagcttcccgtcgacgcacgatttcctcctcgcgttccaaagtcatttccctttaacacaagcgtggtgtacaagaagacgctcttcgtcgaattcaccgatcacctgttcaatatcgccaaacccagaccaccatggatgggtcttttggggcctaccatacaagcggaggtgtatgacacagttgttatcactctcaagaacatggcttctcatccggtaagtcttcacgcagtgggcgtgtcctactggaaagcttcagaaggagccgagtatgatgatcagacatcccagagggagaaagaagacgacaaggtatttccaggtgggtctcatacctatgtgtggcaagtgctcaaagagaatggccctatggcaagcgatccgccgtgtttgacttacagctacctttcacacgttgacctcgtcaaggacctcaactccgggttgattggagccttgttggtatgcagggaaggatctcttgccaaagagaagacacagaccctccacaagtttatccttctctttgctgtgttcgatgagggcaaaagttggcatagcgaaacgaagaattccctcatgcaggatcgcgacgcagccagcgccagagcttggcccaagatgcacactgtgaacggatatgtcaataggacgcttcctggcttgattgggtgtcatcggaaaagtgtctactggcacgtgatcggaatggggacaacaccagaggtccactccatatttctcgaaggccataccttccttgttcgaaaccacagacaggcatccttggagatctctcccattacctttctcactgcccaaacgctccttatggacttgggtcagttccttctcttctgccatatcagctcacaccagcatgatggtatggaagcttatgtgaaagtcgacagttgtcctgaggagccacagttgcgcatgaagaataatgaagaagccgaggattacgacgacgatctcaccgattctgagatggacgtggtgaggtttgatgacgacaactctccctccatcattcaaatccggagcgtggcgaagaaacaccccaagacttgggtccactatatagcggcggaagaggaggattgggattacgctcctcttgtattggcaccagatgaccgctcatacaaaagccagtacctcaacaacggaccgcagagaattggccggaagtataagaaagtgcgatttatggcctatacagacgaaacctttaagacaagggaggccatccagcatgagagtgggattttgggacctcttctttacggcgaagttggtgataccctcctcatcatcttcaagaatcaagcttctcgcccctataacatttacccacacgggatcactgacgttaggcctttgtatagcagaagacttcccaaaggcgtgaagcatctcaaagacttccccattttgccaggcgagatctttaagtacaaatggaccgtcacagtggaagatggaccgactaaatcagaccctcgatgccttacgcggtactattcctccttcgtgaatatggagagagatttggcaagcggactcataggaccactcctcatctgttacaaggaatctgtagaccagaggggtaaccagattatgagtgataaacgcaatgtgatcctttttagcgtcttcgacgagaaccggtcctggtacttgaccgagaatatacaaaggttccttcccaaccccgcaggcgttcagttggaagaccctgagtttcaggccagcaatattatgcactcaatcaacggctatgtgtttgatagtctccagctttctgtttgcctccatgaagtagcctattggtacatcttgtcaattggtgctcaaacagacttcctctccgtcttcttctccggctacacctttaagcacaagatggtgtatgaggacactctcacactctttccattttctggagaaaccgtgttcatgagcatggagaatccaggcctttggatcttgggttgccacaacagtgattttcgcaatcggggaatgactgctctcctcaaagtcagcagctgtgataagaacacaggcgactattacgaagattcttacgaggacataagtgcctacttggactccaagaataacgccattgagcccagatcattctcccagaatcctcccgtgcttaaaaggcatcagcgcgaaatcaccagaactactcttcagtctgatcaagaggagattgactatgacgacaccataagcgtggaaatgaagaaggaggattctgatatctatgacgaagatgagaaccagtctccgcggagctttcagaagaagacgcgacactacttcattgcagcagtcgaaaggctttgggactacggtatgtcatcatcccctcatgtgttgcgcaatagagctcagagtggaagtgttccacagttcaagaaagtcgtctttcaagagtttacagatggcagcttcacacagcctctctatcggggcgagcttaacgaacatttgggactccttggtccctatatccgagccgaagtggaggacaacattatggttacctttaggaatcaagcctctcgcccctacagcttctactcctccctcatcagttatgaggaggatcagagacaaggcgctgaaccacggaagaactttgtgaaaccgaatgagacgaagacctacttctggaaagtacagcaccacatggcccccacaaaagacgaattcgattgcaaagcatgggcgtatttttcagacgttgacttggagaaagatgtacattcaggacttattggtcctttgttggtgtgtcacactaacactctcaatccagcccatggcaggcaggtgacagtccaggaattcgctcttttctttaccatctttgatgagaccaagtcctggtacttcacggaaaacatggagcgcaattgcagagccccctgtaacatacagatggaggaccctacctttaaggaaaattatcggttccacgcaatcaacggatacattatggatacactccctggccttgtgatggctcaggaccaacgaatcaggtggtacctcctcagcatgggttctaatgagaacatacactccattcacttttcaggacatgtgttcactgtccggaagaaagaagagtataagatggccctctacaatttgtatccaggcgtgtttgagaccgttgaaatgcttccctctaaagctggcatctggagagtagagtgcttgatcggagaacatcttcacgcaggtatgagcaccttgttcctcgtgtacagcaacaaatgtcagaccccacttggcatggccagtggacacattcgcgactttcagatcacagcatctggccagtatggacaatgggccccaaagttggctcgcctccattactccggtagcataaatgcgtggtccactaaagaacctttcagctggattaaggtcgatcttcttgcccccatgatcatccacggcattaagacacagggagcgaggcagaaattctcctccctctacatctcacagttcattattatgtatagtttggacggcaagaagtggcaaacttatagaggtaacagtactggaacagacatggtgttcttcggcaacgttgatagctctggcatcaaacacaacatctttaatcctcccataatagctcggtacatcagattgcatccgacccactacagcattaggagtacactccgaatggagcttatgggttgcgacttgaattcctgttcaatgccactcggaatggagtctaaagccatctctgatgcacagataaccgccagtagctactttacgaacatgtttgctacgtggtcaccctctaaggcaaggcttcatttgcaaggccggtctaatgcctggagacctcaggtgaacaacccgaaagaatggctccaggtggactttcagaagaccatgaaagtaacaggtgtcactactcagggagttaagtccttggatactagcatgtatgtgaaggagttccttatttcctcatcacaagatggccaccagtggaccctcttctttcagaatggtaaggtcaaagtgtttcagggcaatcaagacagcttcacacccgtggtgaacagtcttgatcctccactcttgacacgataccttcgaatccatccacagtcttgggagcaccagattgcattgcgcatggaagtacttggatgcgaggctcaggacctctac

SEQ ID NO: 928 - protein, 1457 aa, synthetic construct
  REGION 1..1457: note = Variant of human B-domain deleted Factor VIII
MQIELSTCFFLCLLRFCFSATRRYYLGAVELSWDYMQSDLGELPVDARFPPRVPKSFPFNTSVVYKKTLFVEFTDHLFNIAKPRPPWMGLLGPTIQAEVYDTVVITLKNMASHPVSLHAVGVSYWKASEGAEYDDQTSQREKEDDKVFPGGSHTYVWQVLKENGPMASDPPCLTYSYLSHVDLVKDLNSGLIGALLVCREGSLAKEKTQTLHKFILLFAVFDEGKSWHSETKNSLMQDRDAASARAWPKMHTVNGYVNRTLPGLIGCHRKSVYWHVIGMGTTPEVHSIFLEGHTFLVRNHRQASLEISPITFLTAQTLLMDLGQFLLFCHISSHQHDGMEAYVKVDSCPEEPQLRMKNNEEAEDYDDDLTDSEMDVVRFDDDNSPSIIQIRSVAKKHPKTWVHYIAAEEEDWDYAPLVLAPDDRSYKSQYLNNGPQRIGRKYKKVRFMAYTDETFKTREAIQHESGILGPLLYGEVGDTLLIIFKNQASRPYNIYPHGITDVRPLYSRRLPKGVKHLKDFPILPGEIFKYKWTVTVEDGPTKSDPRCLTRYYSSFVNMERDLASGLIGPLLICYKESVDQRGNQIMSDKRNVILFSVFDENRSWYLTENIQRFLPNPAGVQLEDPEFQASNIMHSINGYVFDSLQLSVCLHEVAYWYILSIGAQTDFLSVFFSGYTFKHKMVYEDTLTLFPFSGETVFMSMENPGLWILGCHNSDFRNRGMTALLKVSSCDKNTGDYYEDSYEDISAYLDSKNNAIEPRSFSQNPPVLKRHQREITRTTLQSDQEEIDYDDTISVEMKKEDSDIYDEDENQSPRSFQKKTRHYFIAAVERLWDYGMSSSPHVLRNRAQSGSVPQFKKVVFQEFTDGSFTQPLYRGELNEHLGLLGPYIRAEVEDNIMVTFRNQASRPYSFYSSLISYEEDQRQGAEPRKNFVKPNETKTYFWKVQHHMAPTKDEFDCKAWAYFSDVDLEKDVHSGLIGPLLVCHTNTLNPAHGRQVTVQEFALFFTIFDETKSWYFTENMERNCRAPCNIQMEDPTFKENYRFHAINGYIMDTLPGLVMAQDQRIRWYLLSMGSNENIHSIHFSGHVFTVRKKEEYKMALYNLYPGVFETVEMLPSKAGIWRVECLIGEHLHAGMSTLFLVYSNKCQTPLGMASGHIRDFQITASGQYGQWAPKLARLHYSGSINAWSTKEPFSWIKVDLLAPMIIHGIKTQGARQKFSSLYISQFIIMYSLDGKKWQTYRGNSTGTDMVFFGNVDSSGIKHNIFNPPIIARYIRLHPTHYSIRSTLRMELMGCDLNSCSMPLGMESKAISDAQITASSYFTNMFATWSPSKARLHLQGRSNAWRPQVNNPKEWLQVDFQKTMKVTGVTTQGVKSLDTSMYVKEFLISSSQDGHQWTLFFQNGKVKVFQGNQDSFTPVVNSLDPPLLTRYLRIHPQSWEHQIALRMEVLGCEAQDLY

SEQ ID NO: 929 - DNA, 4371 bp, synthetic construct
  misc_feature 1..4371: note = Variant of human B-domain deleted Factor VIII
  source 1..4371: mol_type = other DNA
atgcagattgaactgtctacctgcttcttcctctgtttgctgaggttctgctttagcgccactagacggtactaccttggcgctgtggagctgtcctgggactatatgcagagtgatttgggagagcttcccgtcgacgcacgatttcctcctcgcgttccaaagtcatttccctttaacacaagcgtggtgtacaagaagacgctcttcgtcgaattcaccgatcacctgttcaatatcgccaaacccagaccaccatggatgggtcttttggggcctaccatacaagcggaggtgtatgacacagttgttatcactctcaagaacatggcttctcatccggtaagtcttcacgcagtgggcgtgtcctactggaaagcttcagaaggagccgagtatgatgatcagacatcccagagggagaaagaagacgacaaggtatttccaggtgggtctcatacctatgtgtggcaagtgctcaaagagaatggccctatggcaagcgatccgccgtgtttgacttacagctacctttcacacgttgacctcgtcaaggacctcaactccgggttgattggagccttgttggtatgcagggaaggatctcttgccaaagagaagacacagaccctccacaagtttatccttctctttgctgtgttcgatgagggcaaaagttggcatagcgaaacgaagaattccctcatgcaggatcgcgacgcagccagcgccagagcttggcccaagatgcacactgtgaacggatatgtcaataggacgcttcctggcttgattgggtgtcatcggaaaagtgtctactggcacgtgatcggaatggggacaacaccagaggtccactccatatttctcgaaggccataccttccttgttcgaaaccacagacaggcatccttggagatctctcccattacctttctcactgcccaaacgctccttatggacttgggtcagttccttctcttctgccatatcagctcacaccagcatgatggtatggaagcttatgtgaaagtcgacagttgtcctgaggagccacagttgcgcatgaagaataatgaagaagccgaggattacgacgacgatctcaccgattctgagatggacgtggtgaggtttgatgacgacaactctccctccatcattcaaatccggagcgtggcgaagaaacaccccaagacttgggtccactatatagcggcggaagaggaggattgggattacgctcctcttgtattggcaccagatgaccgctcatacaaaagccagtacctcaacaacggaccgcagagaattggccggaagtataagaaagtgcgatttatggcctatacagacgaaacctttaagacaagggaggccatccagcatgagagtgggattttgggacctcttctttacggcgaagttggtgataccctcctcatcatcttcaagaatcaagcttctcgcccctataacatttacccacacgggatcactgacgttaggcctttgtatagcagaagacttcccaaaggcgtgaagcatctcaaagacttccccattttgccaggcgagatctttaagtacaaatggaccgtcacagtggaagatggaccgactaaatcagaccctcgatgccttacgcggtactattcctccttcgtgaatatggagagagatttggcaagcggactcataggaccactcctcatctgttacaaggaatctgtagaccagaggggtaaccagattatgagtgataaacgcaatgtgatcctttttagcgtcttcgacgagaaccggtcctggtacttgaccgagaatatacaaaggttccttcccaaccccgcaggcgttcagttggaagaccctgagtttcaggccagcaatattatgcactcaatcaacggctatgtgtttgatagtctccagctttctgtttgcctccatgaagtagcctattggtacatcttgtcaattggtgctcaaacagacttcctctccgtcttcttctccggctacacctttaagcacaagatggtgtatgaggacactctcacactctttccattttctggagaaaccgtgttcatgagcatggagaatccaggcctttggatcttgggttgccacaacagtgattttcgcaatcggggaatgactgctctcctcaaagtcagcagctgtgataagaacacaggcgactattacgaagattcttacgaggacataagtgcctacttggactccctgaataacgccattgagcccagatcattctcccagaatcctcccgtgcttaaaaggcatcagcgcgaaatcaccagaactactcttcagtctgatcaagaggagattgactatgacgacaccataagcgtggaaatgaagaaggaggatttcgatatctatgacgaagatgagaaccagtctccgcggagctttcagaagaagacgcgacactacttcattgcagcagtcgaaaggctttgggactacggtatgtcatcatcccctcatgtgttgcgcaatagagctcagagtggaagtgttccacagttcaagaaagtcgtctttcaagagtttacagatggcagcttcacacagcctctctatcggggcgagcttaacgaacatttgggactccttggtccctatatccgagccgaagtggaggacaacattatggttacctttaggaatcaagcctctcgcccctacagcttctactcctccctcatcagttatgaggaggatcagagacaaggcgctgaaccacggaagaactttgtgaaaccgaatgagacgaagacctacttctggaaagtacagcaccacatggcccccacaaaagacgaattcgattgcaaagcatgggcgtatttttcagacgttgacttggagaaagatgtacattcaggacttattggtcctttgttggtgtgtcacactaacactctcaatccagcccatggcaggcaggtgacagtccaggaattcgctcttttctttaccatctttgatgagaccaagtcctggtacttcacggaaaacatggagcgcaattgcagagccccctgtaacatacagatggaggaccctacctttaaggaaaattatcggttccacgcaatcaacggatacattatggatacactccctggccttgtgatggctcaggaccaacgaatcaggtggtacctcctcagcatgggttctaatgagaacatacactccattcacttttcaggacatgtgttcactgtccggaagaaagaagagtataagatggccctctacaatttgtatccaggcgtgtttgagaccgttgaaatgcttccctctaaagctggcatctggagagtagagtgcttgatcggagaacatcttcacgcaggtatgagcaccttgttcctcgtgtacagcaacaaatgtcagaccccacttggcatggccagtggacacattcgcgactttcagatcacagcatctggccagtatggacaatgggccccaaagttggctcgcctccattactccggtagcataaatgcgtggtccactaaagaacctttcagctggattaaggtcgatcttcttgcccccatgatcatccacggcattaagacacagggagcgaggcagaaattctcctccctctacatctcacagttcattattatgtatagtttggacggcaagaagtggcaaacttatagaggtaacagtactggaacagacatggtgttcttcggcaacgttgatagctctggcatcaaacacaacatctttaatcctcccataatagctcggtacatcagattgcatccgacccactacagcattaggagtacactccgaatggagcttatgggttgcgacttgaattcctgttcaatgccactcggaatggagtctaaagccatctctgatgcacagataaccgccagtagctactttacgaacatgtttgctacgtggtcaccctctaaggcaaggcttcatttgcaaggccggtctaatgcctggagacctcaggtgaacaacccgaaagaatggctccaggtggactttcagaagaccatgaaagtaacaggtgtcactactcagggagttaagtccttggatactagcatgtatgtgaaggagttccttatttcctcatcacaagatggccaccagtggaccctcttctttcagaatggtaaggtcaaagtgtttcagggcaatcaagacagcttcacacccgtggtgaacagtcttgatcctccactcttgacacgataccttcgaatccatccacagtcttgggagcaccagattgcattgcgcatggaagtacttggatgcgaggctcaggacctctac

SEQ ID NO: 930 - protein, 1457 aa, synthetic construct
  REGION 1..1457: note = Variant of human B-domain deleted Factor VIII
MQIELSTCFFLCLLRFCFSATRRYYLGAVELSWDYMQSDLGELPVDARFPPRVPKSFPFNTSVVYKKTLFVEFTDHLFNIAKPRPPWMGLLGPTIQAEVYDTVVITLKNMASHPVSLHAVGVSYWKASEGAEYDDQTSQREKEDDKVFPGGSHTYVWQVLKENGPMASDPPCLTYSYLSHVDLVKDLNSGLIGALLVCREGSLAKEKTQTLHKFILLFAVFDEGKSWHSETKNSLMQDRDAASARAWPKMHTVNGYVNRTLPGLIGCHRKSVYWHVIGMGTTPEVHSIFLEGHTFLVRNHRQASLEISPITFLTAQTLLMDLGQFLLFCHISSHQHDGMEAYVKVDSCPEEPQLRMKNNEEAEDYDDDLTDSEMDVVRFDDDNSPSIIQIRSVAKKHPKTWVHYIAAEEEDWDYAPLVLAPDDRSYKSQYLNNGPQRIGRKYKKVRFMAYTDETFKTREAIQHESGILGPLLYGEVGDTLLIIFKNQASRPYNIYPHGITDVRPLYSRRLPKGVKHLKDFPILPGEIFKYKWTVTVEDGPTKSDPRCLTRYYSSFVNMERDLASGLIGPLLICYKESVDQRGNQIMSDKRNVILFSVFDENRSWYLTENIQRFLPNPAGVQLEDPEFQASNIMHSINGYVFDSLQLSVCLHEVAYWYILSIGAQTDFLSVFFSGYTFKHKMVYEDTLTLFPFSGETVFMSMENPGLWILGCHNSDFRNRGMTALLKVSSCDKNTGDYYEDSYEDISAYLDSLNNAIEPRSFSQNPPVLKRHQREITRTTLQSDQEEIDYDDTISVEMKKEDFDIYDEDENQSPRSFQKKTRHYFIAAVERLWDYGMSSSPHVLRNRAQSGSVPQFKKVVFQEFTDGSFTQPLYRGELNEHLGLLGPYIRAEVEDNIMVTFRNQASRPYSFYSSLISYEEDQRQGAEPRKNFVKPNETKTYFWKVQHHMAPTKDEFDCKAWAYFSDVDLEKDVHSGLIGPLLVCHTNTLNPAHGRQVTVQEFALFFTIFDETKSWYFTENMERNCRAPCNIQMEDPTFKENYRFHAINGYIMDTLPGLVMAQDQRIRWYLLSMGSNENIHSIHFSGHVFTVRKKEEYKMALYNLYPGVFETVEMLPSKAGIWRVECLIGEHLHAGMSTLFLVYSNKCQTPLGMASGHIRDFQITASGQYGQWAPKLARLHYSGSINAWSTKEPFSWIKVDLLAPMIIHGIKTQGARQKFSSLYISQFIIMYSLDGKKWQTYRGNSTGTDMVFFGNVDSSGIKHNIFNPPIIARYIRLHPTHYSIRSTLRMELMGCDLNSCSMPLGMESKAISDAQITASSYFTNMFATWSPSKARLHLQGRSNAWRPQVNNPKEWLQVDFQKTMKVTGVTTQGVKSLDTSMYVKEFLISSSQDGHQWTLFFQNGKVKVFQGNQDSFTPVVNSLDPPLLTRYLRIHPQSWEHQIALRMEVLGCEAQDLY

SEQ ID NO: 931 - DNA, 4371 bp, synthetic construct
  misc_feature 1..4371: note = Variant of human B-domain deleted Factor VIII
  source 1..4371: mol_type = other DNA
atgcagattgaactgtctacctgcttcttcctctgtttgctgaggttctgctttagcgccactagacggtactaccttggcgctgtggagctgtcctgggactatatgcagagtgatttgggagagcttcccgtcgacgcacgatttcctcctcgcgttccaaagtcatttccctttaacacaagcgtggtgtacaagaagacgctcttcgtcgaattcaccgatcacctgttcaatatcgccaaacccagaccaccatggatgggtcttttggggcctaccatacaagcggaggtgtatgacacagttgttatcactctcaagaacatggcttctcatccggtaagtcttcacgcagtgggcgtgtcctactggaaagcttcagaaggagccgagtatgatgatcagacatcccagagggagaaagaagacgacaaggtatttccaggtgggtctcatacctatgtgtggcaagtgctcaaagagaatggccctatggcaagcgatccgccgtgtttgacttacagctacctttcacacgttgacctcgtcaaggacctcaactccgggttgattggagccttgttggtatgcagggaaggatctcttgccaaagagaagacacagaccctccacaagtttatccttctctttgctgtgttcgatgagggcaaaagttggcatagcgaaacgaagaattccctcatgcaggatcgcgacgcagccagcgccagagcttggcccaagatgcacactgtgaacggatatgtcaataggacgcttcctggcttgattgggtgtcatcggaaaagtgtctactggcacgtgatcggaatggggacaacaccagaggtccactccatatttctcgaaggccataccttccttgttcgaaaccacagacaggcatccttggagatctctcccattacctttctcactgcccaaacgctccttatggacttgggtcagttccttctcttctgccatatcagctcacaccagcatgatggtatggaagcttatgtgaaagtcgacagttgtcctgaggagccacagttgcgcatgaagaataatgaagaagccgaggattacgacgacgatctcaccgattctgagatggacgtggtgaggtttgatgacgacaactctccctccatcattcaaatccgggcggtggcgaagaaacaccccaagacttgggtccactatatagcggcggaagaggaggattgggattacgctcctcttgtattggcaccagatgaccgctcatacaaaagccagtacctcaacaacggaccgcagagaattggccggaagtataagaaagtgcgatttatggcctatacagacgaaacctttaagacaagggaggccatccagcatgagagtgggattttgggacctcttctttacggcgaagttggtgataccctcctcatcatcttcaagaatcaagcttctcgcccctataacatttacccacacgggatcactgacgttaggcctttgtatagcagaagacttcccaaaggcgtgaagcatctcaaagacttccccattttgccaggcgagatctttaagtacaaatggaccgtcacagtggaagatggaccgactaaatcagaccctcgatgccttacgcggtactattcctccttcgtgaatatggagagagatttggcaagcggactcataggaccactcctcatctgttacaaggaatctgtagaccagaggggtaaccagattatgagtgataaacgcaatgtgatcctttttagcgtcttcgacgagaaccggtcctggtacttgaccgagaatatacaaaggttccttcccaaccccgcaggcgttcagttggaagaccctgagtttcaggccagcaatattatgcactcaatcaacggctatgtgtttgatagtctccagctttctgtttgcctccatgaagtagcctattggtacatcttgtcaattggtgctcaaacagacttcctctccgtcttcttctccggctacacctttaagcacaagatggtgtatgaggacactctcacactctttccattttctggagaaaccgtgttcatgagcatggagaatccaggcctttggatcttgggttgccacaacagtgattttcgcaatcggggaatgactgctctcctcaaagtcagcagctgtgataagaacacaggcgactattacgaagattcttacgaggacataagtgcctacttggactccaagaataacgccattgagcccagatcattctcccagaatcctcccgtgcttaaaaggcatcagcgcgaaatcaccagaactactcttcagtctgatcaagaggagattgactatgacgacaccataagcgtggaaatgaagaaggaggatttcgatatctatgacgaagatgagaaccagtctccgcggagctttcagaagaagacgcgacactacttcattgcagcagtcgaaaggctttgggactacggtatgtcatcatcccctcatgtgttgcgcaatagagctcagagtggaagtgttccacagttcaagaaagtcgtctttcaagagtttacagatggcagcttcacacagcctctctatcggggcgagcttaacgaacatttgggactccttggtccctatatccgagccgaagtggaggacaacattatggttacctttaggaatcaagcctctcgcccctacagcttctactcctccctcatcagttatgaggaggatcagagacaaggcgctgaaccacggaagaactttgtgaaaccgaatgagacgaagacctacttctggaaagtacagcaccacatggcccccacaaaagacgaattcgattgcaaagcatgggcgtatttttcagacgttgacttggagaaagatgtacattcaggacttattggtcctttgttggtgtgtcacactaacactctcaatccagcccatggcaggcaggtgacagtccaggaattcgctcttttctttaccatctttgatgagaccaagtcctggtacttcacggaaaacatggagcgcaattgcagagccccctgtaacatacagatggaggaccctacctttaaggaaaattatcggttccacgcaatcaacggatacattatggatacactccctggccttgtgatggctcaggaccaacgaatcaggtggtacctcctcagcatgggttctaatgagaacatacactccattcacttttcaggacatgtgttcactgtccggaagaaagaagagtataagatggccctctacaatttgtatccaggcgtgtttgagaccgttgaaatgcttccctctaaagctggcatctggagagtagagtgcttgatcggagaacatcttcacgcaggtatgagcaccttgttcctcgtgtacagcaacaaatgtcagaccccacttggcatggccagtggacacattcgcgactttcagatcacagcatctggccagtatggacaatgggccccaaagttggctcgcctccattactccggtagcataaatgcgtggtccactaaagaacctttcagctggattaaggtcgatcttcttgcccccatgatcatccacggcattaagacacagggagcgaggcagaaattctcctccctctacatctcacagttcattattatgtatagtttggacggcaagaagtggcaaacttatagaggtaacagtactggaacagacatggtgttcttcggcaacgttgatagctctggcatcaaacacaacatctttaatcctcccataatagctcggtacatcagattgcatccgacccactacagcattaggagtacactccgaatggagcttatgggttgcgacttgaattcctgttcaatgccactcggaatggagtctaaagccatctctgatgcacagataaccgccagtagctactttacgaacatgtttgctacgtggtcaccctctaaggcaaggcttcatttgcaaggccggtctaatgcctggagacctcaggtgaacaacccgaaagaatggctccaggtggactttcagaagaccatgaaagtaacaggtgtcactactcagggagttaagtccttggatactagcatgtatgtgaaggagttccttatttcctcatcacaagatggccaccagtggaccctcttctttcagaatggtaaggtcaaagtgtttcagggcaatcaagacagcttcacacccgtggtgaacagtcttgatcctccactcttgacacgataccttcgaatccatccacagtcttgggagcaccagattgcattgcgcatggaagtacttggatgcgaggctcaggacctctac

SEQ ID NO: 932 - protein, 1457 aa, synthetic construct
  REGION 1..1457: note = Variant of human B-domain deleted Factor VIII
MQIELSTCFFLCLLRFCFSATRRYYLGAVELSWDYMQSDLGELPVDARFPPRVPKSFPFNTSVVYKKTLFVEFTDHLFNIAKPRPPWMGLLGPTIQAEVYDTVVITLKNMASHPVSLHAVGVSYWKASEGAEYDDQTSQREKEDDKVFPGGSHTYVWQVLKENGPMASDPPCLTYSYLSHVDLVKDLNSGLIGALLVCREGSLAKEKTQTLHKFILLFAVFDEGKSWHSETKNSLMQDRDAASARAWPKMHTVNGYVNRTLPGLIGCHRKSVYWHVIGMGTTPEVHSIFLEGHTFLVRNHRQASLEISPITFLTAQTLLMDLGQFLLFCHISSHQHDGMEAYVKVDSCPEEPQLRMKNNEEAEDYDDDLTDSEMDVVRFDDDNSPSIIQIRAVAKKHPKTWVHYIAAEEEDWDYAPLVLAPDDRSYKSQYLNNGPQRIGRKYKKVRFMAYTDETFKTREAIQHESGILGPLLYGEVGDTLLIIFKNQASRPYNIYPHGITDVRPLYSRRLPKGVKHLKDFPILPGEIFKYKWTVTVEDGPTKSDPRCLTRYYSSFVNMERDLASGLIGPLLICYKESVDQRGNQIMSDKRNVILFSVFDENRSWYLTENIQRFLPNPAGVQLEDPEFQASNIMHSINGYVFDSLQLSVCLHEVAYWYILSIGAQTDFLSVFFSGYTFKHKMVYEDTLTLFPFSGETVFMSMENPGLWILGCHNSDFRNRGMTALLKVSSCDKNTGDYYEDSYEDISAYLDSKNNAIEPRSFSQNPPVLKRHQREITRTTLQSDQEEIDYDDTISVEMKKEDFDIYDEDENQSPRSFQKKTRHYFIAAVERLWDYGMSSSPHVLRNRAQSGSVPQFKKVVFQEFTDGSFTQPLYRGELNEHLGLLGPYIRAEVEDNIMVTFRNQASRPYSFYSSLISYEEDQRQGAEPRKNFVKPNETKTYFWKVQHHMAPTKDEFDCKAWAYFSDVDLEKDVHSGLIGPLLVCHTNTLNPAHGRQVTVQEFALFFTIFDETKSWYFTENMERNCRAPCNIQMEDPTFKENYRFHAINGYIMDTLPGLVMAQDQRIRWYLLSMGSNENIHSIHFSGHVFTVRKKEEYKMALYNLYPGVFETVEMLPSKAGIWRVECLIGEHLHAGMSTLFLVYSNKCQTPLGMASGHIRDFQITASGQYGQWAPKLARLHYSGSINAWSTKEPFSWIKVDLLAPMIIHGIKTQGARQKFSSLYISQFIIMYSLDGKKWQTYRGNSTGTDMVFFGNVDSSGIKHNIFNPPIIARYIRLHPTHYSIRSTLRMELMGCDLNSCSMPLGMESKAISDAQITASSYFTNMFATWSPSKARLHLQGRSNAWRPQVNNPKEWLQVDFQKTMKVTGVTTQGVKSLDTSMYVKEFLISSSQDGHQWTLFFQNGKVKVFQGNQDSFTPVVNSLDPPLLTRYLRIHPQSWEHQIALRMEVLGCEAQDLY

SEQ ID NO: 933 - DNA, 4371 bp, synthetic construct
  misc_feature 1..4371: note = Variant of human B-domain deleted Factor VIII
  source 1..4371: mol_type = other DNA
atgcagattgaactgtctacctgcttcttcctctgtttgctgaggttctgctttagcgccactagacggtactaccttggcgctgtggagctgtcctgggactatatgcagagtgatttgggagagcttcccgtcgacgcacgatttcctcctcgcgttccaaagtcatttccctttaacacaagcgtggtgtacaagaagacgctcttcgtcgaattcaccgatcacctgttcaatatcgccaaacccagaccaccatggatgggtcttttggggcctaccatacaagcggaggtgtatgacacagttgttatcactctcaagaacatggcttctcatccggtaagtcttcacgcagtgggcgtgtcctactggaaagcttcagaaggagccgagtatgatgatcagacatcccagagggagaaagaagacgacaaggtatttccaggtgggtctcatacctatgtgtggcaagtgctcaaagagaatggccctatggcaagcgatccgccgtgtttgacttacagctacctttcacacgttgacctcgtcaaggacctcaactccgggttgattggagccttgttggtatgcagggaaggatctcttgccaaagagaagacacagaccctccacaagtttatccttctctttgctgtgttcgatgagggcaaaagttggcatagcgaaacgaagaattccctcatgcaggatcgcgacgcagccagcgccagagcttggcccaagatgcacactgtgaacggatatgtcaataggacgcttcctggcttgattgggtgtcatcggaaaagtgtctactggcacgtgatcggaatggggacaacaccagaggtccactccatatttctcgaaggccataccttccttgttcgaaaccacagacaggcatccttggagatctctcccattacctttctcactgcccaaacgctccttatggacttgggtcagttccttctcttctgccatatcagctcacaccagcatgatggtatggaagcttatgtgaaagtcgacagttgtcctgaggagccacagttgcgcatgaagaataatgaagaagccgaggattacgacgacgatctcaccgattctgagatggacgtggtgaggtttgatgacgacaactctccctccatcattcaaatccggagcgtggcgaagaaagggcccaagacttgggtccactatatagcggcggaagaggaggattgggattacgctcctcttgtattggcaccagatgaccgctcatacaaaagccagtacctcaacaacggaccgcagagaattggccggaagtataagaaagtgcgatttatggcctatacagacgaaacctttaagacaagggaggccatccagcatgagagtgggattttgggacctcttctttacggcgaagttggtgataccctcctcatcatcttcaagaatcaagcttctcgcccctataacatttacccacacgggatcactgacgttaggcctttgtatagcagaagacttcccaaaggcgtgaagcatctcaaagacttccccattttgccaggcgagatctttaagtacaaatggaccgtcacagtggaagatggaccgactaaatcagaccctcgatgccttacgcggtactattcctccttcgtgaatatggagagagatttggcaagcggactcataggaccactcctcatctgttacaaggaatctgtagaccagaggggtaaccagattatgagtgataaacgcaatgtgatcctttttagcgtcttcgacgagaaccggtcctggtacttgaccgagaatatacaaaggttccttcccaaccccgcaggcgttcagttggaagaccctgagtttcaggccagcaatattatgcactcaatcaacggctatgtgtttgatagtctccagctttctgtttgcctccatgaagtagcctattggtacatcttgtcaattggtgctcaaacagacttcctctccgtcttcttctccggctacacctttaagcacaagatggtgtatgaggacactctcacactctttccattttctggagaaaccgtgttcatgagcatggagaatccaggcctttggatcttgggttgccacaacagtgattttcgcaatcggggaatgactgctctcctcaaagtcagcagctgtgataagaacacaggcgactattacgaagattcttacgaggacataagtgcctacttggactccaagaataacgccattgagcccagatcattctcccagaatcctcccgtgcttaaaaggcatcagcgcgaaatcaccagaactactcttcagtctgatcaagaggagattgactatgacgacaccataagcgtggaaatgaagaaggaggatttcgatatctatgacgaagatgagaaccagtctccgcggagctttcagaagaagacgcgacactacttcattgcagcagtcgaaaggctttgggactacggtatgtcatcatcccctcatgtgttgcgcaatagagctcagagtggaagtgttccacagttcaagaaagtcgtctttcaagagtttacagatggcagcttcacacagcctctctatcggggcgagcttaacgaacatttgggactccttggtccctatatccgagccgaagtggaggacaacattatggttacctttaggaatcaagcctctcgcccctacagcttctactcctccctcatcagttatgaggaggatcagagacaaggcgctgaaccacggaagaactttgtgaaaccgaatgagacgaagacctacttctggaaagtacagcaccacatggcccccacaaaagacgaattcgattgcaaagcatgggcgtatttttcagacgttgacttggagaaagatgtacattcaggacttattggtcctttgttggtgtgtcacactaacactctcaatccagcccatggcaggcaggtgacagtccaggaattcgctcttttctttaccatctttgatgagaccaagtcctggtacttcacggaaaacatggagcgcaattgcagagccccctgtaacatacagatggaggaccctacctttaaggaaaattatcggttccacgcaatcaacggatacattatggatacactccctggccttgtgatggctcaggaccaacgaatcaggtggtacctcctcagcatgggttctaatgagaacatacactccattcacttttcaggacatgtgttcactgtccggaagaaagaagagtataagatggccctctacaatttgtatccaggcgtgtttgagaccgttgaaatgcttccctctaaagctggcatctggagagtagagtgcttgatcggagaacatcttcacgcaggtatgagcaccttgttcctcgtgtacagcaacaaatgtcagaccccacttggcatggccagtggacacattcgcgactttcagatcacagcatctggccagtatggacaatgggccccaaagttggctcgcctccattactccggtagcataaatgcgtggtccactaaagaacctttcagctggattaaggtcgatcttcttgcccccatgatcatccacggcattaagacacagggagcgaggcagaaattctcctccctctacatctcacagttcattattatgtatagtttggacggcaagaagtggcaaacttatagaggtaacagtactggaacagacatggtgttcttcggcaacgttgatagctctggcatcaaacacaacatctttaatcctcccataatagctcggtacatcagattgcatccgacccactacagcattaggagtacactccgaatggagcttatgggttgcgacttgaattcctgttcaatgccactcggaatggagtctaaagccatctctgatgcacagataaccgccagtagctactttacgaacatgtttgctacgtggtcaccctctaaggcaaggcttcatttgcaaggccggtctaatgcctggagacctcaggtgaacaacccgaaagaatggctccaggtggactttcagaagaccatgaaagtaacaggtgtcactactcagggagttaagtccttggatactagcatgtatgtgaaggagttccttatttcctcatcacaagatggccaccagtggaccctcttctttcagaatggtaaggtcaaagtgtttcagggcaatcaagacagcttcacacccgtggtgaacagtcttgatcctccactcttgacacgataccttcgaatccatccacagtcttgggagcaccagattgcattgcgcatggaagtacttggatgcgaggctcaggacctctac

SEQ ID NO: 934 - protein, 1457 aa, synthetic construct
  REGION 1..1457: note = Variant of human B-domain deleted Factor VIII
MQIELSTCFFLCLLRFCFSATRRYYLGAVELSWDYMQSDLGELPVDARFPPRVPKSFPFNTSVVYKKTLFVEFTDHLFNIAKPRPPWMGLLGPTIQAEVYDTVVITLKNMASHPVSLHAVGVSYWKASEGAEYDDQTSQREKEDDKVFPGGSHTYVWQVLKENGPMASDPPCLTYSYLSHVDLVKDLNSGLIGALLVCREGSLAKEKTQTLHKFILLFAVFDEGKSWHSETKNSLMQDRDAASARAWPKMHTVNGYVNRTLPGLIGCHRKSVYWHVIGMGTTPEVHSIFLEGHTFLVRNHRQASLEISPITFLTAQTLLMDLGQFLLFCHISSHQHDGMEAYVKVDSCPEEPQLRMKNNEEAEDYDDDLTDSEMDVVRFDDDNSPSIIQIRSVAKKGPKTWVHYIAAEEEDWDYAPLVLAPDDRSYKSQYLNNGPQRIGRKYKKVRFMAYTDETFKTREAIQHESGILGPLLYGEVGDTLLIIFKNQASRPYNIYPHGITDVRPLYSRRLPKGVKHLKDFPILPGEIFKYKWTVTVEDGPTKSDPRCLTRYYSSFVNMERDLASGLIGPLLICYKESVDQRGNQIMSDKRNVILFSVFDENRSWYLTENIQRFLPNPAGVQLEDPEFQASNIMHSINGYVFDSLQLSVCLHEVAYWYILSIGAQTDFLSVFFSGYTFKHKMVYEDTLTLFPFSGETVFMSMENPGLWILGCHNSDFRNRGMTALLKVSSCDKNTGDYYEDSYEDISAYLDSKNNAIEPRSFSQNPPVLKRHQREITRTTLQSDQEEIDYDDTISVEMKKEDFDIYDEDENQSPRSFQKKTRHYFIAAVERLWDYGMSSSPHVLRNRAQSGSVPQFKKVVFQEFTDGSFTQPLYRGELNEHLGLLGPYIRAEVEDNIMVTFRNQASRPYSFYSSLISYEEDQRQGAEPRKNFVKPNETKTYFWKVQHHMAPTKDEFDCKAWAYFSDVDLEKDVHSGLIGPLLVCHTNTLNPAHGRQVTVQEFALFFTIFDETKSWYFTENMERNCRAPCNIQMEDPTFKENYRFHAINGYIMDTLPGLVMAQDQRIRWYLLSMGSNENIHSIHFSGHVFTVRKKEEYKMALYNLYPGVFETVEMLPSKAGIWRVECLIGEHLHAGMSTLFLVYSNKCQTPLGMASGHIRDFQITASGQYGQWAPKLARLHYSGSINAWSTKEPFSWIKVDLLAPMIIHGIKTQGARQKFSSLYISQFIIMYSLDGKKWQTYRGNSTGTDMVFFGNVDSSGIKHNIFNPPIIARYIRLHPTHYSIRSTLRMELMGCDLNSCSMPLGMESKAISDAQITASSYFTNMFATWSPSKARLHLQGRSNAWRPQVNNPKEWLQVDFQKTMKVTGVTTQGVKSLDTSMYVKEFLISSSQDGHQWTLFFQNGKVKVFQGNQDSFTPVVNSLDPPLLTRYLRIHPQSWEHQIALRMEVLGCEAQDLY

SEQ ID NO: 935 - DNA, 4371 bp, synthetic construct
  misc_feature 1..4371: note = Variant of human B-domain deleted Factor VIII
  source 1..4371: mol_type = other DNA
atgcagattgaactgtctacctgcttcttcctctgtttgctgaggttctgctttagcgccactagacggtactaccttggcgctgtggagctgtcctgggactatatgcagagtgatttgggagagcttcccgtcgacgcacgatttcctcctcgcgttccaaagtcatttccctttaacacaagcgtggtgtacaagaagacgctcttcgtcgaattcaccgatcacctgttcaatatcgccaaacccagaccaccatggatgggtcttttggggcctaccatacaagcggaggtgtatgacacagttgttatcactctcaagaacatggcttctcatccggtaagtcttcacgcagtgggcgtgtcctactggaaagcttcagaaggagccgagtatgatgatcagacatcccagagggagaaagaagacgacaaggtatttccaggtgggtctcatacctatgtgtggcaagtgctcaaagagaatggccctatggcaagcgatccgccgtgtttgacttacagctacctttcacacgttgacctcgtcaaggacctcaactccgggttgattggagccttgttggtatgcagggaaggatctcttgccaaagagaagacacagaccctccacaagtttatccttctctttgctgtgttcgatgagggcaaaagttggcatagcgaaacgaagaattccctcatgcaggatcgcgacgcagccagcgccagagcttggcccaagatgcacactgtgaacggatatgtcaataggacgcttcctggcttgattgggtgtcatcggaaaagtgtctactggcacgtgatcggaatggggacaacaccagaggtccactccatatttctcgaaggccataccttccttgttcgaaaccacagacaggcatccttggggatctctcccattacctttctcactgcccaaacgctccttatggacttgggtcagttccttctcttttgccatatcccgtcacaccagcatgatggtatggaagcttatgtgaaagtcgacagttgtcctgaggagccacagttgcgcatgaagaataatgaagaagccgaggattacgacgacgatctcaccgattctgagatggacgtggtgaggtttgatgacgacaactctccctccatcattcaagctcggagcgtggcgaagaaacaccccaagacttgggtccactatatagcggcggaagaggaggattgggattacgctcctcttgtattggcaccagatgaccgctcatacaaaagccagtacctcaacaacggaccgcagagaattggccggaagtataagaaagtgcgatttatggcctatacagacgaaacctttaagacaagggaggccatccagcatgagagtgggattttgggacctcttctttacggcgaagttggtgataccctcctcatcatcttcaagaatcaagcttctcgcccctataacatttacccacacgggatcactgacgttaggcctttgtatagcagaagacttcccaaaggcgtgaagcatctcaaagacttccccattttgccaggcgagatctttaagtacaaatggaccgtcacagtggaagatggaccgactaaatcagaccctcgatgccttacgcggtactattcctccttcgtgaatatggagagagatttggcaagcggactcataggaccactcctcatctgttacaaggaatctgtagaccagaggggtaaccagattatgagtgataaacgcaatgtgatcctttttagcgtcttcgacgagaaccggtcctggtacttgaccgagaatatacaaaggttccttcccaaccccgcaggcaaccagttggaagaccctgagtttcaggccagcaatattatgcactcaatcaacggctatgtgtttgatagtctccagctttctgtttgcctccatgaagtagcctattggtacatcttgtcaattggtgctcaaacagacttcctctccgtcttcttctccggctacacctttaagcacaagatggtgtatgaggacactctcacactctttccattttctggagaaaccgtgttcatgagcatggagaatccaggcctttggatcttgggttgccacaacagtgattttcgcaatcggggaatgactgctctcctcaaagtcagcagctgtgataagaacacaggcgactattacgaagattcttacgaggacataagtgcctactttgactccaagaataacgccattgagcccagatcattctcccagaatcctcccgtgcttaaaaggcatcagcgcgaaatcaccagaactactcttcagtctgatcaagaggagattgactatgacgacaccataagcgtggaaatgaagaaggaggatttcgatatctatgacgaagatgagaaccagtctccgcggagctttcagaagaagacgcgacactacttcattgcagcagtcgaaaggctttgggactacggtatgtcatcatcccctcatgtgttgcgcaatagagctcagagtggaagtgttccacagttcaagaaagtcgtctttcaagagtttacagatggcagcttcacacagcctctctatcggggcgagcttaacgaacatttgggactccttggtccctatatccgagccgaagtggaggacaacattatggttacctttaggaatcaagcctctcgcccctacagcttctactcctccctcatcagttatgaggaggatcagagacaaggcgctgaaccacggaagaactttgtgaaaccgaatgagacgaagacctacttctggaaagtacagcaccacatggcccccacaaaagacgaattcgattgcaaagcatgggcgtatttttcagacgttgacttggagaaagatgtacattcaggacttattggtcctttgttggtgtgtcacactaacactctcaatccagcccatggcaggcaggtgacagtccaggaattcgctcttttctttaccatctttgatgagaccaagtcctggtacttcacggaaaacatggagcgcaattgcagagccccctgtaacatacagatggaggaccctacctttaaggaaaattatcggttccacgcaatcaacggatacattatggatacactccctggccttgtgatggctcaggaccaacgaatcaggtggtacctcctcagcatgggttctaatgagaacatacactccattcacttttcaggacatgtgttcactgtccggaagaaagaagagtataagatggccctctacaatttgtatccaggcgtgtttgagaccgttgaaatgcttccctctaaagctggcatctggagagtagagtgcttgatcggagaacatcttcacgcaggtatgagcaccttgttcctcgtgtacagcaacaaatgtcagaccccacttggcatggccagtggacacattcgcgactttcagatcacagcatctggccagtatggacaatgggccccaaagttggctcgcctccattactccggtagcataaatgcgtggtccactaaagaacctttcagctggattaaggtcgatcttcttgcccccatgatcatccacggcattaagacacagggagcgaggcagaaattctcctccctctacatctcacagttcattattatgtatagtttggacggcaagaagtggcaaacttatagaggtaacagtactggaacagacatggtgttcttcggcaacgttgatagctctggcatcaaacacaacatctttaatcctcccataatagctcggtacatcagattgcatccgacccactacagcattaggagtacactccgaatggagcttatgggttgcgacttgaattcctgttcaatgccactcggaatggagtctaaagccatctctgatgcacagataaccgccagtagctactttacgaacatgtttgctacgtggtcaccctctaaggcaaggcttcatttgcaaggccggtctaatgcctggagacctcaggtgaacaacccgaaagaatggctccaggtggactttcagaagaccatgaaagtaacaggtgtcactactcagggagttaagtccttggatactagcatgtatgtgaaggagttccttatttcctcatcacaagatggccaccagtggaccctcttctttcagaatggtaaggtcaaagtgtttcagggcaatcaagacagcttcacacccgtggtgaacagtcttgatcctccactcttgacacgataccttcgaatccatccacagtcttgggagcaccagattgcattgcgcatggaagtacttggatgcgaggctcaggacctctac

SEQ ID NO: 936 - protein, 1457 aa, synthetic construct
  REGION 1..1457: note = Variant of human B-domain deleted Factor VIII
MQIELSTCFFLCLLRFCFSATRRYYLGAVELSWDYMQSDLGELPVDARFPPRVPKSFPFNTSVVYKKTLFVEFTDHLFNIAKPRPPWMGLLGPTIQAEVYDTVVITLKNMASHPVSLHAVGVSYWKASEGAEYDDQTSQREKEDDKVFPGGSHTYVWQVLKENGPMASDPPCLTYSYLSHVDLVKDLNSGLIGALLVCREGSLAKEKTQTLHKFILLFAVFDEGKSWHSETKNSLMQDRDAASARAWPKMHTVNGYVNRTLPGLIGCHRKSVYWHVIGMGTTPEVHSIFLEGHTFLVRNHRQASLGISPITFLTAQTLLMDLGQFLLFCHIPSHQHDGMEAYVKVDSCPEEPQLRMKNNEEAEDYDDDLTDSEMDVVRFDDDNSPSIIQARSVAKKHPKTWVHYIAAEEEDWDYAPLVLAPDDRSYKSQYLNNGPQRIGRKYKKVRFMAYTDETFKTREAIQHESGILGPLLYGEVGDTLLIIFKNQASRPYNIYPHGITDVRPLYSRRLPKGVKHLKDFPILPGEIFKYKWTVTVEDGPTKSDPRCLTRYYSSFVNMERDLASGLIGPLLICYKESVDQRGNQIMSDKRNVILFSVFDENRSWYLTENIQRFLPNPAGNQLEDPEFQASNIMHSINGYVFDSLQLSVCLHEVAYWYILSIGAQTDFLSVFFSGYTFKHKMVYEDTLTLFPFSGETVFMSMENPGLWILGCHNSDFRNRGMTALLKVSSCDKNTGDYYEDSYEDISAYFDSKNNAIEPRSFSQNPPVLKRHQREITRTTLQSDQEEIDYDDTISVEMKKEDFDIYDEDENQSPRSFQKKTRHYFIAAVERLWDYGMSSSPHVLRNRAQSGSVPQFKKVVFQEFTDGSFTQPLYRGELNEHLGLLGPYIRAEVEDNIMVTFRNQASRPYSFYSSLISYEEDQRQGAEPRKNFVKPNETKTYFWKVQHHMAPTKDEFDCKAWAYFSDVDLEKDVHSGLIGPLLVCHTNTLNPAHGRQVTVQEFALFFTIFDETKSWYFTENMERNCRAPCNIQMEDPTFKENYRFHAINGYIMDTLPGLVMAQDQRIRWYLLSMGSNENIHSIHFSGHVFTVRKKEEYKMALYNLYPGVFETVEMLPSKAGIWRVECLIGEHLHAGMSTLFLVYSNKCQTPLGMASGHIRDFQITASGQYGQWAPKLARLHYSGSINAWSTKEPFSWIKVDLLAPMIIHGIKTQGARQKFSSLYISQFIIMYSLDGKKWQTYRGNSTGTDMVFFGNVDSSGIKHNIFNPPIIARYIRLHPTHYSIRSTLRMELMGCDLNSCSMPLGMESKAISDAQITASSYFTNMFATWSPSKARLHLQGRSNAWRPQVNNPKEWLQVDFQKTMKVTGVTTQGVKSLDTSMYVKEFLISSSQDGHQWTLFFQNGKVKVFQGNQDSFTPVVNSLDPPLLTRYLRIHPQSWEHQIALRMEVLGCEAQDLY

SEQ ID NO: 937 - DNA, 4371 bp, synthetic construct
  misc_feature 1..4371: note = Variant of human B-domain deleted Factor VIII
  source 1..4371: mol_type = other DNA
atgcagattgaactgtctacctgcttcttcctctgtttgctgaggttctgctttagcgccactagacggtactaccttggcgctgtggagctgtcctgggactatatgcagagtgatttgggagagcttcccgtcgacgcacgatttcctcctcgcgttccaaagtcatttccctttaacacaagcgtggtgtacaagaagacgctcttcgtcgaattcaccgatcacctgttcaatatcgccaaacccagaccaccatggatgggtcttttggggcctaccatacaagcggaggtgtatgacacagttgttatcactctcaagaacatggcttctcatccggtaagtcttcacgcagtgggcgtgtcctactggaaagcttcagaaggagccgagtatgatgatcagacatcccagagggagaaagaagacgacaaggtatttccaggtgggtctcatacctatgtgtggcaagtgctcaaagagaatggccctatggcaagcgatccgccgtgtttgacttacagctacctttcacacgttgacctcgtcaaggacctcaactccgggttgattggagccttgttggtatgcagggaaggatctcttgccaaagagaagacacagaccctccacaagtttatccttctctttgctgtgttcgatgagggcaaaagttggcatagcgaaacgaagaattccctcatgcaggatcgcgacgcagccagcgccagagcttggcccaagatgcacactgtgaacggatatgtcaataggacgcttcctggcttgattgggtgtcatcggaaaagtgtctactggcacgtgatcggaatggggacaacaccagaggtccactccatatttctcgaaggccataccttccttgttcgaaaccacagacaggcatccttggggatctctcccattacctttctcactgcccaaacgctccttatggacttgggtcagttccttctcttttgccatatcccgtcacaccagcatgatggtatggaagcttatgtgaaagtcgacagttgtcctgaggagccacagttgcgcatgaagaataatgaagaagccgaggattacgacgacgatctcaccgattctgagatggacgtggtgaggtttgatgacgacaactctccctccatcattcaagctcggagcgtggcgaagaaacaccccaagacttgggtccactatatagcggcggaagaggaggattgggattacgctcctcttgtattggcaccagatgaccgctcatacaaaagccagtacctcaacaacggaccgcagagaattggccggaagtataagaaagtgcgatttatggcctatacagacgaaacctttaagacaagggaggccatccagcatgagagtgggattttgggacctcttctttacggcgaagttggtgataccctcctcatcatcttcaagaatcaagcttctcgcgaatataacatttacccacacgggatcactgacgttaggcctttgtatagcagaagacttcccaaaggcgtgaagcatctcaaagacttccccattttgccaggcgagatctttaagtacaaatggaccgtcacagtggaagatggaccgactaaatcagaccctcgatgccttacgcggtactattcctccttcgtgaatatggagagagatttggcaagcggactcataggaccactcctcatctgttacaaggaatctgtagaccagaggggtaaccagattatgagtgataaacgcaatgtgatcctttttagcgtcttcgacgagaaccggtcctggtacttgaccgagaatatacaaaggttccttcccaaccccgcaggcgttcagttggaagaccctgagtttcaggccagcaatattatgcactcaatcaacggctatgtgtttgatagtctccagctttctgtttgcctccatgaagtagcctattggtacatcttgtcaattggtgctcaaacagacttcctctccgtcttcttctccggctacacctttaagcacaagatggtgtatgaggacactctcacactctttccattttctggagaaaccgtgttcatgagcatggagaatccaggcctttggatcttgggttgccacaacagtgattttcgcaatcggggaatgactgctctcctcaaagtcagcagctgtgataagaacacaggcgactattacgaagattcttacgaggacataagtgcctactttgactccaagaataacgccattgagcccagatcattctcccagaatcctcccgtgcttaaaaggcatcagcgcgaaatcaccagaactactcttcagtctgatcaagaggagattgactatgacgacaccataagcgtggaaatgaagaaggaggatttcgatatctatgacgaagatgagaaccagtctccgcggagctttcagaagaagacgcgacactacttcattgcagcagtcgaaaggctttgggactacggtatgtcatcatcccctcatgtgttgcgcaatagagctcagagtggaagtgttccacagttcaagaaagtcgtctttcaagagtttacagatggcagcttcacacagcctctctatcggggcgagcttaacgaacatttgggactccttggtccctatatccgagccgaagtggaggacaacattatggttacctttaggaatcaagcctctcgcccctacagcttctactcctccctcatcagttatgaggaggatcagagacaaggcgctgaaccacggaagaactttgtgaaaccgaatgagacgaagacctacttctggaaagtacagcaccacatggcccccacaaaagacgaattcgattgcaaagcatgggcgtatttttcagacgttgacttggagaaagatgtacattcaggacttattggtcctttgttggtgtgtcacactaacactctcaatccagcccatggcaggcaggtgacagtccaggaattcgctcttttctttaccatctttgatgagaccaagtcctggtacttcacggaaaacatggagcgcaattgcagagccccctgtaacatacagatggaggaccctacctttaaggaaaattatcggttccacgcaatcaacggatacattatggatacactccctggccttgtgatggctcaggaccaacgaatcaggtggtacctcctcagcatgggttctaatgagaacatacactccattcacttttcaggacatgtgttcactgtccggaagaaagaagagtataagatggccctctacaatttgtatccaggcgtgtttgagaccgttgaaatgcttccctctaaagctggcatctggagagtagagtgcttgatcggagaacatcttcacgcaggtatgagcaccttgttcctcgtgtacagcaacaaatgtcagaccccacttggcatggccagtggacacattcgcgactttcagatcacagcatctggccagtatggacaatgggccccaaagttggctcgcctccattactccggtagcataaatgcgtggtccactaaagaacctttcagctggattaaggtcgatcttcttgcccccatgatcatccacggcattaagacacagggagcgaggcagaaattctcctccctctacatctcacagttcattattatgtatagtttggacggcaagaagtggcaaacttatagaggtaacagtactggaacagacatggtgttcttcggcaacgttgatagctctggcatcaaacacaacatctttaatcctcccataatagctcggtacatcagattgcatccgacccactacagcattaggagtacactccgaatggagcttatgggttgcgacttgaattcctgttcaatgccactcggaatggagtctaaagccatctctgatgcacagataaccgccagtagctactttacgaacatgtttgctacgtggtcaccctctaaggcaaggcttcatttgcaaggccggtctaatgcctggagacctcaggtgaacaacccgaaagaatggctccaggtggactttcagaagaccatgaaagtaacaggtgtcactactcagggagttaagtccttggatactagcatgtatgtgaaggagttccttatttcctcatcacaagatggccaccagtggaccctcttctttcagaatggtaaggtcaaagtgtttcagggcaatcaagacagcttcacacccgtggtgaacagtcttgatcctccactcttgacacgataccttcgaatccatccacagtcttgggagcaccagattgcattgcgcatggaagtacttggatgcgaggctcaggacctctac

SEQ ID NO: 938 - protein, 1457 aa, synthetic construct
  REGION 1..1457: note = Variant of human B-domain deleted Factor VIII
MQIELSTCFFLCLLRFCFSATRRYYLGAVELSWDYMQSDLGELPVDARFPPRVPKSFPFNTSVVYKKTLFVEFTDHLFNIAKPRPPWMGLLGPTIQAEVYDTVVITLKNMASHPVSLHAVGVSYWKASEGAEYDDQTSQREKEDDKVFPGGSHTYVWQVLKENGPMASDPPCLTYSYLSHVDLVKDLNSGLIGALLVCREGSLAKEKTQTLHKFILLFAVFDEGKSWHSETKNSLMQDRDAASARAWPKMHTVNGYVNRTLPGLIGCHRKSVYWHVIGMGTTPEVHSIFLEGHTFLVRNHRQASLGISPITFLTAQTLLMDLGQFLLFCHIPSHQHDGMEAYVKVDSCPEEPQLRMKNNEEAEDYDDDLTDSEMDVVRFDDDNSPSIIQARSVAKKHPKTWVHYIAAEEEDWDYAPLVLAPDDRSYKSQYLNNGPQRIGRKYKKVRFMAYTDETFKTREAIQHESGILGPLLYGEVGDTLLIIFKNQASREYNIYPHGITDVRPLYSRRLPKGVKHLKDFPILPGEIFKYKWTVTVEDGPTKSDPRCLTRYYSSFVNMERDLASGLIGPLLICYKESVDQRGNQIMSDKRNVILFSVFDENRSWYLTENIQRFLPNPAGVQLEDPEFQASNIMHSINGYVFDSLQLSVCLHEVAYWYILSIGAQTDFLSVFFSGYTFKHKMVYEDTLTLFPFSGETVFMSMENPGLWILGCHNSDFRNRGMTALLKVSSCDKNTGDYYEDSYEDISAYFDSKNNAIEPRSFSQNPPVLKRHQREITRTTLQSDQEEIDYDDTISVEMKKEDFDIYDEDENQSPRSFQKKTRHYFIAAVERLWDYGMSSSPHVLRNRAQSGSVPQFKKVVFQEFTDGSFTQPLYRGELNEHLGLLGPYIRAEVEDNIMVTFRNQASRPYSFYSSLISYEEDQRQGAEPRKNFVKPNETKTYFWKVQHHMAPTKDEFDCKAWAYFSDVDLEKDVHSGLIGPLLVCHTNTLNPAHGRQVTVQEFALFFTIFDETKSWYFTENMERNCRAPCNIQMEDPTFKENYRFHAINGYIMDTLPGLVMAQDQRIRWYLLSMGSNENIHSIHFSGHVFTVRKKEEYKMALYNLYPGVFETVEMLPSKAGIWRVECLIGEHLHAGMSTLFLVYSNKCQTPLGMASGHIRDFQITASGQYGQWAPKLARLHYSGSINAWSTKEPFSWIKVDLLAPMIIHGIKTQGARQKFSSLYISQFIIMYSLDGKKWQTYRGNSTGTDMVFFGNVDSSGIKHNIFNPPIIARYIRLHPTHYSIRSTLRMELMGCDLNSCSMPLGMESKAISDAQITASSYFTNMFATWSPSKARLHLQGRSNAWRPQVNNPKEWLQVDFQKTMKVTGVTTQGVKSLDTSMYVKEFLISSSQDGHQWTLFFQNGKVKVFQGNQDSFTPVVNSLDPPLLTRYLRIHPQSWEHQIALRMEVLGCEAQDLY

SEQ ID NO: 939 - DNA, 4371 bp, synthetic construct
  misc_feature 1..4371: note = Variant of human B-domain deleted Factor VIII
  source 1..4371: mol_type = other DNA
atgcagattgaactgtctacctgcttcttcctctgtttgctgaggttctgctttagcgccactagacggtactaccttggcgctgtggagctgtcctgggactatatgcagagtgatttgggagagcttcccgtcgacgcacgatttcctcctcgcgttccaaagtcatttccctttaacacaagcgtggtgtacaagaagacgctcttcgtcgaattcaccgatcacctgttcaatatcgccaaacccagaccaccatggatgggtcttttggggcctaccatacaagcggaggtgtatgacacagttgttatcactctcaagaacatggcttctcatccggtaagtcttcacgcagtgggcgtgtcctactggaaagcttcagaaggagccgagtatgatgatcagacatcccagagggagaaagaagacgacaaggtatttccaggtgggtctcatacctatgtgtggcaagtgctcaaagagaatggccctatggcaagcgatccgccgtgtttgacttacagctacctttcacacgttgacctcgtcaaggacctcaactccgggttgattggagccttgttggtatgcagggaaggatctcttgccaaagagaagacacagaccctccacaagtttatccttctctttgctgtgttcgatgagggcaaaagttggcatagcgaaacgaagaattccctcatgcaggatcgcgacgcagccagcgccagagcttggcccaagatgcacactgtgaacggatatgtcaataggacgcttcctggcttgattgggtgtcatcggaaaagtgtctactggcacgtgatcggaatggggacaacaccagaggtccactccatatttctcgaaggccataccttccttgttcgaaaccacagacaggcatccttggggatctctcccattacctttctcactgcccaaacgctccttatggacttgggtcagttccttctcttttgccatatcccgtcacaccagcatgatggtatggaagcttatgtgaaagtcgacagttgtcctgaggagccacagttgcgcatgaagaataatgaagaagccgaggattacgacgacgatctcaccgattctgagatggacgtggtgaggtttgatgacgacaactctccctccatcattcaagctcggagcgtggcgaagaaacaccccaagacttgggtccactatatagcggcggaagaggaggattgggattacgctcctcttgtattggcaccagatgaccgctcatacaaaagccagtacctcaacaacggaccgcagagaattggccggaagtataagaaagtgcgatttatggcctatacagacgaaacctttaagacaagggaggccatccagcatgagagtgggattttgggacctcttctttacggcgaagttggtgataccctcctcatcatcttcaagaatcaagcttctcgcccctataacatttacccacacgggatcactgacgttaggcctttgtatagcagaagacttcccaaaggcgtgaagcatctcaaagacttccccattttgccaggcgagatctttaagtacaaatggaccgtcacagtggaagatggaccgactaaatcagaccctcgatgccttacgcggtactattcctccttcgtgaatatggagagagatttggcaagcggactcataggaccactcctcatctgttacaaggaatctgtagaccagaggggtaaccagattatgagtgataaacgcaatgtgatcctttttagcgtcttcgacgagaaccggtcctggtacttgaccgagaatatacaaaggttccttcccaaccccgcaggcgttcagttggaagaccctgagtttcaggccagcaatattatgcactcaatcaacggctatgtgtttgatagtctccagctttctgtttgcctccatgaagtagcctattggtacatcttgtcaattggtgctcaaacagacttcctctccgtcttcttctccggctacacctttaagcacaagatggtgtatgaggacactctcacactctttccattttctggagaaaccgtgttcatgagcatggagaatccaggcctttggatcttgggttgccacaacagtgattttcgcaatcggggaatgactgctctcctcaaagtcagcagctgtgataagaacacaggcgactattacgaagattcttacgaggacataagtgcctactttgactccaagaataacgccattgagcccagatcattctcccagaatcctcccgtgcttaaaaggcatcagcgcgaaatcaccagaactactcttcagtctgatcaagaggagattgactatgacgacaccataagcgtggaaatgaagaaggaggatttcgatatctatgacgaagatgagaaccagtctccgcggagctttcagaagaagacgcgacactacttcattgcagcagtcgaaaggctttgggactacggtatgtcatcatcccctcatgtgttgcgcaatagagctcagagtggaagtgttccacagttcaagaaagtcgtctttcaagagtttacagatggcagcttcacacagcctctctatcggggcgagcttaacgaacatttgggactccttggtccctatatccgagccgaagtggaggacaacattatggttacctttaggaatcaagcctctcgcccctacagcttctactcctccctcatcagttatgaggaggatcagagacaaggcgctgaaccacggaagaactttgtgaaaccgaatgagacgaagacctacttctggaaagtacagcaccacatggcccccacaaaagacgaattcgattgcaaagcatgggcgtatttttcagacgttgacttggagaaagatgtacattcaggacttattggtcctttgttggtgtgtcacactaacactctcaatccagcccatggcaggcaggtgacagtccaggaattcgctcttttctttaccatctttgatgagaccaagtcctggtacttcacggaaaacatggagcgcaattgcagagccccctgtaacatacagatggaggaccctacctttaaggaaaattatcggttccacgcaatcaacggatacattatggatacactccctggccttgtgatggctcaggaccaacgaatcaggtggtacctcctcagcatgggttctaatgagaacatacactccattcacttttcaggacatgtgttcactgtccggaagaaagaagagtataagatggccctctacaatttgtatccaggcgtgtttgagaccgttgaaatgcttccctctaaagctggcatctggagagtagagtgcttgatcggagaacatcttcacgcaggtatgagcaccttgttcctcgtgtacagcaacaaatgtcagaccccacttggcatggccagtggacacattcgcgactttcagatcacagcatctggccagtatggacaatgggccccaaagttggctcgcctccattactccggtagcataaatgcgtggtccactaaagaacctttcagctggattaaggtcgatcttcttgcccccatgatcatccacggcattaagacacagggagcgaggcagaaattctcctccctctacatctcacagttcattattgattatagtttggacggcaagaagtggcaaacttatagaggtaacagtactggaacagacatggtgttcttcggcaacgttgatagctctggcatcaaacacaacatctttaatcctcccataatagctcggtacatcagattgcatccgacccactacagcattaggagtacactccgaatggagcttatgggttgcgacttgaattcctgttcaatgccactcggaatggagtctaaagccatctctgatgcacagataaccgccagtagctactttacgaacatgtttgctacgtggtcaccctctaaggcaaggcttcatttgcaaggccggtctaatgcctggagacctcaggtgaacaacccgaaagaatggctccaggtggactttcagaagaccatgaaagtaacaggtgtcactactcagggagttaagtccttggatactagcatgtatgtgaaggagttccttatttcctcatcacaagatggccaccagtggaccctcttctttcagaatggtaaggtcaaagtgtttcagggcaatcaagacagcttcacacccgtggtgaacagtcttgatcctccactcttgacacgataccttcgaatccatccacagtcttgggagcaccagattgcattgcgcatggaagtacttggatgcgaggctcaggacctctac

SEQ ID NO: 940 - protein, 1457 aa, synthetic construct
  REGION 1..1457: note = Variant of human B-domain deleted Factor VIII
MQIELSTCFFLCLLRFCFSATRRYYLGAVELSWDYMQSDLGELPVDARFPPRVPKSFPFNTSVVYKKTLFVEFTDHLFNIAKPRPPWMGLLGPTIQAEVYDTVVITLKNMASHPVSLHAVGVSYWKASEGAEYDDQTSQREKEDDKVFPGGSHTYVWQVLKENGPMASDPPCLTYSYLSHVDLVKDLNSGLIGALLVCREGSLAKEKTQTLHKFILLFAVFDEGKSWHSETKNSLMQDRDAASARAWPKMHTVNGYVNRTLPGLIGCHRKSVYWHVIGMGTTPEVHSIFLEGHTFLVRNHRQASLGISPITFLTAQTLLMDLGQFLLFCHIPSHQHDGMEAYVKVDSCPEEPQLRMKNNEEAEDYDDDLTDSEMDVVRFDDDNSPSIIQARSVAKKHPKTWVHYIAAEEEDWDYAPLVLAPDDRSYKSQYLNNGPQRIGRKYKKVRFMAYTDETFKTREAIQHESGILGPLLYGEVGDTLLIIFKNQASRPYNIYPHGITDVRPLYSRRLPKGVKHLKDFPILPGEIFKYKWTVTVEDGPTKSDPRCLTRYYSSFVNMERDLASGLIGPLLICYKESVDQRGNQIMSDKRNVILFSVFDENRSWYLTENIQRFLPNPAGVQLEDPEFQASNIMHSINGYVFDSLQLSVCLHEVAYWYILSIGAQTDFLSVFFSGYTFKHKMVYEDTLTLFPFSGETVFMSMENPGLWILGCHNSDFRNRGMTALLKVSSCDKNTGDYYEDSYEDISAYFDSKNNAIEPRSFSQNPPVLKRHQREITRTTLQSDQEEIDYDDTISVEMKKEDFDIYDEDENQSPRSFQKKTRHYFIAAVERLWDYGMSSSPHVLRNRAQSGSVPQFKKVVFQEFTDGSFTQPLYRGELNEHLGLLGPYIRAEVEDNIMVTFRNQASRPYSFYSSLISYEEDQRQGAEPRKNFVKPNETKTYFWKVQHHMAPTKDEFDCKAWAYFSDVDLEKDVHSGLIGPLLVCHTNTLNPAHGRQVTVQEFALFFTIFDETKSWYFTENMERNCRAPCNIQMEDPTFKENYRFHAINGYIMDTLPGLVMAQDQRIRWYLLSMGSNENIHSIHFSGHVFTVRKKEEYKMALYNLYPGVFETVEMLPSKAGIWRVECLIGEHLHAGMSTLFLVYSNKCQTPLGMASGHIRDFQITASGQYGQWAPKLARLHYSGSINAWSTKEPFSWIKVDLLAPMIIHGIKTQGARQKFSSLYISQFIIDYSLDGKKWQTYRGNSTGTDMVFFGNVDSSGIKHNIFNPPIIARYIRLHPTHYSIRSTLRMELMGCDLNSCSMPLGMESKAISDAQITASSYFTNMFATWSPSKARLHLQGRSNAWRPQVNNPKEWLQVDFQKTMKVTGVTTQGVKSLDTSMYVKEFLISSSQDGHQWTLFFQNGKVKVFQGNQDSFTPVVNSLDPPLLTRYLRIHPQSWEHQIALRMEVLGCEAQDLY

SEQ ID NO: 941 - DNA, 4371 bp, synthetic construct
  misc_feature 1..4371: note = Variant of human B-domain deleted Factor VIII
  source 1..4371: mol_type = other DNA
atgcagattgaactgtctacctgcttcttcctctgtttgctgaggttctgctttagcgccactagacggtactaccttggcgctgtggagctgtcctgggactatatgcagagtgatttgggagagcttcccgtcgacgcacgatttcctcctcgcgttccaaagtcatttccctttaacacaagcgtggtgtacaagaagacgctcttcgtcgaattcaccgatcacctgttcaatatcgccaaacccagaccaccatggatgggtcttttggggcctaccatacaagcggaggtgtatgacacagttgttatcactctcaagaacatggcttctcatccggtaagtcttcacgcagtgggcgtgtcctactggaaagcttcagaaggagccgagtatgatgatcagacatcccagagggagaaagaagacgacaaggtatttccaggtgggtctcatacctatgtgtggcaagtgctcaaagagaatggccctatggcaagcgatccgccgtgtttgacttacagctacctttcacacgttgacctcgtcaaggacctcaactccgggttgattggagccttgttggtatgcagggaaggatctcttgccaaagagaagacacagaccctccacaagtttatccttctctttgctgtgttcgatgagggcaaaagttggcatagcgaaacgaagaattccctcatgcaggatcgcgacgcagccagcgccagagcttggcccaagatgcacactgtgaacggatatgtcaataggacgcttcctggcttgattgggtgtcatcggaaaagtgtctactggcacgtgatcggaatggggacaacaccagaggtccactccatatttctcgaaggccataccttccttgttcgaaaccacagacaggcatccttggggatctctcccattacctttctcactgcccaaacgctccttatggacttgggtcagttccttctcttttgccatatcccgtcacaccagcatgatggtatggaagcttatgtgaaagtcgacagttgtcctgaggagccacagttgcgcatgaagaataatgaagaagccgaggattacgacgacgatctcaccgattctgagatggacgtggtgaggtttgatgacgacaactctccctccatcattcaagctcggagcgtggcgaagaaacaccccaagacttgggtccactatatagcggcggaagaggaggattgggattacgctcctcttgtattggcaccagatgaccgctcatacaaaagccagtacctcaacaacggaccgcagagaattggccggaagtataagaaagtgcgatttatggcctatacagacgaaacctttaagacaagggaggccatccagcatgagagtgggattttgggacctcttctttacggcgaagttggtgataccctcctcatcatcttcaagaatcaagcttctcgcccctataacatttacccacacgggatcactgacgttaggcctttgtatagcagaagacttcccaaaggcgtgaagcatctcaaagacttccccattttgccaggcgagatctttaagtacaaatggaccgtcacagtggaagatggaccgactaaatcagaccctcgatgccttacgcggtactattcctccttcgtgaatatggagagagatttggcaagcggactcataggaccactcctcatctgttacaaggaatctgtagaccagaggggtaaccagattatgagtgataaacgcaatgtgatcctttttagcgtcttcgacgagaaccggtcctggtacttgaccgagaatatacaaaggttccttaacaaccccgcaggcgttcagttggaagaccctgagtttcaggccagcaatattatgcactcaatcaacggctatgtgtttgatagtctccagctttctgtttgcctccatgaagtagcctattggtacatcttgtcaattggtgctcaaacagacttcctctccgtcttcttctccggctacacctttaagcacaagatggtgtatgaggacactctcacactctttccattttctggagaaaccgtgttcatgagcatggagaatccaggcctttggatcttgggttgccacaacagtgattttcgcaatcggggaatgactgctctcctcaaagtcagcagctgtgataagaacacaggcgactattacgaagattcttacgaggacataagtgcctactttgactccaagaataacgccattgagcccagatcattctcccagaatcctcccgtgcttaaaaggcatcagcgcgaaatcaccagaactactcttcagtctgatcaagaggagattgactatgacgacaccataagcgtggaaatgaagaaggaggatttcgatatctatgacgaagatgagaaccagtctccgcggagctttcagaagaagacgcgacactacttcattgcagcagtcgaaaggctttgggactacggtatgtcatcatcccctcatgtgttgcgcaatagagctcagagtggaagtgttccacagttcaagaaagtcgtctttcaagagtttacagatggcagcttcacacagcctctctatcggggcgagcttaacgaacatttgggactccttggtccctatatccgagccgaagtggaggacaacattatggttacctttaggaatcaagcctctcgcccctacagcttctactcctccctcatcagttatgaggaggatcagagacaaggcgctgaaccacggaagaactttgtgaaaccgaatgagacgaagacctacttctggaaagtacagcaccacatggcccccacaaaagacgaattcgattgcaaagcatgggcgtatttttcagacgttgacttggagaaagatgtacattcaggacttattggtcctttgttggtgtgtcacactaacactctcaatccagcccatggcaggcaggtgacagtccaggaattcgctcttttctttaccatctttgatgagaccaagtcctggtacttcacggaaaacatggagcgcaattgcagagccccctgtaacatacagatggaggaccctacctttaaggaaaattatcggttccacgcaatcaacggatacattatggatacactccctggccttgtgatggctcaggaccaacgaatcaggtggtacctcctcagcatgggttctaatgagaacatacactccattcacttttcaggacatgtgttcactgtccggaagaaagaagagtataagatggccctctacaatttgtatccaggcgtgtttgagaccgttgaaatgcttccctctaaagctggcatctggagagtagagtgcttgatcggagaacatcttcacgcaggtatgagcaccttgttcctcgtgtacagcaacaaatgtcagaccccacttggcatggccagtggacacattcgcgactttcagatcacagcatctggccagtatggacaatgggccccaaagttggctcgcctccattactccggtagcataaatgcgtggtccactaaagaacctttcagctggattaaggtcgatcttcttgcccccatgatcatccacggcattaagacacagggagcgaggcagaaattctcctccctctacatctcacagttcattattatgtatagtttggacggcaagaagtggcaaacttatagaggtaacagtactggaacagacatggtgttcttcggcaacgttgatagctctggcatcaaacacaacatctttaatcctcccataatagctcggtacatcagattgcatccgacccactacagcattaggagtacactccgaatggagcttatgggttgcgacttgaattcctgttcaatgccactcggaatggagtctaaagccatctctgatgcacagataaccgccagtagctactttacgaacatgtttgctacgtggtcaccctctaaggcaaggcttcatttgcaaggccggtctaatgcctggagacctcaggtgaacaacccgaaagaatggctccaggtggactttcagaagaccatgaaagtaacaggtgtcactactcagggagttaagtccttggatactagcatgtatgtgaaggagttccttatttcctcatcacaagatggccaccagtggaccctcttctttcagaatggtaaggtcaaagtgtttcagggcaatcaagacagcttcacacccgtggtgaacagtcttgatcctccactcttgacacgataccttcgaatccatccacagtcttgggagcaccagattgcattgcgcatggaagtacttggatgcgaggctcaggacctctac

SEQ ID NO: 942 - protein, 1457 aa, synthetic construct
  REGION 1..1457: note = Variant of human B-domain deleted Factor VIII
MQIELSTCFFLCLLRFCFSATRRYYLGAVELSWDYMQSDLGELPVDARFPPRVPKSFPFNTSVVYKKTLFVEFTDHLFNIAKPRPPWMGLLGPTIQAEVYDTVVITLKNMASHPVSLHAVGVSYWKASEGAEYDDQTSQREKEDDKVFPGGSHTYVWQVLKENGPMASDPPCLTYSYLSHVDLVKDLNSGLIGALLVCREGSLAKEKTQTLHKFILLFAVFDEGKSWHSETKNSLMQDRDAASARAWPKMHTVNGYVNRTLPGLIGCHRKSVYWHVIGMGTTPEVHSIFLEGHTFLVRNHRQASLGISPITFLTAQTLLMDLGQFLLFCHIPSHQHDGMEAYVKVDSCPEEPQLRMKNNEEAEDYDDDLTDSEMDVVRFDDDNSPSIIQARSVAKKHPKTWVHYIAAEEEDWDYAPLVLAPDDRSYKSQYLNNGPQRIGRKYKKVRFMAYTDETFKTREAIQHESGILGPLLYGEVGDTLLIIFKNQASRPYNIYPHGITDVRPLYSRRLPKGVKHLKDFPILPGEIFKYKWTVTVEDGPTKSDPRCLTRYYSSFVNMERDLASGLIGPLLICYKESVDQRGNQIMSDKRNVILFSVFDENRSWYLTENIQRFLNNPAGVQLEDPEFQASNIMHSINGYVFDSLQLSVCLHEVAYWYILSIGAQTDFLSVFFSGYTFKHKMVYEDTLTLFPFSGETVFMSMENPGLWILGCHNSDFRNRGMTALLKVSSCDKNTGDYYEDSYEDISAYFDSKNNAIEPRSFSQNPPVLKRHQREITRTTLQSDQEEIDYDDTISVEMKKEDFDIYDEDENQSPRSFQKKTRHYFIAAVERLWDYGMSSSPHVLRNRAQSGSVPQFKKVVFQEFTDGSFTQPLYRGELNEHLGLLGPYIRAEVEDNIMVTFRNQASRPYSFYSSLISYEEDQRQGAEPRKNFVKPNETKTYFWKVQHHMAPTKDEFDCKAWAYFSDVDLEKDVHSGLIGPLLVCHTNTLNPAHGRQVTVQEFALFFTIFDETKSWYFTENMERNCRAPCNIQMEDPTFKENYRFHAINGYIMDTLPGLVMAQDQRIRWYLLSMGSNENIHSIHFSGHVFTVRKKEEYKMALYNLYPGVFETVEMLPSKAGIWRVECLIGEHLHAGMSTLFLVYSNKCQTPLGMASGHIRDFQITASGQYGQWAPKLARLHYSGSINAWSTKEPFSWIKVDLLAPMIIHGIKTQGARQKFSSLYISQFIIMYSLDGKKWQTYRGNSTGTDMVFFGNVDSSGIKHNIFNPPIIARYIRLHPTHYSIRSTLRMELMGCDLNSCSMPLGMESKAISDAQITASSYFTNMFATWSPSKARLHLQGRSNAWRPQVNNPKEWLQVDFQKTMKVTGVTTQGVKSLDTSMYVKEFLISSSQDGHQWTLFFQNGKVKVFQGNQDSFTPVVNSLDPPLLTRYLRIHPQSWEHQIALRMEVLGCEAQDLY

SEQ ID NO: 943 - DNA, 4371 bp, synthetic construct
  misc_feature 1..4371: note = Variant of human B-domain deleted Factor VIII
  source 1..4371: mol_type = other DNA
atgcagattgaactgtctacctgcttcttcctctgtttgctgaggttctgctttagcgccactagacggtactaccttggcgctgtggagctgtcctgggactatatgcagagtgatttgggagagcttcccgtcgacgcacgatttcctcctcgcgttccaaagtcatttccctttaacacaagcgtggtgtacaagaagacgctcttcgtcgaattcaccgatcacctgttcaatatcgccaaacccagaccaccatggatgggtcttttggggcctaccatacaagcggaggtgtatgacacagttgttatcactctcaagaacatggcttctcatccggtaagtcttcacgcagtgggcgtgtcctactggaaagcttcagaaggagccgagtatgatgatcagacatcccagagggagaaagaagacgacaaggtatttccaggtgggtctcatacctatgtgtggcaagtgctcaaagagaatggccctatggcaagcgatccgccgtgtttgacttacagctacctttcacacgttgacctcgtcaaggacctcaactccgggttgattggagccttgttggtatgcagggaaggatctcttgccaaagagaagacacagaccctccacaagtttatccttctctttgctgtgttcgatgagggcaaaagttggcatagcgaaacgaagaattccctcatgcaggatcgcgacgcagccagcgccagagcttggcccaagatgcacactgtgaacggatatgtcaataggacgcttcctggcttgattgggtgtcatcggaaaagtgtctactggcacgtgatcggaatggggacaacaccagaggtccactccatatttctcgaaggccataccttccttgttcgaaaccacagacaggcatccttggggatctctcccattacctttctcactgcccaaacgctccttatggacttgggtcagttccttctcttttgccatatcccgtcacaccagcatgatggtatggaagcttatgtgaaagtcgacagttgtcctgaggagccacagttgcgcatgaagaataatgaagaagccgaggattacgacgacgatctcaccgattctgagatggacgtggtgaggtttgatgacgacaactctccctccatcattcaagctcggagcgtggcgaagaaacaccccaagacttgggtccactatatagcggcggaagaggaggattgggattacgctcctcttgtattggcaccagatgaccgctcatacaaaagccagtacctcaacaacggaccgcagagaattggccggaagtataagaaagtgcgatttatggcctatacagacgaaacctttaagacaagggaggccatccagcatgagagtgggattttgggacctcttctttacggcgaagttggtgataccctcctcatcatcttcaagaatcaagcttctcgcccctataacatttacccacacgggatcactgacgttaggcctttgtatagcagaagacttcccaaaggcgtgaagcatctcaaagacttccccattttgccaggcgagatctttaagtacaaatggaccgtcacagtggaagatggaccgactaaatcagaccctcgatgccttacgcggtactattcctccttcgtgaatatggagagagatttggcaagcggactcataggaccactcctcatctgttacaaggaatctgtagaccagaggggtaaccagattatgagtgataaacgcaatgtgatcctttttagcgtcttcgacgagaaccggtcctggtacttgaccgagaatatacaaaggttccttcccaaccccgcaggcgttcagttggaagaccctgagtttcaggccagcaatattatgcactcaatcaacggctatgtgtttgatagtctccagctttctgtttgcctccatgaagtagcctattggtacatcttgtcaattggtgctcaaacagacttcctctccgtcttcttctccggctacacctttaagcacaagatggtgtatgaggacactctcacactctttccattttctggagaaaccgtgttcatgagcatggagaatccaggcctttggatcttgggttgccacaacagtgattttcgcaatcggggaatgactgctctcctcaaagtcagcagctgtgataagaacacaggcgactattacgaagattcttacgaggacataagtgcctactttgactccaagaataacgccattgagcccagatcattctcccagaatcctcccgtgcttaaaaggcatcagcgcgaaatcaccagaactactcttcagtctgatcaagaggagattgactatgacgacaccataagcgtggaaatgaagaaggaggatttcgatatctatgacgaagatgagaaccagtctccgcggagctttcagaagaagacgcgacactacttcattgcagcagtcgaaaggctttgggactacggtatgtcatcatcccctcatgtgttgcgcaatagagctcagagtggaagtgttccacagttcaagaaagtcgtctttcaagagtttacagatggcagcttcacacagcctctctatcggggcgagcttaacgaacatttgggactccttggtccctatatccgagccgaagtggaggacaacattatggttacctttaggaatcaagcctctcgcccctacagcttctactcctccctcatcagttatgaggaggatcagagacaaggcgctgaaccacggaagaactttgtgaaaccgaatgagacgaagacctacttctggaaagtacagcaccacatggcccccacaaaagacgaattcgattgcaaagcatgggcgtatttttcagacgttgacttggagaaagatgtacattcaggacttattggtcctttgttggtgtgtcacactaacactctcaatccagcccatggcaggcaggtgacagtccaggaattcgctcttttctttaccatctttgatgagaccaagtcctggtacttcacggaaaacatggagcgcaattgcagagccccctgtaacatacagatggaggaccctacctttaaggaaaattatcggttccacgcaatcaacggatacattatggatacactccctggccttgtgatggctcaggaccaacgaatcaggtggtacctcctcagcatgggttctaatgagaacatacactccattcacttttcaggacatgtgttcactgtccggaagaaagaagagtataagatggccctctacaatttgtatccaggcgtgtttgagaccgttgaaatgcttccctctaaagctggcatctggagagtagagtgcttgatcggagaacatcttcacgcaggtatgagcaccttgttcctcgtgtacagcaacaaatgtcagaccccacttggcatggccagtggacacattcgcgactttcagatcacagcatctggccagtatggacaatgggccccaaagttggctcgcctccattactccggtagcataaatgcgtggtccactaaagaacctttcagctggattaaggtcgatcttcttgcccccatgatcatccacggcattaagacacagggagcgaggcagaaattctcctccctctacatctcacagttcattattatgtatagtttggacggcaagaagtggcaaacttatagaggtaacagtactggaacagacatggtgttcttcggcaacgttgatagctctggcatcaaacacaacatctttaatcctcccataatagctcggtacatcagattgcatccgacccactacagcagtaggagtacactccgaatggagcttatgggttgcgacttgaattcctgttcaatgccactcggaatggagtctaaagccatctctgatgcacagataaccgccagtagctactttacgaacatgtttgctacgtggtcaccctctaaggcaaggcttcatttgcaaggccggtctaatgcctggagacctcaggtgaacaacccgaaagaatggctccaggtggactttcagaagaccatgaaagtaacaggtgtcactactcagggagttaagtccttggatactagcatgtatgtgaaggagttccttatttcctcatcacaagatggccaccagtggaccctcttctttcagaatggtaaggtcaaagtgtttcagggcaatcaagacagcttcacacccgtggtgaacagtcttgatcctccactcttgacacgataccttcgaatccatccacagtcttgggagcaccagattgcattgcgcatggaagtacttggatgcgaggctcaggacctctac

SEQ ID NO: 944 - protein, 1457 aa, synthetic construct
  REGION 1..1457: note = Variant of human B-domain deleted Factor VIII
MQIELSTCFFLCLLRFCFSATRRYYLGAVELSWDYMQSDLGELPVDARFPPRVPKSFPFNTSVVYKKTLFVEFTDHLFNIAKPRPPWMGLLGPTIQAEVYDTVVITLKNMASHPVSLHAVGVSYWKASEGAEYDDQTSQREKEDDKVFPGGSHTYVWQVLKENGPMASDPPCLTYSYLSHVDLVKDLNSGLIGALLVCREGSLAKEKTQTLHKFILLFAVFDEGKSWHSETKNSLMQDRDAASARAWPKMHTVNGYVNRTLPGLIGCHRKSVYWHVIGMGTTPEVHSIFLEGHTFLVRNHRQASLGISPITFLTAQTLLMDLGQFLLFCHIPSHQHDGMEAYVKVDSCPEEPQLRMKNNEEAEDYDDDLTDSEMDVVRFDDDNSPSIIQARSVAKKHPKTWVHYIAAEEEDWDYAPLVLAPDDRSYKSQYLNNGPQRIGRKYKKVRFMAYTDETFKTREAIQHESGILGPLLYGEVGDTLLIIFKNQASRPYNIYPHGITDVRPLYSRRLPKGVKHLKDFPILPGEIFKYKWTVTVEDGPTKSDPRCLTRYYSSFVNMERDLASGLIGPLLICYKESVDQRGNQIMSDKRNVILFSVFDENRSWYLTENIQRFLPNPAGVQLEDPEFQASNIMHSINGYVFDSLQLSVCLHEVAYWYILSIGAQTDFLSVFFSGYTFKHKMVYEDTLTLFPFSGETVFMSMENPGLWILGCHNSDFRNRGMTALLKVSSCDKNTGDYYEDSYEDISAYFDSKNNAIEPRSFSQNPPVLKRHQREITRTTLQSDQEEIDYDDTISVEMKKEDFDIYDEDENQSPRSFQKKTRHYFIAAVERLWDYGMSSSPHVLRNRAQSGSVPQFKKVVFQEFTDGSFTQPLYRGELNEHLGLLGPYIRAEVEDNIMVTFRNQASRPYSFYSSLISYEEDQRQGAEPRKNFVKPNETKTYFWKVQHHMAPTKDEFDCKAWAYFSDVDLEKDVHSGLIGPLLVCHTNTLNPAHGRQVTVQEFALFFTIFDETKSWYFTENMERNCRAPCNIQMEDPTFKENYRFHAINGYIMDTLPGLVMAQDQRIRWYLLSMGSNENIHSIHFSGHVFTVRKKEEYKMALYNLYPGVFETVEMLPSKAGIWRVECLIGEHLHAGMSTLFLVYSNKCQTPLGMASGHIRDFQITASGQYGQWAPKLARLHYSGSINAWSTKEPFSWIKVDLLAPMIIHGIKTQGARQKFSSLYISQFIIMYSLDGKKWQTYRGNSTGTDMVFFGNVDSSGIKHNIFNPPIIARYIRLHPTHYSSRSTLRMELMGCDLNSCSMPLGMESKAISDAQITASSYFTNMFATWSPSKARLHLQGRSNAWRPQVNNPKEWLQVDFQKTMKVTGVTTQGVKSLDTSMYVKEFLISSSQDGHQWTLFFQNGKVKVFQGNQDSFTPVVNSLDPPLLTRYLRIHPQSWEHQIALRMEVLGCEAQDLY

SEQ ID NO: 945 - DNA, 4371 bp, synthetic construct
  misc_feature 1..4371: note = Variant of human B-domain deleted Factor VIII
  source 1..4371: mol_type = other DNA
atgcagattgaactgtctacctgcttcttcctctgtttgctgaggttctgctttagcgccactagacggtactaccttggcgctgtggagctgtcctgggactatatgcagagtgatttgggagagcttcccgtcgacgcacgatttcctcctcgcgttccaaagtcatttccctttaacacaagcgtggtgtacaagaagacgctcttcgtcgaattcaccgatcacctgttcaatatcgccaaacccagaccaccatggatgggtcttttggggcctaccatacaagcggaggtgtatgacacagttgttatcactctcaagaacatggcttctcatccggtaagtcttcacgcagtgggcgtgtcctactggaaagcttcagaaggagccgagtatgatgatcagacatcccagagggagaaagaagacgacaaggtatttccaggtgggtctcatacctatgtgtggcaagtgctcaaagagaatggccctatggcaagcgatccgccgtgtttgacttacagctacctttcacacgttgacctcgtcaaggacctcaactccgggttgattggagccttgttggtatgcagggaaggatctcttgccaaagagaagacacagaccctccacaagtttatccttctctttgctgtgttcgatgagggcaaaagttggcatagcgaaacgaagaattccctcatgcaggatcgcgacgcagccagcgccagagcttggcccaagatgcacactgtgaacggatatgtcaataggacgcttcctggcttgattgggtgtcatcggaaaagtgtctactggcacgtgatcggaatggggacaacaccagaggtccactccatatttctcgaaggccataccttccttgttcgaaaccacagacaggcatccttggggatctctcccattacctttctcactgcccaaacgctccttatggacttgggtcagttccttctcttttgccatatcccgtcacaccagcatgatggtatggaagcttatgtgaaagtcgacagttgtcctgaggagccacagttgcgcatgaagaataatgaagaagccgaggattacgacgacgatctcaccgattctgagatggacgtggtgaggtttgatgacgacaactctccctccatcattcaagctcggagcgtggcgaagaaacaccccaagacttgggtccactatatagcggcggaagaggaggattgggattacgctcctcttgtattggcaccagatgaccgctcatacaaaagccagtacctcaacaacggaccgcagagaattggccggaagtataagaaagtgcgatttatggcctatacagacgaaacctttaagacaagggaggccatccagcatgagagtgggattttgggacctcttctttacggcgaagttggtgataccctcctcatcatcttcaagaatcaagcttctcgcccctataacatttacccacacgggatcactgacgttaggcctttgtatagcagaagacttcccaaaggcgtgaagcatctcaaagacttccccattttgccaggcgagatctttaagtacaaatggaccgtcacagtggaagatggaccgactaaatcagaccctcgatgccttacgcggtactattcctccttcgtgaatatggagagagatttggcaagcggactcataggaccactcctcatctgttacaaggaatctgtagaccagaggggtaaccagattatgagtgataaacgcaatgtgatcctttttagcgtcttcgacgagaaccggtcctggtacttgaccgagaatatacaaaggttccttcccaaccccgcaggcgttcagttggaagaccctgagtttcaggccagcaatattatgcactcaatcaacggctatgtgtttgatagtctccagctttctgtttgcctccatgaagtagcctattggtacatcttgtcaattggtgctcaaacagacttcctctccgtcttcttctccggctacacctttaagcacaagatggtgtatgaggacactctcacactctttccattttctggagaaaccgtgttcatgagcatggagaatccaggcctttggatcttgggttgccacaacagtgattttcgcaatcggggaatgactgctctcctcaaagtcagcagctgtgataagaacacaggcgactattacgaagattcttacgaggacataagtgcctactttgactccaagaataacgccattgagcccagatcattctcccagaatcctcccgtgcttaaaaggcatcagcgcgaaatcaccagaactactcttcagtctgatcaagaggagattgactatgacgacaccataagcgtggaaatgaagaaggaggatttcgatatctatgacgaagatgagaaccagtctccgcggagctttcagaagaagacgcgatcttacttcattgcagcagtcgaaaggctttgggactacggtatgtcatcatcccctcatgtgttgcgcaatagagctcagagtggaagtgttccacagttcaagaaagtcgtctttcaagagtttacagatggcagcttcacacagcctctctatcggggcgagcttaacgaacatttgggactccttggtccctatatccgagccgaagtggaggacaacattatggttacctttaggaatcaagcctctcgcccctacagcttctactcctccctcatcagttatgaggaggatcagagacaaggcgctgaaccacggaagaactttgtgaaaccgaatgagacgaagacctacttctggaaagtacagcaccacatggcccccacaaaagacgaattcgattgcaaagcatgggcgtatttttcagacgttgacttggagaaagatgtacattcaggacttattggtcctttgttggtgtgtcacactaacactctcaatccagcccatggcaggcaggtgacagtccaggaattcgctcttttctttaccatctttgatgagaccaagtcctggtacttcacggaaaacatggagcgcaattgcagagccccctgtaacatacagatggaggaccctacctttaaggaaaattatcggttccacgcaatcaacggatacattatggatacactccctggccttgtgatggctcaggaccaacgaatcaggtggtacctcctcagcatgggttctaatgagaacatacactccattcacttttcaggacatgtgttcactgtccggaagaaagaagagtataagatggccctctacaatttgtatccaggcgtgtttgagaccgttgaaatgcttccctctaaagctggcatctggagagtagagtgcttgatcggagaacatcttcacgcaggtatgagcaccttgttcctcgtgtacagcaacaaatgtcagaccccacttggcatggccagtggacacattcgcgactttcagatcacagcatctggccagtatggacaatgggccccaaagttggctcgcctccattactccggtagcataaatgcgtggtccactaaagaacctttcagctggattaaggtcgatcttcttgcccccatgatcatccacggcattaagacacagggagcgaggcagaaattctcctccctctacatctcacagttcattattatgtatagtttggacggcaagaagtggcaaacttatagaggtaacagtactggaacagacatggtgttcttcggcaacgttgatagctctggcatcaaacacaacatctttaatcctcccataatagctcggtacatcagattgcatccgacccactacagcattaggagtacactccgaatggagcttatgggttgcgacttgaattcctgttcaatgccactcggaatggagtctaaagccatctctgatgcacagataaccgccagtagctactttacgaacatgtttgctacgtggtcaccctctaaggcaaggcttcatttgcaaggccggtctaatgcctggagacctcaggtgaacaacccgaaagaatggctccaggtggactttcagaagaccatgaaagtaacaggtgtcactactcagggagttaagtccttggatactagcatgtatgtgaaggagttccttatttcctcatcacaagatggccaccagtggaccctcttctttcagaatggtaaggtcaaagtgtttcagggcaatcaagacagcttcacacccgtggtgaacagtcttgatcctccactcttgacacgataccttcgaatccatccacagtcttgggagcaccagattgcattgcgcatggaagtacttggatgcgaggctcaggacctctac

SEQ ID NO: 946 - protein, 1457 aa, synthetic construct
  REGION 1..1457: note = Variant of human B-domain deleted Factor VIII
MQIELSTCFFLCLLRFCFSATRRYYLGAVELSWDYMQSDLGELPVDARFPPRVPKSFPFNTSVVYKKTLFVEFTDHLFNIAKPRPPWMGLLGPTIQAEVYDTVVITLKNMASHPVSLHAVGVSYWKASEGAEYDDQTSQREKEDDKVFPGGSHTYVWQVLKENGPMASDPPCLTYSYLSHVDLVKDLNSGLIGALLVCREGSLAKEKTQTLHKFILLFAVFDEGKSWHSETKNSLMQDRDAASARAWPKMHTVNGYVNRTLPGLIGCHRKSVYWHVIGMGTTPEVHSIFLEGHTFLVRNHRQASLGISPITFLTAQTLLMDLGQFLLFCHIPSHQHDGMEAYVKVDSCPEEPQLRMKNNEEAEDYDDDLTDSEMDVVRFDDDNSPSIIQARSVAKKHPKTWVHYIAAEEEDWDYAPLVLAPDDRSYKSQYLNNGPQRIGRKYKKVRFMAYTDETFKTREAIQHESGILGPLLYGEVGDTLLIIFKNQASRPYNIYPHGITDVRPLYSRRLPKGVKHLKDFPILPGEIFKYKWTVTVEDGPTKSDPRCLTRYYSSFVNMERDLASGLIGPLLICYKESVDQRGNQIMSDKRNVILFSVFDENRSWYLTENIQRFLPNPAGVQLEDPEFQASNIMHSINGYVFDSLQLSVCLHEVAYWYILSIGAQTDFLSVFFSGYTFKHKMVYEDTLTLFPFSGETVFMSMENPGLWILGCHNSDFRNRGMTALLKVSSCDKNTGDYYEDSYEDISAYFDSKNNAIEPRSFSQNPPVLKRHQREITRTTLQSDQEEIDYDDTISVEMKKEDFDIYDEDENQSPRSFQKKTRSYFIAAVERLWDYGMSSSPHVLRNRAQSGSVPQFKKVVFQEFTDGSFTQPLYRGELNEHLGLLGPYIRAEVEDNIMVTFRNQASRPYSFYSSLISYEEDQRQGAEPRKNFVKPNETKTYFWKVQHHMAPTKDEFDCKAWAYFSDVDLEKDVHSGLIGPLLVCHTNTLNPAHGRQVTVQEFALFFTIFDETKSWYFTENMERNCRAPCNIQMEDPTFKENYRFHAINGYIMDTLPGLVMAQDQRIRWYLLSMGSNENIHSIHFSGHVFTVRKKEEYKMALYNLYPGVFETVEMLPSKAGIWRVECLIGEHLHAGMSTLFLVYSNKCQTPLGMASGHIRDFQITASGQYGQWAPKLARLHYSGSINAWSTKEPFSWIKVDLLAPMIIHGIKTQGARQKFSSLYISQFIIMYSLDGKKWQTYRGNSTGTDMVFFGNVDSSGIKHNIFNPPIIARYIRLHPTHYSIRSTLRMELMGCDLNSCSMPLGMESKAISDAQITASSYFTNMFATWSPSKARLHLQGRSNAWRPQVNNPKEWLQVDFQKTMKVTGVTTQGVKSLDTSMYVKEFLISSSQDGHQWTLFFQNGKVKVFQGNQDSFTPVVNSLDPPLLTRYLRIHPQSWEHQIALRMEVLGCEAQDLY

SEQ ID NO: 947 - DNA, 4371 bp, synthetic construct
  misc_feature 1..4371: note = Variant of human B-domain deleted Factor VIII
  source 1..4371: mol_type = other DNA
atgcagattgaactgtctacctgcttcttcctctgtttgctgaggttctgctttagcgccactagacggtactaccttggcgctgtggagctgtcctgggactatatgcagagtgatttgggagagcttcccgtcgacgcacgatttcctcctcgcgttccaaagtcatttccctttaacacaagcgtggtgtacaagaagacgctcttcgtcgaattcaccgatcacctgttcaatatcgccaaacccagaccaccatggatgggtcttttggggcctaccatacaagcggaggtgtatgacacagttgttatcactctcaagaacatggcttctcatccggtaagtcttcacgcagtgggcgtgtcctactggaaagcttcagaaggagccgagtatgatgatcagacatcccagagggagaaagaagacgacaaggtatttccaggtgggtctcatacctatgtgtggcaagtgctcaaagagaatggccctatggcaagcgatccgccgtgtttgacttacagctacctttcacacgttgacctcgtcaaggacctcaactccgggttgattggagccttgttggtatgcagggaaggatctcttgccaaagagaagacacagaccctccacaagtttatccttctctttgctgtgttcgatgagggcaaaagttggcatagcgaaacgaagaattccctcatgcaggatcgcgacgcagccagcgccagagcttggcccaagatgcacactgtgaacggatatgtcaataggacgcttcctggcttgattgggtgtcatcggaaaagtgtctactggcacgtgatcggaatggggacaacaccagaggtccactccatatttctcgaaggccataccttccttgttcgaaaccacagacaggcatccttggggatctctcccattacctttctcactgcccaaacgctccttatggacttgggtcagttccttctcgggtgccatatcccgtcacaccagcatgatggtatggaagcttatgtgaaagtcgacagttgtcctgaggagccacagttgcgcatgaagaataatgaagaagccgaggattacgacgacgatctcaccgattctgagatggacgtggtgaggtttgatgacgacaactctccctccatcattcaagctcggagcgtggcgaagaaacaccccaagacttgggtccactatatagcggcggaagaggaggattgggattacgctcctcttgtattggcaccagatgaccgctcatacaaaagccagtacctcaacaacggaccgcagagaattggccggaagtataagaaagtgcgatttatggcctatacagacgaaacctttaagacaagggaggccatccagcatgagagtgggattttgggacctcttctttacggcgaagttggtgataccctcctcatcatcttcaagaatcaagcttctcgcccctataacatttacccacacgggatcactgacgttaggcctttgtatagcagaagacttcccaaaggcgtgaagcatctcaaagacttccccattttgccaggcgagatctttaagtacaaatggaccgtcacagtggaagatggaccgactaaatcagaccctcgatgccttacgcggtactattcctccttcgtgaatatggagagagatttggcaagcggactcataggaccactcctcatctgttacaaggaatctgtagaccagaggggtaaccagattatgagtgataaacgcaatgtgatcctttttagcgtcttcgacgagaaccggtcctggtacttgaccgagaatatacaaaggttccttcccaaccccgcaggcgttcagttggaagaccctgagtttcaggccagcaatattatgcactcaatcaacggctatgtgtttgatagtctccagctttctgtttgcctccatgaagtagcctattggtacatcttgtcaattggtgctcaaacagacttcctctccgtcttcttctccggctacacctttaagcacaagatggtgtatgaggacactctcacactctttccattttctggagaaaccgtgttcatgagcatggagaatccaggcctttggatcttgggttgccacaacagtgattttcgcaatcggggaatgactgctctcctcaaagtcagcagctgtgataagaacacaggcgactattacgaagattcttacgaggacataagtgcctactttgactccaagaataacgccattgagcccagatcattctcccagaatcctcccgtgcttaaaaggcatcagcgcgaaatcaccagaactactcttcagtctgatcaagaggagattgactatgacgacaccataagcgtggaaatgaagaaggaggatttcgatatctatgacgaagatgagaaccagtctccgcggagctttcagaagaagacgcgacactacttcattgcagcagtcgaaaggctttgggactacggtatgtcatcatcccctcatgtgttgcgcaatagagctcagagtggaagtgttccacagttcaagaaagtcgtctttcaagagtttacagatggcagcttcacacagcctctctatcggggcgagcttaacgaacatttgggactccttggtccctatatccgagccgaagtggaggacaacattatggttacctttaggaatcaagcctctcgcccctacagcttctactcctccctcatcagttatgaggaggatcagagacaaggcgctgaaccacggaagaactttgtgaaaccgaatgagacgaagacctacttctggaaagtacagcaccacatggcccccacaaaagacgaattcgattgcaaagcatgggcgtatttttcagacgttgacttggagaaagatgtacattcaggacttattggtcctttgttggtgtgtcacactaacactctcaatccagcccatggcaggcaggtgacagtccaggaattcgctcttttctttaccatctttgatgagaccaagtcctggtacttcacggaaaacatggagcgcaattgcagagccccctgtaacatacagatggaggaccctacctttaaggaaaattatcggttccacgcaatcaacggatacattatggatacactccctggccttgtgatggctcaggaccaacgaatcaggtggtacctcctcagcatgggttctaatgagaacatacactccattcacttttcaggacatgtgttcactgtccggaagaaagaagagtataagatggccctctacaatttgtatccaggcgtgtttgagaccgttgaaatgcttccctctaaagctggcatctggagagtagagtgcttgatcggagaacatcttcacgcaggtatgagcaccttgttcctcgtgtacagcaacaaatgtcagaccccacttggcatggccagtggacacattcgcgactttcagatcacagcatctggccagtatggacaatgggccccaaagttggctcgcctccattactccggtagcataaatgcgtggtccactaaagaacctttcagctggattaaggtcgatcttcttgcccccatgatcatccacggcattaagacacagggagcgaggcagaaattctcctccctctacatctcacagttcattattatgtatagtttggacggcaagaagtggcaaacttatagaggtaacagtactggaacagacatggtgttcttcggcaacgttgatagctctggcatcaaacacaacatctttaatcctcccataatagctcggtacatcagattgcatccgacccactacagcattaggagtacactccgaatggagcttatgggttgcgacttgaattcctgttcaatgccactcggaatggagtctaaagccatctctgatgcacagataaccgccagtagctactttacgaacatgtttgctacgtggtcaccctctaaggcaaggcttcatttgcaaggccggtctaatgcctggagacctcaggtgaacaacccgaaagaatggctccaggtggactttcagaagaccatgaaagtaacaggtgtcactactcagggagttaagtccttggatactagcatgtatgtgaaggagttccttatttcctcatcacaagatggccaccagtggaccctcttctttcagaatggtaaggtcaaagtgtttcagggcaatcaagacagcttcacacccgtggtgaacagtcttgatcctccactcttgacacgataccttcgaatccatccacagtcttgggagcaccagattgcattgcgcatggaagtacttggatgcgaggctcaggacctctac

SEQ ID NO: 948 - protein, 1457 aa, synthetic construct
  REGION 1..1457: note = Variant of human B-domain deleted Factor VIII
MQIELSTCFFLCLLRFCFSATRRYYLGAVELSWDYMQSDLGELPVDARFPPRVPKSFPFNTSVVYKKTLFVEFTDHLFNIAKPRPPWMGLLGPTIQAEVYDTVVITLKNMASHPVSLHAVGVSYWKASEGAEYDDQTSQREKEDDKVFPGGSHTYVWQVLKENGPMASDPPCLTYSYLSHVDLVKDLNSGLIGALLVCREGSLAKEKTQTLHKFILLFAVFDEGKSWHSETKNSLMQDRDAASARAWPKMHTVNGYVNRTLPGLIGCHRKSVYWHVIGMGTTPEVHSIFLEGHTFLVRNHRQASLGISPITFLTAQTLLMDLGQFLLGCHIPSHQHDGMEAYVKVDSCPEEPQLRMKNNEEAEDYDDDLTDSEMDVVRFDDDNSPSIIQARSVAKKHPKTWVHYIAAEEEDWDYAPLVLAPDDRSYKSQYLNNGPQRIGRKYKKVRFMAYTDETFKTREAIQHESGILGPLLYGEVGDTLLIIFKNQASRPYNIYPHGITDVRPLYSRRLPKGVKHLKDFPILPGEIFKYKWTVTVEDGPTKSDPRCLTRYYSSFVNMERDLASGLIGPLLICYKESVDQRGNQIMSDKRNVILFSVFDENRSWYLTENIQRFLPNPAGVQLEDPEFQASNIMHSINGYVFDSLQLSVCLHEVAYWYILSIGAQTDFLSVFFSGYTFKHKMVYEDTLTLFPFSGETVFMSMENPGLWILGCHNSDFRNRGMTALLKVSSCDKNTGDYYEDSYEDISAYFDSKNNAIEPRSFSQNPPVLKRHQREITRTTLQSDQEEIDYDDTISVEMKKEDFDIYDEDENQSPRSFQKKTRHYFIAAVERLWDYGMSSSPHVLRNRAQSGSVPQFKKVVFQEFTDGSFTQPLYRGELNEHLGLLGPYIRAEVEDNIMVTFRNQASRPYSFYSSLISYEEDQRQGAEPRKNFVKPNETKTYFWKVQHHMAPTKDEFDCKAWAYFSDVDLEKDVHSGLIGPLLVCHTNTLNPAHGRQVTVQEFALFFTIFDETKSWYFTENMERNCRAPCNIQMEDPTFKENYRFHAINGYIMDTLPGLVMAQDQRIRWYLLSMGSNENIHSIHFSGHVFTVRKKEEYKMALYNLYPGVFETVEMLPSKAGIWRVECLIGEHLHAGMSTLFLVYSNKCQTPLGMASGHIRDFQITASGQYGQWAPKLARLHYSGSINAWSTKEPFSWIKVDLLAPMIIHGIKTQGARQKFSSLYISQFIIMYSLDGKKWQTYRGNSTGTDMVFFGNVDSSGIKHNIFNPPIIARYIRLHPTHYSIRSTLRMELMGCDLNSCSMPLGMESKAISDAQITASSYFTNMFATWSPSKARLHLQGRSNAWRPQVNNPKEWLQVDFQKTMKVTGVTTQGVKSLDTSMYVKEFLISSSQDGHQWTLFFQNGKVKVFQGNQDSFTPVVNSLDPPLLTRYLRIHPQSWEHQIALRMEVLGCEAQDLY

SEQ ID NO: 949 - DNA, 4371 bp, synthetic construct
  misc_feature 1..4371: note = Variant of human B-domain deleted Factor VIII
  source 1..4371: mol_type = other DNA
atgcagattgaactgtctacctgcttcttcctctgtttgctgaggttctgctttagcgccactagacggtactaccttggcgctgtggagctgtcctgggactatatgcagagtgatttgggagagcttcccgtcgacgcacgatttcctcctcgcgttccaaagtcatttccctttaacacaagcgtggtgtacaagaagacgctcttcgtcgaattcaccgatcacctgttcaatatcgccaaacccagaccaccatggatgggtcttttggggcctaccatacaagcggaggtgtatgacacagttgttatcactctcaagaacatggcttctcatccggtaagtcttcacgcagtgggcgtgtcctactggaaagcttcagaaggagccgagtatgatgatcagacatcccagagggagaaagaagacgacaaggtatttccaggtgggtctcatacctatgtgtggcaagtgctcaaagagaatggccctatggcaagcgatccgccgtgtttgacttacagctacctttcacacgttgacctcgtcaaggacctcaactccgggttgattggagccttgttggtatgcagggaaggatctcttgccaaagagaagacacagaccctcttgaagtttatccttctctttgctgtgttcgatgagggcaaaagttggcatagcgaaacgaagaattccctcatgcaggatcgcgacgcagccagcgccagagcttggcccaagatgcacactgtgaacggatatgtcaataggacgcttcctggcttgattgggtgtcatcggaaaagtgtctactggcacgtgatcggaatggggacaacaccagaggtccactccatatttctcgaaggccataccttccttgttcgaaaccacagacaggcatccttggggatctctcccattacctttctcactgcccaaacgctccttatggacttgggtcagttccttctcttttgccatatcccgtcacaccagcatgatggtatggaagcttatgtgaaagtcgacagttgtcctgaggagccacagttgcgcatgaagaataatgaagaagccgaggattacgacgacgatctcaccgattctgagatggacgtggtgaggtttgatgacgacaactctccctccatcattcaagctcggagcgtggcgaagaaacaccccaagacttgggtccactatatagcggcggaagaggaggattgggattacgctcctcttgtattggcaccagatgaccgctcatacaaaagccagtacctcaacaacggaccgcagagaattggccggaagtataagaaagtgcgatttatggcctatacagacgaaacctttaagacaagggaggccatccagcatgagagtgggattttgggacctcttctttacggcgaagttggtgataccctcctcatcatcttcaagaatcaagcttctcgcccctataacatttacccacacgggatcactgacgttaggcctttgtatagcagaagacttcccaaaggcgtgaagcatctcaaagacttccccattttgccaggcgagatctttaagtacaaatggaccgtcacagtggaagatggaccgactaaatcagaccctcgatgccttacgcggtactattcctccttcgtgaatatggagagagatttggcaagcggactcataggaccactcctcatctgttacaaggaatctgtagaccagaggggtaaccagattatgagtgataaacgcaatgtgatcctttttagcgtcttcgacgagaaccggtcctggtacttgaccgagaatatacaaaggttccttcccaaccccgcaggcgttcagttggaagaccctgagtttcaggccagcaatattatgcactcaatcaacggctatgtgtttgatagtctccagctttctgtttgcctccatgaagtagcctattggtacatcttgtcaattggtgctcaaacagacttcctctccgtcttcttctccggctacacctttaagcacaagatggtgtatgaggacactctcacactctttccattttctggagaaaccgtgttcatgagcatggagaatccaggcctttggatcttgggttgccacaacagtgattttcgcaatcggggaatgactgctctcctcaaagtcagcagctgtgataagaacacaggcgactattacgaagattcttacgaggacataagtgcctactttgactccaagaataacgccattgagcccagatcattctcccagaatcctcccgtgcttaaaaggcatcagcgcgaaatcaccagaactactcttcagtctgatcaagaggagattgactatgacgacaccataagcgtggaaatgaagaaggaggatttcgatatctatgacgaagatgagaaccagtctccgcggagctttcagaagaagacgcgacactacttcattgcagcagtcgaaaggctttgggactacggtatgtcatcatcccctcatgtgttgcgcaatagagctcagagtggaagtgttccacagttcaagaaagtcgtctttcaagagtttacagatggcagcttcacacagcctctctatcggggcgagcttaacgaacatttgggactccttggtccctatatccgagccgaagtggaggacaacattatggttacctttaggaatcaagcctctcgcccctacagcttctactcctccctcatcagttatgaggaggatcagagacaaggcgctgaaccacggaagaactttgtgaaaccgaatgagacgaagacctacttctggaaagtacagcaccacatggcccccacaaaagacgaattcgattgcaaagcatgggcgtatttttcagacgttgacttggagaaagatgtacattcaggacttattggtcctttgttggtgtgtcacactaacactctcaatccagcccatggcaggcaggtgacagtccaggaattcgctcttttctttaccatctttgatgagaccaagtcctggtacttcacggaaaacatggagcgcaattgcagagccccctgtaacatacagatggaggaccctacctttaaggaaaattatcggttccacgcaatcaacggatacattatggatacactccctggccttgtgatggctcaggaccaacgaatcaggtggtacctcctcagcatgggttctaatgagaacatacactccattcacttttcaggacatgtgttcactgtccggaagaaagaagagtataagatggccctctacaatttgtatccaggcgtgtttgagaccgttgaaatgcttccctctaaagctggcatctggagagtagagtgcttgatcggagaacatcttcacgcaggtatgagcaccttgttcctcgtgtacagcaacaaatgtcagaccccacttggcatggccagtggacacattcgcgactttcagatcacagcatctggccagtatggacaatgggccccaaagttggctcgcctccattactccggtagcataaatgcgtggtccactaaagaacctttcagctggattaaggtcgatcttcttgcccccatgatcatccacggcattaagacacagggagcgaggcagaaattctcctccctctacatctcacagttcattattatgtatagtttggacggcaagaagtggcaaacttatagaggtaacagtactggaacagacatggtgttcttcggcaacgttgatagctctggcatcaaacacaacatctttaatcctcccataatagctcggtacatcagattgcatccgacccactacagcattaggagtacactccgaatggagcttatgggttgcgacttgaattcctgttcaatgccactcggaatggagtctaaagccatctctgatgcacagataaccgccagtagctactttacgaacatgtttgctacgtggtcaccctctaaggcaaggcttcatttgcaaggccggtctaatgcctggagacctcaggtgaacaacccgaaagaatggctccaggtggactttcagaagaccatgaaagtaacaggtgtcactactcagggagttaagtccttggatactagcatgtatgtgaaggagttccttatttcctcatcacaagatggccaccagtggaccctcttctttcagaatggtaaggtcaaagtgtttcagggcaatcaagacagcttcacacccgtggtgaacagtcttgatcctccactcttgacacgataccttcgaatccatccacagtcttgggagcaccagattgcattgcgcatggaagtacttggatgcgaggctcaggacctctac

SEQ ID NO: 950 - protein, 1457 aa, synthetic construct
  REGION 1..1457: note = Variant of human B-domain deleted Factor VIII
MQIELSTCFFLCLLRFCFSATRRYYLGAVELSWDYMQSDLGELPVDARFPPRVPKSFPFNTSVVYKKTLFVEFTDHLFNIAKPRPPWMGLLGPTIQAEVYDTVVITLKNMASHPVSLHAVGVSYWKASEGAEYDDQTSQREKEDDKVFPGGSHTYVWQVLKENGPMASDPPCLTYSYLSHVDLVKDLNSGLIGALLVCREGSLAKEKTQTLLKFILLFAVFDEGKSWHSETKNSLMQDRDAASARAWPKMHTVNGYVNRTLPGLIGCHRKSVYWHVIGMGTTPEVHSIFLEGHTFLVRNHRQASLGISPITFLTAQTLLMDLGQFLLFCHIPSHQHDGMEAYVKVDSCPEEPQLRMKNNEEAEDYDDDLTDSEMDVVRFDDDNSPSIIQARSVAKKHPKTWVHYIAAEEEDWDYAPLVLAPDDRSYKSQYLNNGPQRIGRKYKKVRFMAYTDETFKTREAIQHESGILGPLLYGEVGDTLLIIFKNQASRPYNIYPHGITDVRPLYSRRLPKGVKHLKDFPILPGEIFKYKWTVTVEDGPTKSDPRCLTRYYSSFVNMERDLASGLIGPLLICYKESVDQRGNQIMSDKRNVILFSVFDENRSWYLTENIQRFLPNPAGVQLEDPEFQASNIMHSINGYVFDSLQLSVCLHEVAYWYILSIGAQTDFLSVFFSGYTFKHKMVYEDTLTLFPFSGETVFMSMENPGLWILGCHNSDFRNRGMTALLKVSSCDKNTGDYYEDSYEDISAYFDSKNNAIEPRSFSQNPPVLKRHQREITRTTLQSDQEEIDYDDTISVEMKKEDFDIYDEDENQSPRSFQKKTRHYFIAAVERLWDYGMSSSPHVLRNRAQSGSVPQFKKVVFQEFTDGSFTQPLYRGELNEHLGLLGPYIRAEVEDNIMVTFRNQASRPYSFYSSLISYEEDQRQGAEPRKNFVKPNETKTYFWKVQHHMAPTKDEFDCKAWAYFSDVDLEKDVHSGLIGPLLVCHTNTLNPAHGRQVTVQEFALFFTIFDETKSWYFTENMERNCRAPCNIQMEDPTFKENYRFHAINGYIMDTLPGLVMAQDQRIRWYLLSMGSNENIHSIHFSGHVFTVRKKEEYKMALYNLYPGVFETVEMLPSKAGIWRVECLIGEHLHAGMSTLFLVYSNKCQTPLGMASGHIRDFQITASGQYGQWAPKLARLHYSGSINAWSTKEPFSWIKVDLLAPMIIHGIKTQGARQKFSSLYISQFIIMYSLDGKKWQTYRGNSTGTDMVFFGNVDSSGIKHNIFNPPIIARYIRLHPTHYSIRSTLRMELMGCDLNSCSMPLGMESKAISDAQITASSYFTNMFATWSPSKARLHLQGRSNAWRPQVNNPKEWLQVDFQKTMKVTGVTTQGVKSLDTSMYVKEFLISSSQDGHQWTLFFQNGKVKVFQGNQDSFTPVVNSLDPPLLTRYLRIHPQSWEHQIALRMEVLGCEAQDLY

SEQ ID NO: 951 - DNA, 4371 bp, synthetic construct
  misc_feature 1..4371: note = Variant of human B-domain deleted Factor VIII
  source 1..4371: mol_type = other DNA
atgcagattgaactgtctacctgcttcttcctctgtttgctgaggttctgctttagcgccactagacggtactaccttggcgctgtggagctgtcctgggactatatgcagagtgatttgggagagcttcccgtcgacgcacgatttcctcctcgcgttccaaagtcatttccctttaacacaagcgtggtgtacaagaagacgctcttcgtcgaattcaccgatcacctgttcaatatcgccaaacccagaccaccatggatgggtcttttggggcctaccatacaagcggaggtgtatgacacagttgttatcactctcaagaacatggcttctcatccggtaagtcttcacgcagtgggcgtgtcctactggaaagcttcagaaggagccgagtatgatgatcagacatcccagagggagaaagaagacgacaaggtatttccaggtgggtctcatacctatgtgtggcaagtgctcaaagagaatggccctatggcaagcgatccgccgtgtttgacttacagctacctttcacacgttgacctcgtcaaggacctcaactccgggttgattggagccttgttggtatgcagggaaggatctcttgccaaagagaagacacagaccctccacaagtttatccttctctttgctgtgttcgatgagggcaaaagttggcatagcgaaacgaagaattccctcatgcaggatcgcgacgcagccagcgccagagcttggcccaagatgcacactgtgaacggatatgtcaataggacgcttcctggcttgattgggtgtcatcggaaaagtgtctactggcacgtgatcggaatggggacaacaccagaggtccactccatatttctcgaaggccataccttccttgttcgaaaccacagacaggcatccttggggatctctcccattacctttctcactgcccaaacgctccttatggacttgggtcagttccttctcttttgccatatcccgtcacaccagcatgatggtatggaagcttatgtgaaagtcgacagttgtcctgaggagccacagttgcgcatgaagaataatgaagaagccgaggattacgacgacgatctcaccgattctgagatggacgtggtgaggtttgatgacgacaactctccctccatcattcaagctcggagcgtggcgaagaaacaccccaagacttgggtccactatatagcggcggaagaggaggattgggattacgctcctcttgtattggcaccagatgaccgctcatacaaaagccagtacctcaacaacggaccgcagagaattggccggaagtataagaaagtgcgatttatggcctatacagacgaaacctttaagacaagggaggccatccagcatgagagtgggattttgggacctcttctttacggcgaagttggtgataccctcctcatcatcttcaagaatcaagcttctcgcccctataacatttacccacacgggatcactgacgttaggcctttgtatagcagaagacttcccaaaggcgtgaagcatctcaaagacttccccattttgccaggcgagatctttaagtacaaatggaccgtcacagtggaagatggaccgactaaatcagaccctcgatgccttacgcggtactattcctccttcgtgaatatggagagagatttggcaagcggactcataggaccactcctcatctgttacaaggaatctgtagaccagaggggtaaccagattatgagtgataaacgcaatgtgatcctttttagcgtcttcgacgagaaccggtcctggtacttgaccgagaatatacaaaggttccttcccaaccccgcaggcgttcagttggaagaccctgagtttcaggccagcaatattatgcactcaatcaacggctatgtgtttgatagtctccagctttctgtttgcctccatgaagtagcctattggtacatcttgtcaattggtgctcaaacagacttcctctccgtcttcttctccggctacacctttaagcacaagatggtgtatgaggacactctcacactctttccattttctggagaaaccgtgttcatgagcatggagaatccaggcctttggatcttgggttgccacaacagtgattttcgcaatcggggaatgactgctctcctcaaagtcagcagctgtgataagaacacaggcgactattacgaagattcttacgaggacataagtgcctactttgactccaagaataacgccattgagcccagatcattctcccagaatcctcccgtgcttaaaaggcatcagcgcgaaatcaccagaactactcttcagtctgatcaagaggagattgactatgacgacaccataagcgtggaaatgaagaaggaggatttcgatatctatgacgaagatgagaaccagtctccgcggagctttcagtggaagacgcgacactacttcattgcagcagtcgaaaggctttgggactacggtatgtcatcatcccctcatgtgttgcgcaatagagctcagagtggaagtgttccacagttcaagaaagtcgtctttcaagagtttacagatggcagcttcacacagcctctctatcggggcgagcttaacgaacatttgggactccttggtccctatatccgagccgaagtggaggacaacattatggttacctttaggaatcaagcctctcgcccctacagcttctactcctccctcatcagttatgaggaggatcagagacaaggcgctgaaccacggaagaactttgtgaaaccgaatgagacgaagacctacttctggaaagtacagcaccacatggcccccacaaaagacgaattcgattgcaaagcatgggcgtatttttcagacgttgacttggagaaagatgtacattcaggacttattggtcctttgttggtgtgtcacactaacactctcaatccagcccatggcaggcaggtgacagtccaggaattcgctcttttctttaccatctttgatgagaccaagtcctggtacttcacggaaaacatggagcgcaattgcagagccccctgtaacatacagatggaggaccctacctttaaggaaaattatcggttccacgcaatcaacggatacattatggatacactccctggccttgtgatggctcaggaccaacgaatcaggtggtacctcctcagcatgggttctaatgagaacatacactccattcacttttcaggacatgtgttcactgtccggaagaaagaagagtataagatggccctctacaatttgtatccaggcgtgtttgagaccgttgaaatgcttccctctaaagctggcatctggagagtagagtgcttgatcggagaacatcttcacgcaggtatgagcaccttgttcctcgtgtacagcaacaaatgtcagaccccacttggcatggccagtggacacattcgcgactttcagatcacagcatctggccagtatggacaatgggccccaaagttggctcgcctccattactccggtagcataaatgcgtggtccactaaagaacctttcagctggattaaggtcgatcttcttgcccccatgatcatccacggcattaagacacagggagcgaggcagaaattctcctccctctacatctcacagttcattattatgtatagtttggacggcaagaagtggcaaacttatagaggtaacagtactggaacagacatggtgttcttcggcaacgttgatagctctggcatcaaacacaacatctttaatcctcccataatagctcggtacatcagattgcatccgacccactacagcattaggagtacactccgaatggagcttatgggttgcgacttgaattcctgttcaatgccactcggaatggagtctaaagccatctctgatgcacagataaccgccagtagctactttacgaacatgtttgctacgtggtcaccctctaaggcaaggcttcatttgcaaggccggtctaatgcctggagacctcaggtgaacaacccgaaagaatggctccaggtggactttcagaagaccatgaaagtaacaggtgtcactactcagggagttaagtccttggatactagcatgtatgtgaaggagttccttatttcctcatcacaagatggccaccagtggaccctcttctttcagaatggtaaggtcaaagtgtttcagggcaatcaagacagcttcacacccgtggtgaacagtcttgatcctccactcttgacacgataccttcgaatccatccacagtcttgggagcaccagattgcattgcgcatggaagtacttggatgcgaggctcaggacctctac

SEQ ID NO: 952 - protein, 1457 aa, synthetic construct
  REGION 1..1457: note = Variant of human B-domain deleted Factor VIII
MQIELSTCFFLCLLRFCFSATRRYYLGAVELSWDYMQSDLGELPVDARFPPRVPKSFPFNTSVVYKKTLFVEFTDHLFNIAKPRPPWMGLLGPTIQAEVYDTVVITLKNMASHPVSLHAVGVSYWKASEGAEYDDQTSQREKEDDKVFPGGSHTYVWQVLKENGPMASDPPCLTYSYLSHVDLVKDLNSGLIGALLVCREGSLAKEKTQTLHKFILLFAVFDEGKSWHSETKNSLMQDRDAASARAWPKMHTVNGYVNRTLPGLIGCHRKSVYWHVIGMGTTPEVHSIFLEGHTFLVRNHRQASLGISPITFLTAQTLLMDLGQFLLFCHIPSHQHDGMEAYVKVDSCPEEPQLRMKNNEEAEDYDDDLTDSEMDVVRFDDDNSPSIIQARSVAKKHPKTWVHYIAAEEEDWDYAPLVLAPDDRSYKSQYLNNGPQRIGRKYKKVRFMAYTDETFKTREAIQHESGILGPLLYGEVGDTLLIIFKNQASRPYNIYPHGITDVRPLYSRRLPKGVKHLKDFPILPGEIFKYKWTVTVEDGPTKSDPRCLTRYYSSFVNMERDLASGLIGPLLICYKESVDQRGNQIMSDKRNVILFSVFDENRSWYLTENIQRFLPNPAGVQLEDPEFQASNIMHSINGYVFDSLQLSVCLHEVAYWYILSIGAQTDFLSVFFSGYTFKHKMVYEDTLTLFPFSGETVFMSMENPGLWILGCHNSDFRNRGMTALLKVSSCDKNTGDYYEDSYEDISAYFDSKNNAIEPRSFSQNPPVLKRHQREITRTTLQSDQEEIDYDDTISVEMKKEDFDIYDEDENQSPRSFQWKTRHYFIAAVERLWDYGMSSSPHVLRNRAQSGSVPQFKKVVFQEFTDGSFTQPLYRGELNEHLGLLGPYIRAEVEDNIMVTFRNQASRPYSFYSSLISYEEDQRQGAEPRKNFVKPNETKTYFWKVQHHMAPTKDEFDCKAWAYFSDVDLEKDVHSGLIGPLLVCHTNTLNPAHGRQVTVQEFALFFTIFDETKSWYFTENMERNCRAPCNIQMEDPTFKENYRFHAINGYIMDTLPGLVMAQDQRIRWYLLSMGSNENIHSIHFSGHVFTVRKKEEYKMALYNLYPGVFETVEMLPSKAGIWRVECLIGEHLHAGMSTLFLVYSNKCQTPLGMASGHIRDFQITASGQYGQWAPKLARLHYSGSINAWSTKEPFSWIKVDLLAPMIIHGIKTQGARQKFSSLYISQFIIMYSLDGKKWQTYRGNSTGTDMVFFGNVDSSGIKHNIFNPPIIARYIRLHPTHYSIRSTLRMELMGCDLNSCSMPLGMESKAISDAQITASSYFTNMFATWSPSKARLHLQGRSNAWRPQVNNPKEWLQVDFQKTMKVTGVTTQGVKSLDTSMYVKEFLISSSQDGHQWTLFFQNGKVKVFQGNQDSFTPVVNSLDPPLLTRYLRIHPQSWEHQIALRMEVLGCEAQDLY

SEQ ID NO: 953 - DNA, 4371 bp, synthetic construct
  misc_feature 1..4371: note = Variant of human B-domain deleted Factor VIII
  source 1..4371: mol_type = other DNA
atgcagattgaactgtctacctgcttcttcctctgtttgctgaggttctgctttagcgccactagacggtactaccttggcgctgtggagctgtcctgggactatatgcagagtgatttgggagagcttcccgtcgacgcacgatttcctcctcgcgttccaaagtcatttccctttaacacaagcgtggtgtacaagaagacgctcttcgtcgaattcaccgatcacctgttcaatatcgccaaacccagaccaccatggatgggtcttttggggcctaccatacaagcggaggtgtatgacacagttgttatcactctcaagaacatggcttctcatccggtaagtcttcacgcagtgggcgtgtcctactggaaagcttcagaaggagccgagtatgatgatcagacatcccagagggagaaagaagacgacaaggtatttccaggtgggtctcatacctatgtgtggcaagtgctcaaagagaatggccctatggcaagcgatccgccgtgtttgacttacagctacctttcacacgttgacctcgtcaaggacctcaactccgggttgattggagccttgttggtatgcagggaaggatctcttgccaaagagaagacacagaccctccacaagtttatccttctctttgctgtgttcgatgagggcaaaagttggcatagcgaaacgaagaattccctcatgcaggatcgcgacgcagccagcgccagagcttggcccaagatgcacactgtgaacggatatgtcaataggacgcttcctggcttgattgggtgtcatcggaaaagtgtctactggcacgtgatcggaatggggacaacaccagaggtccactccatatttctcgaaggccataccttccttgttcgaaaccacagacaggcatccttggggatctctcccattacctttctcactgcccaaacgctccttatggacttgggtcagttccttctcttttgccatatcccgtcacaccagcatgatggtatggaagcttatgtgaaagtcgacagttgtcctgaggagccacagttgcgcatgaagaataatgaagaagccgaggattacgacgacgatctcaccgattctgagatggacgtggtgaggtttgatgacgacaactctccctccatcattcaagctcggagcgtggcgaagaaacaccccaagacttgggtccactatatagcggcggaagaggaggattgggattacgctcctcttgtattggcaccagatgaccgctcatacaaaagccagtacctcaacaacggaccgcagagaattggccggaagtataagaaagtgcgatttatggcctatacagacgaaacctttaagacaagggaggccatccagcatgagagtgggattttgggacctcttctttacggcgaagttggtgataccctcctcatcatcttcaagaatcaagcttctcgcccctataacatttacccacacgggatcactgacgttaggcctttgtatagcagaagacttcccaaaggcgtgaagcatctcaaagacttccccattttgccaggcgagatctttaagtacaaatggaccgtcacagtggaagatggaccgactaaatcagaccctcgatgccttacgcggtactattcctccttcgtgaatatggagagagatttggcaagcggactcataggaccactcctcatctgttacaaggaatctgtagaccagaggggtaaccagattatgagtgataaacgcaatgtgatcctttttagcgtcttcgacgagaaccggtcctggtacttgaccgagaatatacaaaggttccttcccaaccccgcaggcgttcagttggaagaccctgagtttcaggccagcaatattatgcactcaatcaacggctatgtgtttgatagtctccagctttctgtttgcctccatgaagtagcctattggtacatcttgtcaattggtgctcaaacagacttcctctccgtcttcttctccggctacacctttaagcacaagatggtgtatgaggacactctcacactctttccattttctggagaaaccgtgttcatgagcatggagaatccaggcctttggatcttgggttgccacaacagtgattttcgcaatcggggaatgactgctctcctcaaagtcagcagctgtgataagaacacaggcgactattacgaagattcttacgaggacataagtgcctactttgactccaagaataacgccattgagcccagatcattctcccagaatcctcccgtgcttaaaaggcatcagcgcgaaatcaccagaactactcttcagtctgatcaagaggagattgactatgacgacaccataagcgtggaaatgaagaaggaggatttcgatatctatgacgaagatgagaaccagtctccgcggagctttcagaagaagacgcgacactacttcattgcagcagtcgaaaggctttgggactacggtatgtcatcatcccctcatgtgttgcgcaatagagctcagagtggaagtgttccacagttcaagaaagtcgtctttcaagagtttacagatggcagcttcacacagcctctctatcggggcgagcttaacgaacatttgggactccttggtccctatatccgagccgaagtggaggacaacattatggttacctttaggaatcaagcctctcgcccctacagcttctactcctccctcatcagttatgaggaggatcagagacaaggcgctgaaccacggaagaactttgtgaaaccgaatgagacgaagacctacttctggaaagtacagcaccacatggcccccacaaaagacgaattcgattgcaaagcatgggcgtatttttcagacgttgacttggagaaagatgtacattcaggacttattggtcctttgttggtgtgtcacactaacactctcaatccagcccatggcaggcaggtgacagtccaggaattcgctcttttctttaccatctttgatgagaccaagtcctggtacttcacggaaaacatggagcgcaattgcagagccccctgtaacatacagatggaggaccctacctttaaggaaaattatcggttccacgcaatcaacggatacattatggatacactccctggccttgtgatggctcaggaccaacgaatcaggtggtacctcctcagcatgggttctaatgagaacatacactccattcacttttcaggacatgtgttcactgtccggaagaaagaagagtataagatggccctctacaatttgtatccaggcgtgtttgagaccgttgaaatgcttccctctaaagctggcatctggagagtagagtgcttgatcggagaacatcttcacgcaggtatgagcaccttgttcctcgtgtacagcaacaaatgtcagaccccacttggcatggccagtggacacattcgcgactttcagatcacagcatctggccagtatggacaatgggccccaaagttggctcgcctccattactccggtagcataaatgcgtggtccactaaagaacctttcagctggattaaggtcgatcttcttgcccccatgatcatccacggcattaagacacagggagcgaggcagaaattctcctccctctacatctcacagttcattattatgtatagtttggacggcaagaagtggcaaacttatagaggtaacagtactggaacagacatggtgttcttcggcaacgttgatagctctggcatcaaacacaacatctttaatcctcccataatagctcggtacatcagattgcatccgacccactacagcttgaggagtacactccgaatggagcttatgggttgcgacttgaattcctgttcaatgccactcggaatggagtctaaagccatctctgatgcacagataaccgccagtagctactttacgaacatgtttgctacgtggtcaccctctaaggcaaggcttcatttgcaaggccggtctaatgcctggagacctcaggtgaacaacccgaaagaatggctccaggtggactttcagaagaccatgaaagtaacaggtgtcactactcagggagttaagtccttggatactagcatgtatgtgaaggagttccttatttcctcatcacaagatggccaccagtggaccctcttctttcagaatggtaaggtcaaagtgtttcagggcaatcaagacagcttcacacccgtggtgaacagtcttgatcctccactcttgacacgataccttcgaatccatccacagtcttgggagcaccagattgcattgcgcatggaagtacttggatgcgaggctcaggacctctac

SEQ ID NO: 954 - protein, 1457 aa, synthetic construct
  REGION 1..1457: note = Variant of human B-domain deleted Factor VIII
MQIELSTCFFLCLLRFCFSATRRYYLGAVELSWDYMQSDLGELPVDARFPPRVPKSFPFNTSVVYKKTLFVEFTDHLFNIAKPRPPWMGLLGPTIQAEVYDTVVITLKNMASHPVSLHAVGVSYWKASEGAEYDDQTSQREKEDDKVFPGGSHTYVWQVLKENGPMASDPPCLTYSYLSHVDLVKDLNSGLIGALLVCREGSLAKEKTQTLHKFILLFAVFDEGKSWHSETKNSLMQDRDAASARAWPKMHTVNGYVNRTLPGLIGCHRKSVYWHVIGMGTTPEVHSIFLEGHTFLVRNHRQASLGISPITFLTAQTLLMDLGQFLLFCHIPSHQHDGMEAYVKVDSCPEEPQLRMKNNEEAEDYDDDLTDSEMDVVRFDDDNSPSIIQARSVAKKHPKTWVHYIAAEEEDWDYAPLVLAPDDRSYKSQYLNNGPQRIGRKYKKVRFMAYTDETFKTREAIQHESGILGPLLYGEVGDTLLIIFKNQASRPYNIYPHGITDVRPLYSRRLPKGVKHLKDFPILPGEIFKYKWTVTVEDGPTKSDPRCLTRYYSSFVNMERDLASGLIGPLLICYKESVDQRGNQIMSDKRNVILFSVFDENRSWYLTENIQRFLPNPAGVQLEDPEFQASNIMHSINGYVFDSLQLSVCLHEVAYWYILSIGAQTDFLSVFFSGYTFKHKMVYEDTLTLFPFSGETVFMSMENPGLWILGCHNSDFRNRGMTALLKVSSCDKNTGDYYEDSYEDISAYFDSKNNAIEPRSFSQNPPVLKRHQREITRTTLQSDQEEIDYDDTISVEMKKEDFDIYDEDENQSPRSFQKKTRHYFIAAVERLWDYGMSSSPHVLRNRAQSGSVPQFKKVVFQEFTDGSFTQPLYRGELNEHLGLLGPYIRAEVEDNIMVTFRNQASRPYSFYSSLISYEEDQRQGAEPRKNFVKPNETKTYFWKVQHHMAPTKDEFDCKAWAYFSDVDLEKDVHSGLIGPLLVCHTNTLNPAHGRQVTVQEFALFFTIFDETKSWYFTENMERNCRAPCNIQMEDPTFKENYRFHAINGYIMDTLPGLVMAQDQRIRWYLLSMGSNENIHSIHFSGHVFTVRKKEEYKMALYNLYPGVFETVEMLPSKAGIWRVECLIGEHLHAGMSTLFLVYSNKCQTPLGMASGHIRDFQITASGQYGQWAPKLARLHYSGSINAWSTKEPFSWIKVDLLAPMIIHGIKTQGARQKFSSLYISQFIIMYSLDGKKWQTYRGNSTGTDMVFFGNVDSSGIKHNIFNPPIIARYIRLHPTHYSLRSTLRMELMGCDLNSCSMPLGMESKAISDAQITASSYFTNMFATWSPSKARLHLQGRSNAWRPQVNNPKEWLQVDFQKTMKVTGVTTQGVKSLDTSMYVKEFLISSSQDGHQWTLFFQNGKVKVFQGNQDSFTPVVNSLDPPLLTRYLRIHPQSWEHQIALRMEVLGCEAQDLY

SEQ ID NO: 955 - DNA, 4371 bp, synthetic construct
  misc_feature 1..4371: note = Variant of human B-domain deleted Factor VIII
  source 1..4371: mol_type = other DNA
atgcagattgaactgtctacctgcttcttcctctgtttgctgaggttctgctttagcgccactagacggtactaccttggcgctgtggagctgtcctgggactatatgcagagtgatttgggagagcttcccgtcgacgcacgatttcctcctcgcgttccaaagtcatttccctttaacacaagcgtggtgtacaagaagacgctcttcgtcgaattcaccgatcacctgttcaatatcgccaaacccagaccaccatggatgggtcttttggggcctaccatacaagcggaggtgtatgacacagttgttatcactctcaagaacatggcttctcatccggtaagtcttcacgcagtgggcgtgtcctactggaaagcttcagaaggagccgagtatgatgatcagacatcccagagggagaaagaagacgacaaggtatttccaggtgggtctcatacctatgtgtggcaagtgctcaaagagaatggccctatggcaagcgatccgccgtgtttgacttacagctacctttcacacgttgacctcgtcaaggacctcaactccgggttgattggagccttgttggtatgcagggaaggatctcttgccaaagagaagacacagaccctccacaagtttatccttctctttgctgtgttcgatgagggcaaaagttggcatagcgaaacgaagaattccctcatgcaggatcgcgacgcagccagcgccagagcttggcccaagatgcacactgtgaacggatatgtcaataggacgcttcctggcttgattgggtgtcatcggaaaagtgtctactggcacgtgatcggaatggggacaacaccagaggtccactccatatttctcgaaggccataccttccttgttcgaaaccacagacaggcatccttggggatctctcccattacctttctcactgcccaaacgctccttatggacttgggtcagttccttctcttttgccatatcccgtcacaccagcatgatggtatggaagcttatgtgaaagtcgacagttgtcctgaggagccacagttgcgcatgaagaataatgaagaagccgaggattacgacgacgatctcaccgattctgagatggacgtggtgaggtttgatgacgacaactctccctccatcattcaagctcggagcgtggcgaagaaacaccccaagacttgggtccactatatagcggcggaagaggaggattgggattacgctcctcttgtattggcaccagatgaccgctcatacaaaagccagtacctcaacaacggaccgcagagaattggccggaagtataagaaagtgcgatttatggcctatacagacgaaacctttaagacaagggaggccatccagcatgagagtgggattttgggacctcttctttacggcgaagttggtgataccctcctcatcatcttcaagaatcaagcttctcgcccctataacatttacccacacgggatcactgacgttaggcctttgtatagcagaagacttcccaaaggcgtgaagcatctcaaagacttccccattttgccaggcgagatctttaagtacaaatggaccgtcacagtggaagatggaccgactaaatcagaccctcgatgccttacgcggtactattcctccggggtgaatatggagagagatttggcaagcggactcataggaccactcctcatctgttacaaggaatctgtagaccagaggggtaaccagattatgagtgataaacgcaatgtgatcctttttagcgtcttcgacgagaaccggtcctggtacttgaccgagaatatacaaaggttccttcccaaccccgcaggcgttcagttggaagaccctgagtttcaggccagcaatattatgcactcaatcaacggctatgtgtttgatagtctccagctttctgtttgcctccatgaagtagcctattggtacatcttgtcaattggtgctcaaacagacttcctctccgtcttcttctccggctacacctttaagcacaagatggtgtatggggacactctcacactctttccattttctggagaaaccgtgttcatgagcatggagaatccaggcctttggatcttgggttgccacaacagtgattttcgcaatcggggaatgactgctctcctcaaagtcagcagctgtgataagaacacaggcgactattacgaagattcttacgaggacataagtgcctactttgactccaagaataacgccattgagcccagatcattctcccagaatcctcccgtgcttaaaaggcatcagcgcgaaatcaccagaactactcttcagtctgatcaagaggagattgactatgacgacaccataagcgtggaaatgaagaaggaggatttcgatatctatgacgaagatgagaaccagtctccgcggagctttcagaagaagacgcgacactacttcattgcagcagtcgaaaggctttgggactacggtatgtcatcatcccctcatgtgttgcgcaatagagctcagagtggaagtgttccacagttcaagaaagtcgtctttcaagagtttacagatggcagcttcacacagcctctctatcggggcgagcttaacgaacatttgggactccttggtccctatatccgagccgaagtggaggacaacattatggttacctttaggaatcaagcctctcgcccctacagcttctactcctccctcatcagttatgaggaggatcagagacaaggcgctgaaccacggaagaactttgtgaaaccgaatgagacgaagacctacttctggaaagtacagcaccacatggcccccacaaaagacgaattcgattgcaaagcatgggcgtatttttcagacgttgacttggagaaagatgtacattcaggacttattggtcctttgttggtgtgtcacactaacactctcaatccagcccatggcaggcaggtgacagtccaggaattcgctcttttctttaccatctttgatgagaccaagtcctggtacttcacggaaaacatggagcgcaattgcagagccccctgtaacatacagatggaggaccctacctttaaggaaaattatcggttccacgcaatcaacggatacattatggatacactccctggccttgtgatggctcaggaccaacgaatcaggtggtacctcctcagcatgggttctaatgagaacatacactccattcacttttcaggacatgtgttcactgtccggaagaaagaagagtataagatggccctctacaatttgtatccaggcgtgtttgagaccgttgaaatgcttccctctaaagctggcatctggagagtagagtgcttgatcggagaacatcttcacgcaggtatgagcaccttgttcctcgtgtacagcaacaaatgtcagaccccacttggcatggccagtggacacattcgcgactttcagatcacagcatctggccagtatggacaatgggccccaaagttggctcgcctccattactccggtagcataaatgcgtggtccactaaagaacctttcagctggattaaggtcgatcttcttgcccccatgatcatccacggcattaagacacagggagcgaggcagaaattctcctccctctacatctcacagttcattattatgtatagtttggacggcaagaagtggcaaacttatagaggtaacagtactggaacagacatggtgttcttcggcaacgttgatagctctggcatcaaacacaacatctttaatcctcccataatagctcggtacatcagattgcatccgacccactacagcattaggagtacactccgaatggagcttatgggttgcgacttgaattcctgttcaatgccactcggaatggagtctaaagccatctctgatgcacagataaccgccagtagctactttacgaacatgtttgctacgtggtcaccctctaaggcaaggcttcatttgcaaggccggtctaatgcctggagacctcaggtgaacaacccgaaagaatggctccaggtggactttcagaagaccatgaaagtaacaggtgtcactactcagggagttaagtccttggatactagcatgtatgtgaaggagttccttatttcctcatcacaagatggccaccagtggaccctcttctttcagaatggtaaggtcaaagtgtttcagggcaatcaagacagcttcacacccgtggtgaacagtcttgatcctccactcttgacacgataccttcgaatccatccacagtcttgggagcaccagattgcattgcgcatggaagtacttggatgcgaggctcaggacctctac

SEQ ID NO: 956 - protein, 1457 aa, synthetic construct
  REGION 1..1457: note = Variant of human B-domain deleted Factor VIII
MQIELSTCFFLCLLRFCFSATRRYYLGAVELSWDYMQSDLGELPVDARFPPRVPKSFPFNTSVVYKKTLFVEFTDHLFNIAKPRPPWMGLLGPTIQAEVYDTVVITLKNMASHPVSLHAVGVSYWKASEGAEYDDQTSQREKEDDKVFPGGSHTYVWQVLKENGPMASDPPCLTYSYLSHVDLVKDLNSGLIGALLVCREGSLAKEKTQTLHKFILLFAVFDEGKSWHSETKNSLMQDRDAASARAWPKMHTVNGYVNRTLPGLIGCHRKSVYWHVIGMGTTPEVHSIFLEGHTFLVRNHRQASLGISPITFLTAQTLLMDLGQFLLFCHIPSHQHDGMEAYVKVDSCPEEPQLRMKNNEEAEDYDDDLTDSEMDVVRFDDDNSPSIIQARSVAKKHPKTWVHYIAAEEEDWDYAPLVLAPDDRSYKSQYLNNGPQRIGRKYKKVRFMAYTDETFKTREAIQHESGILGPLLYGEVGDTLLIIFKNQASRPYNIYPHGITDVRPLYSRRLPKGVKHLKDFPILPGEIFKYKWTVTVEDGPTKSDPRCLTRYYSSGVNMERDLASGLIGPLLICYKESVDQRGNQIMSDKRNVILFSVFDENRSWYLTENIQRFLPNPAGVQLEDPEFQASNIMHSINGYVFDSLQLSVCLHEVAYWYILSIGAQTDFLSVFFSGYTFKHKMVYGDTLTLFPFSGETVFMSMENPGLWILGCHNSDFRNRGMTALLKVSSCDKNTGDYYEDSYEDISAYFDSKNNAIEPRSFSQNPPVLKRHQREITRTTLQSDQEEIDYDDTISVEMKKEDFDIYDEDENQSPRSFQKKTRHYFIAAVERLWDYGMSSSPHVLRNRAQSGSVPQFKKVVFQEFTDGSFTQPLYRGELNEHLGLLGPYIRAEVEDNIMVTFRNQASRPYSFYSSLISYEEDQRQGAEPRKNFVKPNETKTYFWKVQHHMAPTKDEFDCKAWAYFSDVDLEKDVHSGLIGPLLVCHTNTLNPAHGRQVTVQEFALFFTIFDETKSWYFTENMERNCRAPCNIQMEDPTFKENYRFHAINGYIMDTLPGLVMAQDQRIRWYLLSMGSNENIHSIHFSGHVFTVRKKEEYKMALYNLYPGVFETVEMLPSKAGIWRVECLIGEHLHAGMSTLFLVYSNKCQTPLGMASGHIRDFQITASGQYGQWAPKLARLHYSGSINAWSTKEPFSWIKVDLLAPMIIHGIKTQGARQKFSSLYISQFIIMYSLDGKKWQTYRGNSTGTDMVFFGNVDSSGIKHNIFNPPIIARYIRLHPTHYSIRSTLRMELMGCDLNSCSMPLGMESKAISDAQITASSYFTNMFATWSPSKARLHLQGRSNAWRPQVNNPKEWLQVDFQKTMKVTGVTTQGVKSLDTSMYVKEFLISSSQDGHQWTLFFQNGKVKVFQGNQDSFTPVVNSLDPPLLTRYLRIHPQSWEHQIALRMEVLGCEAQDLY

SEQ ID NO: 957 - DNA, 4371 bp, synthetic construct
  misc_feature 1..4371: note = Variant of human B-domain deleted Factor VIII
  source 1..4371: mol_type = other DNA
atgcagattgaactgtctacctgcttcttcctctgtttgctgaggttctgctttagcgccactagacggtactaccttggcgctgtggagctgtcctgggactatatgcagagtgatttgggagagcttcccgtcgacgcacgatttcctcctcgcgttccaaagtcatttccctttaacacaagcgtggtgtacaagaagacgctcttcgtcgaattcaccgatcacctgttcaatatcgccaaacccagaccaccatggatgggtcttttggggcctaccatacaagcggaggtgtatgacacagttgttatcactctcaagaacatggcttctcatccggtaagtcttcacgcagtgggcgtgtcctactggaaagcttcagaaggagccgagtatgatgatcagacatcccagagggagaaagaagacgacaaggtatttccaggtgggtctcatacctatgtgtggcaagtgctcaaagagaatggccctatggcaagcgatccgccgtgtttgacttacagctacctttcacacgttgacctcgtcaaggacctcaactccgggttgattggagccttgttggtatgcagggaaggatctcttgccaaagagaagacacagaccctccacaagtttatccttctctttgctgtgttcgatgagggcaaaagttggcatagcgaaacgaagaattccctcatgcaggatcgcgacgcagccagcgccagagcttggcccaagatgcacactgtgaacggatatgtcaataggacgcttcctggcttgattgggtgtcatcggaaaagtgtctactggcacgtgatcggaatggggacaacaccagaggtccactccatatttctcgaaggccataccttccttgttcgaaaccacagacaggcatccttggggatctctcccattacctttctcactgcccaaacgctccttatggacttgggtcagttccttctcttttgccatatcccgtcacaccagcatgatggtatggaagcttatgtgaaagtcgacagttgtcctgaggagccacagttgcgcatgaagaataatgaagaagccgaggattacgacgacgatctcaccgattctgagatggacgtggtgaggtttgatgacgacaactctccctccatcattcaagctcggagcgtggcgaagaaacaccccaagacttgggtccactatatagcggcggaagaggaggattgggattacgctcctcttgtattggcaccagatgaccgctcatacaaaagccagtacctcaacaacggaccgcagagaattggccggaagtataagaaagtgcgatttatggcctatacagacgaaacctttaagacaagggaggccatccagcatgagagtgggattttgggacctcttctttacggcgaagttggtgataccctcctcatcatcttcaagaatcaagcttctcgcccctataacatttacccacacgggatcactgacgttaggcctttgtatagcagaagacttcccaaaggcgtgaagcatctcaaagacttccccattttgccaggcgagatctttaagtacaaatggaccgtcacagtggaagatggaccgactaaatcagaccctcgatgccttacgcggtactattcctccttcgtgaatatggagagagatttggcaagcggactcataggaccactcctcatctgttacaaggaatctgtagaccagaggggtaaccagattatgagtgataaacgcaatgtgatcctttttagcgtcttcgacgagaaccggtcctggtacttgaccgagaatatacaaaggttccttcccaaccccgcaggcgttcagttggaagaccctgagtttcaggccagcaatattatgcactcaatcaacggctatgtgtttgatagtctccagctttctgtttgcctccatgaagtagcctattggtacatcttgtcaattggtgctcaaacagacttcctctccgtcttcttctccggctacacctttaagcacaagatggtgtatgaggacactctcacactctttccattttctggagaaaccgtgttcatgagcatggagaatccaggcctttggatcttgggttgccacaacagtgattttcgcaatcggggaatgactgctctcctcaaagtcagcagctgtgataagaacacaggcgactattacgaagattcttacgaggacataagtgcctactttgactccaagaataacgccattgagcccagatcattctcccagaatcctcccgtgcttaaaaggcatcagcgcgaaatcaccagaactactcttcagtctgatcaagaggagattgactatgacgacaccataagcgtggaaatgaagaaggaggatttcgatatctatgacgaagatgagaaccagtctccgcggagctttcagaagaagacgcgacactacttcattgcagcaaaggaaaggctttgggactacggtatgtcatcatcccctcatgtgttgcgcaatagagctcagagtggaagtgttccacagttcaagaaagtcgtctttcaagagtttacagatggcagcttcacacagcctctctatcggggcgagcttaacgaacatttgggactccttggtccctatatccgagccgaagtggaggacaacattatggttacctttaggaatcaagcctctcgcccctacagcttctactcctccctcatcagttatgaggaggatcagagacaaggcgctgaaccacggaagaactttgtgaaaccgaatgagacgaagacctacttctggaaagtacagcaccacatggcccccacaaaagacgaattcgattgcaaagcatgggcgtatttttcagacgttgacttggagaaagatgtacattcaggacttattggtcctttgttggtgtgtcacactaacactctcaatccagcccatggcaggcaggtgacagtccaggaattcgctcttttctttaccatctttgatgagaccaagtcctggtacttcacggaaaacatggagcgcaattgcagagccccctgtaacatacagatggaggaccctacctttaaggaaaattatcggttccacgcaatcaacggatacattatggatacactccctggccttgtgatggctcaggaccaacgaatcaggtggtacctcctcagcatgggttctaatgagaacatacactccattcacttttcaggacatgtgttcactgtccggaagaaagaagagtataagatggccctctacaatttgtatccaggcgtgtttgagaccgttgaaatgcttccctctaaagctggcatctggagagtagagtgcttgatcggagaacatcttcacgcaggtatgagcaccttgttcctcgtgtacagcaacaaatgtcagaccccacttggcatggccagtggacacattcgcgactttcagatcacagcatctggccagtatggacaatgggccccaaagttggctcgcctccattactccggtagcataaatgcgtggtccactaaagaacctttcagctggattaaggtcgatcttcttgcccccatgatcatccacggcattaagacacagggagcgaggcagaaattctcctccctctacatctcacagttcattattatgtatagtttggacggcaagaagtggcaaacttatagaggtaacagtactggaacagacatggtgttcttcggcaacgttgatagctctggcatcaaacacaacatctttaatcctcccataatagctcggtacatcagattgcatccgacccactacagcattaggagtacactccgaatggagcttatgggttgcgacttgaattcctgttcaatgccactcggaatggagtctaaagccatctctgatgcacagataaccgccagtagctactttacgaacatgtttgctacgtggtcaccctctaaggcaaggcttcatttgcaaggccggtctaatgcctggagacctcaggtgaacaacccgaaagaatggctccaggtggactttcagaagaccatgaaagtaacaggtgtcactactcagggagttaagtccttggatactagcatgtatgtgaaggagttccttatttcctcatcacaagatggccaccagtggaccctcttctttcagaatggtaaggtcaaagtgtttcagggcaatcaagacagcttcacacccgtggtgaacagtcttgatcctccactcttgacacgataccttcgaatccatccacagtcttgggagcaccagattgcattgcgcatggaagtacttggatgcgaggctcaggacctctac

SEQ ID NO: 958 - protein, 1457 aa, synthetic construct
  REGION 1..1457: note = Variant of human B-domain deleted Factor VIII
MQIELSTCFFLCLLRFCFSATRRYYLGAVELSWDYMQSDLGELPVDARFPPRVPKSFPFNTSVVYKKTLFVEFTDHLFNIAKPRPPWMGLLGPTIQAEVYDTVVITLKNMASHPVSLHAVGVSYWKASEGAEYDDQTSQREKEDDKVFPGGSHTYVWQVLKENGPMASDPPCLTYSYLSHVDLVKDLNSGLIGALLVCREGSLAKEKTQTLHKFILLFAVFDEGKSWHSETKNSLMQDRDAASARAWPKMHTVNGYVNRTLPGLIGCHRKSVYWHVIGMGTTPEVHSIFLEGHTFLVRNHRQASLGISPITFLTAQTLLMDLGQFLLFCHIPSHQHDGMEAYVKVDSCPEEPQLRMKNNEEAEDYDDDLTDSEMDVVRFDDDNSPSIIQARSVAKKHPKTWVHYIAAEEEDWDYAPLVLAPDDRSYKSQYLNNGPQRIGRKYKKVRFMAYTDETFKTREAIQHESGILGPLLYGEVGDTLLIIFKNQASRPYNIYPHGITDVRPLYSRRLPKGVKHLKDFPILPGEIFKYKWTVTVEDGPTKSDPRCLTRYYSSFVNMERDLASGLIGPLLICYKESVDQRGNQIMSDKRNVILFSVFDENRSWYLTENIQRFLPNPAGVQLEDPEFQASNIMHSINGYVFDSLQLSVCLHEVAYWYILSIGAQTDFLSVFFSGYTFKHKMVYEDTLTLFPFSGETVFMSMENPGLWILGCHNSDFRNRGMTALLKVSSCDKNTGDYYEDSYEDISAYFDSKNNAIEPRSFSQNPPVLKRHQREITRTTLQSDQEEIDYDDTISVEMKKEDFDIYDEDENQSPRSFQKKTRHYFIAAKERLWDYGMSSSPHVLRNRAQSGSVPQFKKVVFQEFTDGSFTQPLYRGELNEHLGLLGPYIRAEVEDNIMVTFRNQASRPYSFYSSLISYEEDQRQGAEPRKNFVKPNETKTYFWKVQHHMAPTKDEFDCKAWAYFSDVDLEKDVHSGLIGPLLVCHTNTLNPAHGRQVTVQEFALFFTIFDETKSWYFTENMERNCRAPCNIQMEDPTFKENYRFHAINGYIMDTLPGLVMAQDQRIRWYLLSMGSNENIHSIHFSGHVFTVRKKEEYKMALYNLYPGVFETVEMLPSKAGIWRVECLIGEHLHAGMSTLFLVYSNKCQTPLGMASGHIRDFQITASGQYGQWAPKLARLHYSGSINAWSTKEPFSWIKVDLLAPMIIHGIKTQGARQKFSSLYISQFIIMYSLDGKKWQTYRGNSTGTDMVFFGNVDSSGIKHNIFNPPIIARYIRLHPTHYSIRSTLRMELMGCDLNSCSMPLGMESKAISDAQITASSYFTNMFATWSPSKARLHLQGRSNAWRPQVNNPKEWLQVDFQKTMKVTGVTTQGVKSLDTSMYVKEFLISSSQDGHQWTLFFQNGKVKVFQGNQDSFTPVVNSLDPPLLTRYLRIHPQSWEHQIALRMEVLGCEAQDLY

SEQ ID NO: 959 - DNA, 4371 bp, synthetic construct
  misc_feature 1..4371: note = Variant of human B-domain deleted Factor VIII
  source 1..4371: mol_type = other DNA
atgcagattgaactgtctacctgcttcttcctctgtttgctgaggttctgctttagcgccactagacggtactaccttggcgctgtggagctgtcctgggactatatgcagagtgatttgggagagcttcccgtcgacgcacgatttcctcctcgcgttccaaagtcatttccctttaacacaagcgtggtgtacaagaagacgctcttcgtcgaattcaccgatcacctgttcaatatcgccaaacccagaccaccatggatgggtcttttggggcctaccatacaagcggaggtgtatgacacagttgttatcactctcaagaacatggcttctcatccggtaagtcttcacgcagtgggcgtgtcctactggaaagcttcagaaggagccgagtatgatgatcagacatcccagagggagaaagaagacgacaaggtatttccaggtgggtctcatacctatgtgtggcaagtgctcaaagagaatggccctatggcaagcgatccgccgtgtttgacttacagctacctttcacacgttgacctcgtcaaggacctcaactccgggttgattggagccttgttggtatgcagggaaggatctcttgccaaagagaagacacagaccctccacaagtttatccttctctttgctgtgttcgatgagggcaaaagttggcatagcgaaacgaagaattccctcatgcaggatcgcgacgcagccagcgccagagcttggcccaagatgcacactgtgaacggatatgtcaataggacgcttcctggcttgattgggtgtcatcggaaaagtgtctactggcacgtgatcggaatggggacaacaccagaggtccactccatatttctcgaaggccataccttccttgttcgaaaccacagacaggcatccttggggatctctcccattacctttctcactgcccaaacgctccttatggacttgggtcagttccttctcttttgccatatcccgtcacaccagcatgatggtatggaagcttatgtgaaagtcgacagttgtcctgaggagccacagttgcgcatgaagaataatgaagaagccgaggattacgacgacgatctcaccgattctgagatggacgtggtgaggtttgatgacgacaactctccctccatcattcaagctcggagcgtggcgaagaaacaccccaagacttgggtccactatatagcggcggaagaggaggattgggattacgctcctcttgtattggcaccagatgaccgctcatacaaaagccagtacctcaacaacggaccgcagagaattggccggaagtataagaaagtgcgatttatggcctatacagacgaaacctttaagacaagggaggccatccagcatgagagtgggattttgggacctcttctttacggcgaagttggtgataccctcctcatcatcttcaagaatcaagcttctcgcccctataacatttacccacacgggatcactgacgttaggcctttgtatagcagaagacttcccaaaggcgtgaagcatctcaaagacttccccattttgccaggcgagatctttaagtacaaatggaccgtcacagtggaagatggaccgactaaatcagaccctcgatgccttacgggttactattcctccttcgtgaatatggagagagatttggcaagcggactcataggaccactcctcatctgttacaaggaatctgtagaccagaggggtaaccagattatgagtgataaacgcaatgtgatcctttttagcgtcttcgacgagaaccggtcctggtacttgaccgagaatatacaaaggttccttcccaaccccgcaggcgttcagttggaagaccctgagtttcaggccagcaatattatgcactcaatcaacggctatgtgtttgatagtctccagctttctgtttgcctccatgaagtagcctattggtacatcttgtcaattggtgctcaaacagacttcctctccgtcttcttctccggctacacctttaagcacaagatggtgtatgaggacactctcacactctttccattttctggagaaaccgtgttcatgagcatggagaatccaggcctttggatcttgggttgccacaacagtgattttcgcaatcggggaatgactgctctcctcaaagtcagcagctgtgataagaacacaggcgactattacgaagattcttacgaggacataagtgcctactttgactccaagaataacgccattgagcccagatcattctcccagaatcctcccgtgcttaaaaggcatcagcgcgaaatcaccagaactactcttcagtctgatcaagaggagattgactatgacgacaccataagcgtggaaatgaagaaggaggatttcgatatctatgacgaagatgagaaccagtctccgcggagctttcagaagaagacgcgacactacttcattgcagcagtcgaaaggctttgggactacggtatgtcatcatcccctcatgtgttgcgcaatagagctcagagtggaagtgttccacagttcaagaaagtcgtctttcaagagtttacagatggcagcttcacacagcctctctatcggggcgagcttaacgaacatttgggactccttggtccctatatccgagccgaagtggaggacaacattatggttacctttaggaatcaagcctctcgcccctacagcttctactcctccctcatcagttatgaggaggatcagagacaaggcgctgaaccacggaagaactttgtgaaaccgaatgagacgaagacctacttctggaaagtacagcaccacatggcccccacaaaagacgaattcgattgcaaagcatgggcgtatttttcagacgttgacttggagaaagatgtacattcaggacttattggtcctttgttggtgtgtcacactaacactctcaatccagcccatggcaggcaggtgacagtccaggaattcgctcttttctttaccatctttgatgagaccaagtcctggtacttcacggaaaacatggagcgcaattgcagagccccctgtaacatacagatggaggaccctacctttaaggaaaattatcggttccacgcaatcaacggatacattatggatacactccctggccttgtgatggctcaggaccaacgaatcaggtggtacctcctcagcatgggttctaatgagaacatacactccattcacttttcaggacatgtgttcactgtccggaagaaagaagagtataagatggccctctacaatttgtatccaggcgtgtttgagaccgttgaaatgcttccctctaaagctggcatctggagagtagagtgcttgatcggagaacatcttcacgcaggtatgagcaccttgttcctcgtgtacagcaacaaatgtcagaccccacttggcatggccagtggacacattcgcgactttcagatcacagcatctggccagtatggacaatgggccccaaagttggctcgcctccattactccggtagcataaatgcgtggtccactaaagaacctttcagctggattaaggtcgatcttcttgcccccatgatcatccacggcattaagacacagggagcgaggcagaaattctcctccctctacatctcacagttcattattatgtatagtttggacggcaagaagtggcaaacttatagaggtaacagtactggaacagacatggtgttcttcggcaacgttgatagctctggcatcaaacacaacatctttaatcctcccataatagctcggtacatcagattgcatccgacccactacagcattaggagtacactccgaatggagcttatgggttgcgacttgaattcctgttcaatgccactcggaatggagtctaaagccatctctgatgcacagataaccgccagtagctactttacgaacatgtttgctacgtggtcaccctctaaggcaaggcttcatttgcaaggccggtctaatgcctggagacctcaggtgaacaacccgaaagaatggctccaggtggactttcagaagaccatgaaagtaacaggtgtcactactcagggagttaagtccttggatactagcatgtatgtgaaggagttccttatttcctcatcacaagatggccaccagtggaccctcttctttcagaatggtaaggtcaaagtgtttcagggcaatcaagacagcttcacacccgtggtgaacagtcttgatcctccactcttgacacgataccttcgaatccatccacagtcttgggagcaccagattgcattgcgcatggaagtacttggatgcgaggctcaggacctctac

SEQ ID NO: 960 - protein, 1457 aa, synthetic construct
  REGION 1..1457: note = Variant of human B-domain deleted Factor VIII
MQIELSTCFFLCLLRFCFSATRRYYLGAVELSWDYMQSDLGELPVDARFPPRVPKSFPFNTSVVYKKTLFVEFTDHLFNIAKPRPPWMGLLGPTIQAEVYDTVVITLKNMASHPVSLHAVGVSYWKASEGAEYDDQTSQREKEDDKVFPGGSHTYVWQVLKENGPMASDPPCLTYSYLSHVDLVKDLNSGLIGALLVCREGSLAKEKTQTLHKFILLFAVFDEGKSWHSETKNSLMQDRDAASARAWPKMHTVNGYVNRTLPGLIGCHRKSVYWHVIGMGTTPEVHSIFLEGHTFLVRNHRQASLGISPITFLTAQTLLMDLGQFLLFCHIPSHQHDGMEAYVKVDSCPEEPQLRMKNNEEAEDYDDDLTDSEMDVVRFDDDNSPSIIQARSVAKKHPKTWVHYIAAEEEDWDYAPLVLAPDDRSYKSQYLNNGPQRIGRKYKKVRFMAYTDETFKTREAIQHESGILGPLLYGEVGDTLLIIFKNQASRPYNIYPHGITDVRPLYSRRLPKGVKHLKDFPILPGEIFKYKWTVTVEDGPTKSDPRCLTGYYSSFVNMERDLASGLIGPLLICYKESVDQRGNQIMSDKRNVILFSVFDENRSWYLTENIQRFLPNPAGVQLEDPEFQASNIMHSINGYVFDSLQLSVCLHEVAYWYILSIGAQTDFLSVFFSGYTFKHKMVYEDTLTLFPFSGETVFMSMENPGLWILGCHNSDFRNRGMTALLKVSSCDKNTGDYYEDSYEDISAYFDSKNNAIEPRSFSQNPPVLKRHQREITRTTLQSDQEEIDYDDTISVEMKKEDFDIYDEDENQSPRSFQKKTRHYFIAAVERLWDYGMSSSPHVLRNRAQSGSVPQFKKVVFQEFTDGSFTQPLYRGELNEHLGLLGPYIRAEVEDNIMVTFRNQASRPYSFYSSLISYEEDQRQGAEPRKNFVKPNETKTYFWKVQHHMAPTKDEFDCKAWAYFSDVDLEKDVHSGLIGPLLVCHTNTLNPAHGRQVTVQEFALFFTIFDETKSWYFTENMERNCRAPCNIQMEDPTFKENYRFHAINGYIMDTLPGLVMAQDQRIRWYLLSMGSNENIHSIHFSGHVFTVRKKEEYKMALYNLYPGVFETVEMLPSKAGIWRVECLIGEHLHAGMSTLFLVYSNKCQTPLGMASGHIRDFQITASGQYGQWAPKLARLHYSGSINAWSTKEPFSWIKVDLLAPMIIHGIKTQGARQKFSSLYISQFIIMYSLDGKKWQTYRGNSTGTDMVFFGNVDSSGIKHNIFNPPIIARYIRLHPTHYSIRSTLRMELMGCDLNSCSMPLGMESKAISDAQITASSYFTNMFATWSPSKARLHLQGRSNAWRPQVNNPKEWLQVDFQKTMKVTGVTTQGVKSLDTSMYVKEFLISSSQDGHQWTLFFQNGKVKVFQGNQDSFTPVVNSLDPPLLTRYLRIHPQSWEHQIALRMEVLGCEAQDLY

SEQ ID NO: 961 - DNA, 4371 bp, synthetic construct
  misc_feature 1..4371: note = Variant of human B-domain deleted Factor VIII
  source 1..4371: mol_type = other DNA
atgcagattgaactgtctacctgcttcttcctctgtttgctgaggttctgctttagcgccactagacggtactaccttggcgctgtggagctgtcctgggactatatgcagagtgatttgggagagcttcccgtcgacgcacgatttcctcctcgcgttccaaagtcatttccctttaacacaagcgtggtgtacaagaagacgctcttcgtcgaattcaccgatcacctgttcaatatcgccaaacccagaccaccatggatgggtcttttggggcctaccatacaagcggaggtgtatgacacagttgttatcactctcaagaacatggcttctcatccggtaagtcttcacgcagtgggcgtgtcctactggaaagcttcagaaggagccgagtatgatgatcagacatcccagagggagaaagaagacgacaaggtatttccaggtgggtctcatacctatgtgtggcaagtgctcaaagagaatggccctatggcaagcgatccgccgtgtttgacttacagctacctttcacacgttgacctcgtcaaggacctcaactccgggttgattggagccttgttggtatgcagggaaggatctcttgccaaagagaagacacagaccctccacaagtttatccttctctttgctgtgttcgatgagggcaaaagttggcatagcgaaacgaagaattccctcatgcaggatcgcgacgcagccagcgccagagcttggcccaagatgcacactgtgaacggatatgtcaataggacgcttcctggcttgattgggtgtcatcggaaaagtgtctactggcacgtgatcggaatggggacaacaccagaggtccactccatatttctcgaaggccataccttccttgttcgaaaccacagacaggcatccttggggatctctcccattacctttctcactgcccaaacgctccttatggacttgggtcagttccttctcttttgccatatcccgtcacaccagcatgatggtatggaagcttatgtgaaagtcgacagttgtcctgaggagccacagttgcgcatgaagaataatgaagaagccgaggattacgacgacgatctcaccgattctgagatggacgtggtgaggtttgatgacgacaactctccctccatcattcaagctcggagcgtggcgaagaaacaccccaagacttgggtccactatatagcggcggaagaggaggattgggattacgctcctcttgtattggcaccagatgaccgctcatacaaaagccagtacctcaacaacggaccgcagagaattggccggaagtataagaaagtgcgatttatggcctatacagacgaaacctttaagacaagggaggccatccagcatgagagtgggattttgggacctcttctttacggcgaagttggtgataccctcctcatcatcttcaagaatcaagcttctcgcccctataacatttacccacacgggatcactgacgttaggcctttgtatagcagaagacttcccaaaggcgtgaagcatctcaaagacttccccattttgccaggcgagatctttaagtacaaatggaccgtcacagtggaagatggaccgactaaatcagaccctcgatgccttacgcggtactattcctccttcgtgaatatggagagagatttggcaagcggactcataggaccactcctcatctgttacaaggaatctgtagaccagaggggtaaccagattatgagtgataaacgcaatgtgatcctttttagcgtcttcgacgagaaccggtcctggtacttgaccgagaatatacaaaggttccttcccaaccccgcaggcgttcagttggaagaccctgagtttcaggccagcaatattatgcactcaatcaacggctatgtgtttgatagtctccagctttctgtttgcctccatgaagtagcctattggtacatcttgtcaattggtgctcaaacagacttcctctccgtcttcttctccggctacacctttaagcacaagatggtgtatgaggacactctcacactctttccattttctggagaaaccgtgttcatgagcatggagaatccaggcctttggatcttgggttgccacaacagtgattttcgcaatcggggaatgactgctctcctcaaagtcagcagctgtgataagaacacaggcgactattacgaagattcttacgaggacataagtgcctactttgactccaagaataacgccattgagcccagatcattctcccagaatcctcccgtgcttaaaaggcatcagcgcgaaatcaccagaactactcttcagtctgatcaagaggagattgactatgacgacaccataagcgtggaaatgaagaaggaggatttcgatatctatgacgaagatgagaaccagtctccgcggagctttcagaagaagacgcgacactacttcattgcagcagtcgaaatgctttgggactacggtatgtcatcatcccctcatgtgttgcgcaatagagctcagagtggaagtgttccacagttcaagaaagtcgtctttcaagagtttacagatggcagcttcacacagcctctctatcggggcgagcttaacgaacatttgggactccttggtccctatatccgagccgaagtggaggacaacattatggttacctttaggaatcaagcctctcgcccctacagcttctactcctccctcatcagttatgaggaggatcagagacaaggcgctgaaccacggaagaactttgtgaaaccgaatgagacgaagacctacttctggaaagtacagcaccacatggcccccacaaaagacgaattcgattgcaaagcatgggcgtatttttcagacgttgacttggagaaagatgtacattcaggacttattggtcctttgttggtgtgtcacactaacactctcaatccagcccatggcaggcaggtgacagtccaggaattcgctcttttctttaccatctttgatgagaccaagtcctggtacttcacggaaaacatggagcgcaattgcagagccccctgtaacatacagatggaggaccctacctttaaggaaaattatcggttccacgcaatcaacggatacattatggatacactccctggccttgtgatggctcaggaccaacgaatcaggtggtacctcctcagcatgggttctaatgagaacatacactccattcacttttcaggacatgtgttcactgtccggaagaaagaagagtataagatggccctctacaatttgtatccaggcgtgtttgagaccgttgaaatgcttccctctaaagctggcatctggagagtagagtgcttgatcggagaacatcttcacgcaggtatgagcaccttgttcctcgtgtacagcaacaaatgtcagaccccacttggcatggccagtggacacattcgcgactttcagatcacagcatctggccagtatggacaatgggccccaaagttggctcgcctccattactccggtagcataaatgcgtggtccactaaagaacctttcagctggattaaggtcgatcttcttgcccccatgatcatccacggcattaagacacagggagcgaggcagaaattctcctccctctacatctcacagttcattattatgtatagtttggacggcaagaagtggcaaacttatagaggtaacagtactggaacagacatggtgttcttcggcaacgttgatagctctggcatcaaacacaacatctttaatcctcccataatagctcggtacatcagattgcatccgacccactacagcattaggagtacactccgaatggagcttatgggttgcgacttgaattcctgttcaatgccactcggaatggagtctaaagccatctctgatgcacagataaccgccagtagctactttacgaacatgtttgctacgtggtcaccctctaaggcaaggcttcatttgcaaggccggtctaatgcctggagacctcaggtgaacaacccgaaagaatggctccaggtggactttcagaagaccatgaaagtaacaggtgtcactactcagggagttaagtccttggatactagcatgtatgtgaaggagttccttatttcctcatcacaagatggccaccagtggaccctcttctttcagaatggtaaggtcaaagtgtttcagggcaatcaagacagcttcacacccgtggtgaacagtcttgatcctccactcttgacacgataccttcgaatccatccacagtcttgggagcaccagattgcattgcgcatggaagtacttggatgcgaggctcaggacctctac

SEQ ID NO: 962 - protein, 1457 aa, synthetic construct
  REGION 1..1457: note = Variant of human B-domain deleted Factor VIII
MQIELSTCFFLCLLRFCFSATRRYYLGAVELSWDYMQSDLGELPVDARFPPRVPKSFPFNTSVVYKKTLFVEFTDHLFNIAKPRPPWMGLLGPTIQAEVYDTVVITLKNMASHPVSLHAVGVSYWKASEGAEYDDQTSQREKEDDKVFPGGSHTYVWQVLKENGPMASDPPCLTYSYLSHVDLVKDLNSGLIGALLVCREGSLAKEKTQTLHKFILLFAVFDEGKSWHSETKNSLMQDRDAASARAWPKMHTVNGYVNRTLPGLIGCHRKSVYWHVIGMGTTPEVHSIFLEGHTFLVRNHRQASLGISPITFLTAQTLLMDLGQFLLFCHIPSHQHDGMEAYVKVDSCPEEPQLRMKNNEEAEDYDDDLTDSEMDVVRFDDDNSPSIIQARSVAKKHPKTWVHYIAAEEEDWDYAPLVLAPDDRSYKSQYLNNGPQRIGRKYKKVRFMAYTDETFKTREAIQHESGILGPLLYGEVGDTLLIIFKNQASRPYNIYPHGITDVRPLYSRRLPKGVKHLKDFPILPGEIFKYKWTVTVEDGPTKSDPRCLTRYYSSFVNMERDLASGLIGPLLICYKESVDQRGNQIMSDKRNVILFSVFDENRSWYLTENIQRFLPNPAGVQLEDPEFQASNIMHSINGYVFDSLQLSVCLHEVAYWYILSIGAQTDFLSVFFSGYTFKHKMVYEDTLTLFPFSGETVFMSMENPGLWILGCHNSDFRNRGMTALLKVSSCDKNTGDYYEDSYEDISAYFDSKNNAIEPRSFSQNPPVLKRHQREITRTTLQSDQEEIDYDDTISVEMKKEDFDIYDEDENQSPRSFQKKTRHYFIAAVEMLWDYGMSSSPHVLRNRAQSGSVPQFKKVVFQEFTDGSFTQPLYRGELNEHLGLLGPYIRAEVEDNIMVTFRNQASRPYSFYSSLISYEEDQRQGAEPRKNFVKPNETKTYFWKVQHHMAPTKDEFDCKAWAYFSDVDLEKDVHSGLIGPLLVCHTNTLNPAHGRQVTVQEFALFFTIFDETKSWYFTENMERNCRAPCNIQMEDPTFKENYRFHAINGYIMDTLPGLVMAQDQRIRWYLLSMGSNENIHSIHFSGHVFTVRKKEEYKMALYNLYPGVFETVEMLPSKAGIWRVECLIGEHLHAGMSTLFLVYSNKCQTPLGMASGHIRDFQITASGQYGQWAPKLARLHYSGSINAWSTKEPFSWIKVDLLAPMIIHGIKTQGARQKFSSLYISQFIIMYSLDGKKWQTYRGNSTGTDMVFFGNVDSSGIKHNIFNPPIIARYIRLHPTHYSIRSTLRMELMGCDLNSCSMPLGMESKAISDAQITASSYFTNMFATWSPSKARLHLQGRSNAWRPQVNNPKEWLQVDFQKTMKVTGVTTQGVKSLDTSMYVKEFLISSSQDGHQWTLFFQNGKVKVFQGNQDSFTPVVNSLDPPLLTRYLRIHPQSWEHQIALRMEVLGCEAQDLY

SEQ ID NO: 963 - DNA, 4371 bp, synthetic construct
  misc_feature 1..4371: note = Variant of human B-domain deleted Factor VIII
  source 1..4371: mol_type = other DNA
atgcagattgaactgtctacctgcttcttcctctgtttgctgaggttctgctttagcgccactagacggtactaccttggcgctgtggagctgtcctgggactatatgcagagtgatttgggagagcttcccgtcgacgcacgatttcctcctcgcgttccaaagtcatttccctttaacacaagcgtggtgtacaagaagacgctcttcgtcgaattcaccgatcacctgttcaatatcgccaaacccagaccaccatggatgggtcttttggggcctaccatacaagcggaggtgtatgacacagttgttatcactctcaagaacatggcttctcatccggtaagtcttcacgcagtgggcgtgtcctactggaaagcttcagaaggagccgagtatgatgatcagacatcccagagggagaaagaagacgacaaggtatttccaggtgggtctcatacctatgtgtggcaagtgctcaaagagaatggccctatggcaagcgatccgccgtgtttgacttacagctacctttcacacgttgacctcgtcaaggacctcaactccgggttgattggagccttgttggtatgcagggaaggatctcttgccaaagagaagacacagaccctccacaagtttatccttctctttgctgtgttcgatgagggcaaaagttggcatagcgaaacgaagaattccctcatgcaggatcgcgacgcagccagcgccagagcttggcccaagatgcacactgtgaacggatatgtcaataggacgcttcctggcttgattgggtgtcatcggaaaagtgtctactggcacgtgatcggaatggggacaacaccagaggtccactccatatttctcgaaggccataccttccttgttcgaaaccacagacaggcatccttggggatctctcccattacctttctcactgcccaaacgctccttatggacttgggtcagttccttctcttttgccatatcccgtcacaccagcatgatggtatggaagcttatgtgaaagtcgacagttgtcctgaggagccacagttgcgcatgaagaataatgaagaagccgaggattacgacgacgatctcaccgattctgagatggacgtggtgaggtttgatgacgacaactctccctccatcattcaagctcggagcgtggcgaagaaacaccccaagacttgggtccactatatagcggcggaagaggaggattgggattacgctcctcttgtattggcaccagatgaccgctcatacaaaagccagtacctcaacaacggaccgcagagaattggccggaagtataagaaagtgcgatttatggcctatacagacgaaacctttaagacaagggaggccatccagcatgagagtgggattttgggacctcttctttacggcgaagttggtgataccctcctcatcatcttcaagaatcaagcttctcgcccctataacatttacccacacgggatcactgacgttaggcctttgtatagcagaagacttcccaaaggcgtgaagcatctcaaagacttccccattttgccaggcgagatctttaagtacaaatggaccgtcacagtggaagatggaccgactaaatcagaccctcgatgccttacgcggtactattcctccttcgtgaatatggagagagatttggcaagcggactcataggaccactcctcatctgttacaaggaatctgtagaccagaggggtaaccagattatgagtgataaacgcaatgtgatcctttttagcgtcttcgacgagaaccggtcctggtacttgaccgagaatatacaaaggttccttcccaaccccgcaggcgttcagttggaagaccctgagtttcaggccagcaatattatgcactcaatcaacggctatgtgtttgatagtctccagctttctgtttgcctccatgaagtagcctattggtacatcttgtcaattggtgctcaaacagacttcctctccgtcttcttctccggctacacctttaagcacaagatggtgtatgaggacactctcacactctttccattttctggagaaaccgtgttcatgagcatggagaatccaggcctttggatcttgggttgccacaacagtgattttcgcaatcggggaatgactgctctcctcaaagtcagcagctgtgataagaacacaggcgactattacgaagattcttacgaggacataagtgcctactttgactccaagaataacgccattgagcccagatcattctcccagaatcctcccgtgcttaaaaggcatcagcgcgaaatcaccagaactactcttcagtctgatcaagaggagattgactatgacgacaccataagcgtggaaatgaagaaggaggatttcgatatctatgacgaagatgagaaccagtctccgcggagctttcagaagaagacgcgacactacttcattgcagcagtcgaaaggctttgggactacggtatgtcatcagcgcctcatgtgttgcgcaatagagctcagagtggaagtgttccacagttcaagaaagtcgtctttcaagagtttacagatggcagcttcacacagcctctctatcggggcgagcttaacgaacatttgggactccttggtccctatatccgagccgaagtggaggacaacattatggttacctttaggaatcaagcctctcgcccctacagcttctactcctccctcatcagttatgaggaggatcagagacaaggcgctgaaccacggaagaactttgtgaaaccgaatgagacgaagacctacttctggaaagtacagcaccacatggcccccacaaaagacgaattcgattgcaaagcatgggcgtatttttcagacgttgacttggagaaagatgtacattcaggacttattggtcctttgttggtgtgtcacactaacactctcaatccagcccatggcaggcaggtgacagtccaggaattcgctcttttctttaccatctttgatgagaccaagtcctggtacttcacggaaaacatggagcgcaattgcagagccccctgtaacatacagatggaggaccctacctttaaggaaaattatcggttccacgcaatcaacggatacattatggatacactccctggccttgtgatggctcaggaccaacgaatcaggtggtacctcctcagcatgggttctaatgagaacatacactccattcacttttcaggacatgtgttcactgtccggaagaaagaagagtataagatggccctctacaatttgtatccaggcgtgtttgagaccgttgaaatgcttccctctaaagctggcatctggagagtagagtgcttgatcggagaacatcttcacgcaggtatgagcaccttgttcctcgtgtacagcaacaaatgtcagaccccacttggcatggccagtggacacattcgcgactttcagatcacagcatctggccagtatggacaatgggccccaaagttggctcgcctccattactccggtagcataaatgcgtggtccactaaagaacctttcagctggattaaggtcgatcttcttgcccccatgatcatccacggcattaagacacagggagcgaggcagaaattctcctccctctacatctcacagttcattattatgtatagtttggacggcaagaagtggcaaacttatagaggtaacagtactggaacagacatggtgttcttcggcaacgttgatagctctggcatcaaacacaacatctttaatcctcccataatagctcggtacatcagattgcatccgacccactacagcattaggagtacactccgaatggagcttatgggttgcgacttgaattcctgttcaatgccactcggaatggagtctaaagccatctctgatgcacagataaccgccagtagctactttacgaacatgtttgctacgtggtcaccctctaaggcaaggcttcatttgcaaggccggtctaatgcctggagacctcaggtgaacaacccgaaagaatggctccaggtggactttcagaagaccatgaaagtaacaggtgtcactactcagggagttaagtccttggatactagcatgtatgtgaaggagttccttatttcctcatcacaagatggccaccagtggaccctcttctttcagaatggtaaggtcaaagtgtttcagggcaatcaagacagcttcacacccgtggtgaacagtcttgatcctccactcttgacacgataccttcgaatccatccacagtcttgggagcaccagattgcattgcgcatggaagtacttggatgcgaggctcaggacctctac

SEQ ID NO: 964 - protein, 1457 aa, synthetic construct
  REGION 1..1457: note = Variant of human B-domain deleted Factor VIII
MQIELSTCFFLCLLRFCFSATRRYYLGAVELSWDYMQSDLGELPVDARFPPRVPKSFPFNTSVVYKKTLFVEFTDHLFNIAKPRPPWMGLLGPTIQAEVYDTVVITLKNMASHPVSLHAVGVSYWKASEGAEYDDQTSQREKEDDKVFPGGSHTYVWQVLKENGPMASDPPCLTYSYLSHVDLVKDLNSGLIGALLVCREGSLAKEKTQTLHKFILLFAVFDEGKSWHSETKNSLMQDRDAASARAWPKMHTVNGYVNRTLPGLIGCHRKSVYWHVIGMGTTPEVHSIFLEGHTFLVRNHRQASLGISPITFLTAQTLLMDLGQFLLFCHIPSHQHDGMEAYVKVDSCPEEPQLRMKNNEEAEDYDDDLTDSEMDVVRFDDDNSPSIIQARSVAKKHPKTWVHYIAAEEEDWDYAPLVLAPDDRSYKSQYLNNGPQRIGRKYKKVRFMAYTDETFKTREAIQHESGILGPLLYGEVGDTLLIIFKNQASRPYNIYPHGITDVRPLYSRRLPKGVKHLKDFPILPGEIFKYKWTVTVEDGPTKSDPRCLTRYYSSFVNMERDLASGLIGPLLICYKESVDQRGNQIMSDKRNVILFSVFDENRSWYLTENIQRFLPNPAGVQLEDPEFQASNIMHSINGYVFDSLQLSVCLHEVAYWYILSIGAQTDFLSVFFSGYTFKHKMVYEDTLTLFPFSGETVFMSMENPGLWILGCHNSDFRNRGMTALLKVSSCDKNTGDYYEDSYEDISAYFDSKNNAIEPRSFSQNPPVLKRHQREITRTTLQSDQEEIDYDDTISVEMKKEDFDIYDEDENQSPRSFQKKTRHYFIAAVERLWDYGMSSAPHVLRNRAQSGSVPQFKKVVFQEFTDGSFTQPLYRGELNEHLGLLGPYIRAEVEDNIMVTFRNQASRPYSFYSSLISYEEDQRQGAEPRKNFVKPNETKTYFWKVQHHMAPTKDEFDCKAWAYFSDVDLEKDVHSGLIGPLLVCHTNTLNPAHGRQVTVQEFALFFTIFDETKSWYFTENMERNCRAPCNIQMEDPTFKENYRFHAINGYIMDTLPGLVMAQDQRIRWYLLSMGSNENIHSIHFSGHVFTVRKKEEYKMALYNLYPGVFETVEMLPSKAGIWRVECLIGEHLHAGMSTLFLVYSNKCQTPLGMASGHIRDFQITASGQYGQWAPKLARLHYSGSINAWSTKEPFSWIKVDLLAPMIIHGIKTQGARQKFSSLYISQFIIMYSLDGKKWQTYRGNSTGTDMVFFGNVDSSGIKHNIFNPPIIARYIRLHPTHYSIRSTLRMELMGCDLNSCSMPLGMESKAISDAQITASSYFTNMFATWSPSKARLHLQGRSNAWRPQVNNPKEWLQVDFQKTMKVTGVTTQGVKSLDTSMYVKEFLISSSQDGHQWTLFFQNGKVKVFQGNQDSFTPVVNSLDPPLLTRYLRIHPQSWEHQIALRMEVLGCEAQDLY

SEQ ID NO: 965 - DNA, 4371 bp, synthetic construct
  misc_feature 1..4371: note = Variant of human B-domain deleted Factor VIII
  source 1..4371: mol_type = other DNA
atgcagattgaactgtctacctgcttcttcctctgtttgctgaggttctgctttagcgccactagacggtactaccttggcgctgtggagctgtcctgggactatatgcagagtgatttgggagagcttcccgtcgacgcacgatttcctcctcgcgttccaaagtcatttccctttaacacaagcgtggtgtacaagaagacgctcttcgtcgaattcaccgatcacctgttcaatatcgccaaacccagaccaccatggatgggtcttttggggcctaccatacaagcggaggtgtatgacacagttgttatcactctcaagaacatggcttctcatccggtaagtcttcacgcagtgggcgtgtcctactggaaagcttcagaaggagccgagtatgatgatcagacatcccagagggagaaagaagacgacaaggtatttccaggtgggtctcatacctatgtgtggcaagtgctcaaagagaatggccctatggcaagcgatccgccgtgtttgacttacagctacctttcacacgttgacctcgtcaaggacctcaactccgggttgattggagccttgttggtatgcagggaaggatctcttgccaaagagaagacacagaccctccacaagtttatccttctctttgctgtgttcgatgagggcaaaagttggcatagcgaaacgaagaattccctcatgcaggatcgcgacgcagccagcgccagagcttggcccaagatgcacactgtgaacggatatgtcaataggacgcttcctggcttgattgggtgtcatcggaaaagtgtctactggcacgtgatcggaatggggacaacaccagaggtccactccatatttctcgaaggccataccttccttgttcgaaaccacagacaggcatccttggggatctctcccattacctttctcactgcccaaacgctccttatggacttgggtcagttccttctcttttgccatatcccgtcacaccagcatgatggtatggaagcttatgtgaaagtcgacagttgtcctgaggagccacagttgcgcatgaagaataatgaagaagccgaggattacgacgacgatctcaccgattctgagatggacgtggtgaggtttgatgacgacaactctccctccatcattcaagctcggagcgtggcgaagaaacaccccaagacttgggtccactatatagcggcggaagaggaggattgggattacgctcctcttgtattggcaccagatgaccgctcatacaaaagccagtacctcaacaacggaccgcagagaattggccggaagtataagaaagtgcgatttatggcctatacagacgaaacctttaagacaagggaggccatccagcatgagagtgggattttgggacctcttctttacggcgaagttggtgataccctcctcatcatcttcaagaatcaagcttctcgcccctataacatttacccacacgggatcactgacgttaggcctttgtatagcagaagacttcccaaaggcgtgaagcatctcaaagacttccccattttgccaggcgagatctttaagtacaaatggaccgtcacagtggaagatggaccgactaaatcagaccctcgatgccttacgcggtactattcctccttcgtgaatatggagagagatttggcaagcggactcataggaccactcctcatctgttacaaggaatctgtagaccagaggggtaaccagattatgagtgataaacgcaatgtgatcctttttagcgtcttcgacgagaaccggtcctggtacttgaccgagaatatacaaaggttccttcccaaccccgcaggcgttcagttggaagaccctgagtttcaggccagcaatattatgcactcaatcaacggctatgtgtttgatagtctccagctttctgtttgcctccatgaagtagcctattggtacatcttgtcaattggtgctcaaacagacttcctctccgtcttcttctccggctacacctttaagcacaagatggtgtatgaggacactctcacactctttccattttctggagaaaccgtgttcatgagcatggagaatccaggcctttggatcttgggttgccacaacagtgattttcgcaatcggggaatgactgctctcctcaaagtcagcagctgtgataagaacacaggcgactattacgaagattcttacgaggacataagtgcctactttgactccaagaataacgccattgagcccagatcattctcccagaatcctcccgtgcttaaaaggcatcagcgcgaaatcaccagaactactcttcagtctgatcaagaggagattgactatgacgacaccataagcgtggaaatgaagaaggaggatttcgatatctatgacgaagatgagaaccagtctccgcggagctttcagaagaagacgcgaacttacttcattgcagcagtcgaaaggctttgggactacggtatgtcatcatcccctcatgtgttgcgcaatagagctcagagtggaagtgttccacagttcaagaaagtcgtctttcaagagtttacagatggcagcttcacacagcctctctatcggggcgagcttaacgaacatttgggactccttggtccctatatccgagccgaagtggaggacaacattatggttacctttaggaatcaagcctctcgcccctacagcttctactcctccctcatcagttatgaggaggatcagagacaaggcgctgaaccacggaagaactttgtgaaaccgaatgagacgaagacctacttctggaaagtacagcaccacatggcccccacaaaagacgaattcgattgcaaagcatgggcgtatttttcagacgttgacttggagaaagatgtacattcaggacttattggtcctttgttggtgtgtcacactaacactctcaatccagcccatggcaggcaggtgacagtccaggaattcgctcttttctttaccatctttgatgagaccaagtcctggtacttcacggaaaacatggagcgcaattgcagagccccctgtaacatacagatggaggaccctacctttaaggaaaattatcggttccacgcaatcaacggatacattatggatacactccctggccttgtgatggctcaggaccaacgaatcaggtggtacctcctcagcatgggttctaatgagaacatacactccattcacttttcaggacatgtgttcactgtccggaagaaagaagagtataagatggccctctacaatttgtatccaggcgtgtttgagaccgttgaaatgcttccctctaaagctggcatctggagagtagagtgcttgatcggagaacatcttcacgcaggtatgagcaccttgttcctcgtgtacagcaacaaatgtcagaccccacttggcatggccagtggacacattcgcgactttcagatcacagcatctggccagtatggacaatgggccccaaagttggctcgcctccattactccggtagcataaatgcgtggtccactaaagaacctttcagctggattaaggtcgatcttcttgcccccatgatcatccacggcattaagacacagggagcgaggcagaaattctcctccctctacatctcacagttcattattatgtatagtttggacggcaagaagtggcaaacttatagaggtaacagtactggaacagacatggtgttcttcggcaacgttgatagctctggcatcaaacacaacatctttaatcctcccataatagctcggtacatcagattgcatccgacccactacagcattaggagtacactccgaatggagcttatgggttgcgacttgaattcctgttcaatgccactcggaatggagtctaaagccatctctgatgcacagataaccgccagtagctactttacgaacatgtttgctacgtggtcaccctctaaggcaaggcttcatttgcaaggccggtctaatgcctggagacctcaggtgaacaacccgaaagaatggctccaggtggactttcagaagaccatgaaagtaacaggtgtcactactcagggagttaagtccttggatactagcatgtatgtgaaggagttccttatttcctcatcacaagatggccaccagtggaccctcttctttcagaatggtaaggtcaaagtgtttcagggcaatcaagacagcttcacacccgtggtgaacagtcttgatcctccactcttgacacgataccttcgaatccatccacagtcttgggagcaccagattgcattgcgcatggaagtacttggatgcgaggctcaggacctctac

SEQ ID NO: 966 - protein, 1457 aa, synthetic construct
  REGION 1..1457: note = Variant of human B-domain deleted Factor VIII
MQIELSTCFFLCLLRFCFSATRRYYLGAVELSWDYMQSDLGELPVDARFPPRVPKSFPFNTSVVYKKTLFVEFTDHLFNIAKPRPPWMGLLGPTIQAEVYDTVVITLKNMASHPVSLHAVGVSYWKASEGAEYDDQTSQREKEDDKVFPGGSHTYVWQVLKENGPMASDPPCLTYSYLSHVDLVKDLNSGLIGALLVCREGSLAKEKTQTLHKFILLFAVFDEGKSWHSETKNSLMQDRDAASARAWPKMHTVNGYVNRTLPGLIGCHRKSVYWHVIGMGTTPEVHSIFLEGHTFLVRNHRQASLGISPITFLTAQTLLMDLGQFLLFCHIPSHQHDGMEAYVKVDSCPEEPQLRMKNNEEAEDYDDDLTDSEMDVVRFDDDNSPSIIQARSVAKKHPKTWVHYIAAEEEDWDYAPLVLAPDDRSYKSQYLNNGPQRIGRKYKKVRFMAYTDETFKTREAIQHESGILGPLLYGEVGDTLLIIFKNQASRPYNIYPHGITDVRPLYSRRLPKGVKHLKDFPILPGEIFKYKWTVTVEDGPTKSDPRCLTRYYSSFVNMERDLASGLIGPLLICYKESVDQRGNQIMSDKRNVILFSVFDENRSWYLTENIQRFLPNPAGVQLEDPEFQASNIMHSINGYVFDSLQLSVCLHEVAYWYILSIGAQTDFLSVFFSGYTFKHKMVYEDTLTLFPFSGETVFMSMENPGLWILGCHNSDFRNRGMTALLKVSSCDKNTGDYYEDSYEDISAYFDSKNNAIEPRSFSQNPPVLKRHQREITRTTLQSDQEEIDYDDTISVEMKKEDFDIYDEDENQSPRSFQKKTRTYFIAAVERLWDYGMSSSPHVLRNRAQSGSVPQFKKVVFQEFTDGSFTQPLYRGELNEHLGLLGPYIRAEVEDNIMVTFRNQASRPYSFYSSLISYEEDQRQGAEPRKNFVKPNETKTYFWKVQHHMAPTKDEFDCKAWAYFSDVDLEKDVHSGLIGPLLVCHTNTLNPAHGRQVTVQEFALFFTIFDETKSWYFTENMERNCRAPCNIQMEDPTFKENYRFHAINGYIMDTLPGLVMAQDQRIRWYLLSMGSNENIHSIHFSGHVFTVRKKEEYKMALYNLYPGVFETVEMLPSKAGIWRVECLIGEHLHAGMSTLFLVYSNKCQTPLGMASGHIRDFQITASGQYGQWAPKLARLHYSGSINAWSTKEPFSWIKVDLLAPMIIHGIKTQGARQKFSSLYISQFIIMYSLDGKKWQTYRGNSTGTDMVFFGNVDSSGIKHNIFNPPIIARYIRLHPTHYSIRSTLRMELMGCDLNSCSMPLGMESKAISDAQITASSYFTNMFATWSPSKARLHLQGRSNAWRPQVNNPKEWLQVDFQKTMKVTGVTTQGVKSLDTSMYVKEFLISSSQDGHQWTLFFQNGKVKVFQGNQDSFTPVVNSLDPPLLTRYLRIHPQSWEHQIALRMEVLGCEAQDLY

SEQ ID NO: 967 - DNA, 4371 bp, synthetic construct
  misc_feature 1..4371: note = Variant of human B-domain deleted Factor VIII
  source 1..4371: mol_type = other DNA
atgcagattgaactgtctacctgcttcttcctctgttatctgaggttctgctttagcgccactagacggtactaccttggcgctgtggagctgtcctgggactatatgcagagtgatttgggagagcttcccgtcgacgcacgatttcctcctcgcgttccaaagtcatttccctttaacacaagcgtggtgtacaagaagacgctcttcgtcgaattcaccgatcacctgttcaatatcgccaaacccagaccaccatggatgggtcttttggggcctaccatacaagcggaggtgtatgacacagttgttatcactctcaagaacatggcttctcatccggtaagtcttcacgcagtgggcgtgtcctactggaaagcttcagaaggagccgagtatgatgatcagacatcccagagggagaaagaagacgacaaggtatttccaggtgggtctcatacctatgtgtggcaagtgctcaaagagaatggccctatggcaagcgatccgccgtgtttgacttacagctacctttcacacgttgacctcgtcaaggacctcaactccgggttgattggagccttgttggtatgcagggaaggatctcttgccaaagagaagacacagaccctccacaagtttatccttctctttgctgtgttcgatgagggcaaaagttggcatagcgaaacgaagaattccctcatgcaggatcgcgacgcagccagcgccagagcttggcccaagatgcacactgtgaacggatatgtcaataggacgcttcctggcttgattgggtgtcatcggaaaagtgtctactggcacgtgatcggaatggggacaacaccagaggtccactccatatttctcgaaggccataccttccttgttcgaaaccacagacaggcatccttggggatctctcccattacctttctcactgcccaaacgctccttatggacttgggtcagttccttctcttttgccatatcccgtcacaccagcatgatggtatggaagcttatgtgaaagtcgacagttgtcctgaggagccacagttgcgcatgaagaataatgaagaagccgaggattacgacgacgatctcaccgattctgagatggacgtggtgaggtttgatgacgacaactctccctccatcattcaagctcggagcgtggcgaagaaacaccccaagacttgggtccactatatagcggcggaagaggaggattgggattacgctcctcttgtattggcaccagatgaccgctcatacaaaagccagtacctcaacaacggaccgcagagaattggccggaagtataagaaagtgcgatttatggcctatacagacgaaacctttaagacaagggaggccatccagcatgagagtgggattttgggacctcttctttacggcgaagttggtgataccctcctcatcatcttcaagaatcaagcttctcgcccctataacatttacccacacgggatcactgacgttaggcctttgtatagcagaagacttcccaaaggcgtgaagcatctcaaagacttccccattttgccaggcgagatctttaagtacaaatggaccgtcacagtggaagatggaccgactaaatcagaccctcgatgccttacgcggtactattcctccttcgtgaatatggagagagatttggcaagcggactcataggaccactcctcatctgttacaaggaatctgtagaccagaggggtaaccagattatgagtgataaacgcaatgtgatcctttttagcgtcttcgacgagaaccggtcctggtacttgaccgagaatatacaaaggttccttcccaaccccgcaggcgttcagttggaagaccctgagtttcaggccagcaatattatgcactcaatcaacggctatgtgtttgatagtctccagctttctgtttgcctccatgaagtagcctattggtacatcttgtcaattggtgctcaaacagacttcctctccgtcttcttctccggctacacctttaagcacaagatggtgtatgaggacactctcacactctttccattttctggagaaaccgtgttcatgagcatggagaatccaggcctttggatcttgggttgccacaacagtgattttcgcaatcggggaatgactgctctcctcaaagtcagcagctgtgataagaacacaggcgactattacgaagattcttacgaggacataagtgcctactttgactccaagaataacgccattgagcccagatcattctcccagaatcctcccgtgcttaaaaggcatcagcgcgaaatcaccagaactactcttcagtctgatcaagaggagattgactatgacgacaccataagcgtggaaatgaagaaggaggatttcgatatctatgacgaagatgagaaccagtctccgcggagctttcagaagaagacgcgacactacttcattgcagcagtcgaaaggctttgggactacggtatgtcatcatcccctcatgtgttgcgcaatagagctcagagtggaagtgttccacagttcaagaaagtcgtctttcaagagtttacagatggcagcttcacacagcctctctatcggggcgagcttaacgaacatttgggactccttggtccctatatccgagccgaagtggaggacaacattatggttacctttaggaatcaagcctctcgcccctacagcttctactcctccctcatcagttatgaggaggatcagagacaaggcgctgaaccacggaagaactttgtgaaaccgaatgagacgaagacctacttctggaaagtacagcaccacatggcccccacaaaagacgaattcgattgcaaagcatgggcgtatttttcagacgttgacttggagaaagatgtacattcaggacttattggtcctttgttggtgtgtcacactaacactctcaatccagcccatggcaggcaggtgacagtccaggaattcgctcttttctttaccatctttgatgagaccaagtcctggtacttcacggaaaacatggagcgcaattgcagagccccctgtaacatacagatggaggaccctacctttaaggaaaattatcggttccacgcaatcaacggatacattatggatacactccctggccttgtgatggctcaggaccaacgaatcaggtggtacctcctcagcatgggttctaatgagaacatacactccattcacttttcaggacatgtgttcactgtccggaagaaagaagagtataagatggccctctacaatttgtatccaggcgtgtttgagaccgttgaaatgcttccctctaaagctggcatctggagagtagagtgcttgatcggagaacatcttcacgcaggtatgagcaccttgttcctcgtgtacagcaacaaatgtcagaccccacttggcatggccagtggacacattcgcgactttcagatcacagcatctggccagtatggacaatgggccccaaagttggctcgcctccattactccggtagcataaatgcgtggtccactaaagaacctttcagctggattaaggtcgatcttcttgcccccatgatcatccacggcattaagacacagggagcgaggcagaaattctcctccctctacatctcacagttcattattatgtatagtttggacggcaagaagtggcaaacttatagaggtaacagtactggaacagacatggtgttcttcggcaacgttgatagctctggcatcaaacacaacatctttaatcctcccataatagctcggtacatcagattgcatccgacccactacagcattaggagtacactccgaatggagcttatgggttgcgacttgaattcctgttcaatgccactcggaatggagtctaaagccatctctgatgcacagataaccgccagtagctactttacgaacatgtttgctacgtggtcaccctctaaggcaaggcttcatttgcaaggccggtctaatgcctggagacctcaggtgaacaacccgaaagaatggctccaggtggactttcagaagaccatgaaagtaacaggtgtcactactcagggagttaagtccttggatactagcatgtatgtgaaggagttccttatttcctcatcacaagatggccaccagtggaccctcttctttcagaatggtaaggtcaaagtgtttcagggcaatcaagacagcttcacacccgtggtgaacagtcttgatcctccactcttgacacgataccttcgaatccatccacagtcttgggagcaccagattgcattgcgcatggaagtacttggatgcgaggctcaggacctctac

SEQ ID NO: 968 - protein, 1457 aa, synthetic construct
  REGION 1..1457: note = Variant of human B-domain deleted Factor VIII
MQIELSTCFFLCYLRFCFSATRRYYLGAVELSWDYMQSDLGELPVDARFPPRVPKSFPFNTSVVYKKTLFVEFTDHLFNIAKPRPPWMGLLGPTIQAEVYDTVVITLKNMASHPVSLHAVGVSYWKASEGAEYDDQTSQREKEDDKVFPGGSHTYVWQVLKENGPMASDPPCLTYSYLSHVDLVKDLNSGLIGALLVCREGSLAKEKTQTLHKFILLFAVFDEGKSWHSETKNSLMQDRDAASARAWPKMHTVNGYVNRTLPGLIGCHRKSVYWHVIGMGTTPEVHSIFLEGHTFLVRNHRQASLGISPITFLTAQTLLMDLGQFLLFCHIPSHQHDGMEAYVKVDSCPEEPQLRMKNNEEAEDYDDDLTDSEMDVVRFDDDNSPSIIQARSVAKKHPKTWVHYIAAEEEDWDYAPLVLAPDDRSYKSQYLNNGPQRIGRKYKKVRFMAYTDETFKTREAIQHESGILGPLLYGEVGDTLLIIFKNQASRPYNIYPHGITDVRPLYSRRLPKGVKHLKDFPILPGEIFKYKWTVTVEDGPTKSDPRCLTRYYSSFVNMERDLASGLIGPLLICYKESVDQRGNQIMSDKRNVILFSVFDENRSWYLTENIQRFLPNPAGVQLEDPEFQASNIMHSINGYVFDSLQLSVCLHEVAYWYILSIGAQTDFLSVFFSGYTFKHKMVYEDTLTLFPFSGETVFMSMENPGLWILGCHNSDFRNRGMTALLKVSSCDKNTGDYYEDSYEDISAYFDSKNNAIEPRSFSQNPPVLKRHQREITRTTLQSDQEEIDYDDTISVEMKKEDFDIYDEDENQSPRSFQKKTRHYFIAAVERLWDYGMSSSPHVLRNRAQSGSVPQFKKVVFQEFTDGSFTQPLYRGELNEHLGLLGPYIRAEVEDNIMVTFRNQASRPYSFYSSLISYEEDQRQGAEPRKNFVKPNETKTYFWKVQHHMAPTKDEFDCKAWAYFSDVDLEKDVHSGLIGPLLVCHTNTLNPAHGRQVTVQEFALFFTIFDETKSWYFTENMERNCRAPCNIQMEDPTFKENYRFHAINGYIMDTLPGLVMAQDQRIRWYLLSMGSNENIHSIHFSGHVFTVRKKEEYKMALYNLYPGVFETVEMLPSKAGIWRVECLIGEHLHAGMSTLFLVYSNKCQTPLGMASGHIRDFQITASGQYGQWAPKLARLHYSGSINAWSTKEPFSWIKVDLLAPMIIHGIKTQGARQKFSSLYISQFIIMYSLDGKKWQTYRGNSTGTDMVFFGNVDSSGIKHNIFNPPIIARYIRLHPTHYSIRSTLRMELMGCDLNSCSMPLGMESKAISDAQITASSYFTNMFATWSPSKARLHLQGRSNAWRPQVNNPKEWLQVDFQKTMKVTGVTTQGVKSLDTSMYVKEFLISSSQDGHQWTLFFQNGKVKVFQGNQDSFTPVVNSLDPPLLTRYLRIHPQSWEHQIALRMEVLGCEAQDLY

SEQ ID NO: 969 - DNA, 4371 bp, synthetic construct
  misc_feature 1..4371: note = Variant of human B-domain deleted Factor VIII
  source 1..4371: mol_type = other DNA
atgcagattgaactgtctacctgcttcttcctctgtttggggaggttctgctttagcgccactagacggtactaccttggcgctgtggagctgtcctgggactatatgcagagtgatttgggagagcttcccgtcgacgcacgatttcctcctcgcgttccaaagtcatttccctttaacacaagcgtggtgtacaagaagacgctcttcgtcgaattcaccgatcacctgttcaatatcgccaaacccagaccaccatggatgggtcttttggggcctaccatacaagcggaggtgtatgacacagttgttatcactctcaagaacatggcttctcatccggtaagtcttcacgcagtgggcgtgtcctactggaaagcttcagaaggagccgagtatgatgatcagacatcccagagggagaaagaagacgacaaggtatttccaggtgggtctcatacctatgtgtggcaagtgctcaaagagaatggccctatggcaagcgatccgccgtgtttgacttacagctacctttcacacgttgacctcgtcaaggacctcaactccgggttgattggagccttgttggtatgcagggaaggatctcttgccaaagagaagacacagaccctccacaagtttatccttctctttgctgtgttcgatgagggcaaaagttggcatagcgaaacgaagaattccctcatgcaggatcgcgacgcagccagcgccagagcttggcccaagatgcacactgtgaacggatatgtcaataggacgcttcctggcttgattgggtgtcatcggaaaagtgtctactggcacgtgatcggaatggggacaacaccagaggtccactccatatttctcgaaggccataccttccttgttcgaaaccacagacaggcatccttggggatctctcccattacctttctcactgcccaaacgctccttatggacttgggtcagttccttctcttttgccatatcccgtcacaccagcatgatggtatggaagcttatgtgaaagtcgacagttgtcctgaggagccacagttgcgcatgaagaataatgaagaagccgaggattacgacgacgatctcaccgattctgagatggacgtggtgaggtttgatgacgacaactctccctccatcattcaagctcggagcgtggcgaagaaacaccccaagacttgggtccactatatagcggcggaagaggaggattgggattacgctcctcttgtattggcaccagatgaccgctcatacaaaagccagtacctcaacaacggaccgcagagaattggccggaagtataagaaagtgcgatttatggcctatacagacgaaacctttaagacaagggaggccatccagcatgagagtgggattttgggacctcttctttacggcgaagttggtgataccctcctcatcatcttcaagaatcaagcttctcgcccctataacatttacccacacgggatcactgacgttaggcctttgtatagcagaagacttcccaaaggcgtgaagcatctcaaagacttccccattttgccaggcgagatctttaagtacaaatggaccgtcacagtggaagatggaccgactaaatcagaccctcgatgccttacgcggtactattcctccttcgtgaatatggagagagatttggcaagcggactcataggaccactcctcatctgttacaaggaatctgtagaccagaggggtaaccagattatgagtgataaacgcaatgtgatcctttttagcgtcttcgacgagaaccggtcctggtacttgaccgagaatatacaaaggttccttcccaaccccgcaggcgttcagttggaagaccctgagtttcaggccagcaatattatgcactcaatcaacggctatgtgtttgatagtctccagctttctgtttgcctccatgaagtagcctattggtacatcttgtcaattggtgctcaaacagacttcctctccgtcttcttctccggctacacctttaagcacaagatggtgtatgaggacactctcacactctttccattttctggagaaaccgtgttcatgagcatggagaatccaggcctttggatcttgggttgccacaacagtgattttcgcaatcggggaatgactgctctcctcaaagtcagcagctgtgataagaacacaggcgactattacgaagattcttacgaggacataagtgcctactttgactccaagaataacgccattgagcccagatcattctcccagaatcctcccgtgcttaaaaggcatcagcgcgaaatcaccagaactactcttcagtctgatcaagaggagattgactatgacgacaccataagcgtggaaatgaagaaggaggatttcgatatctatgacgaagatgagaaccagtctccgcggagctttcagaagaagacgcgacactacttcattgcagcagtcgaaaggctttgggactacggtatgtcatcatcccctcatgtgttgcgcaatagagctcagagtggaagtgttccacagttcaagaaagtcgtctttcaagagtttacagatggcagcttcacacagcctctctatcggggcgagcttaacgaacatttgggactccttggtccctatatccgagccgaagtggaggacaacattatggttacctttaggaatcaagcctctcgcccctacagcttctactcctccctcatcagttatgaggaggatcagagacaaggcgctgaaccacggaagaactttgtgaaaccgaatgagacgaagacctacttctggaaagtacagcaccacatggcccccacaaaagacgaattcgattgcaaagcatgggcgtatttttcagacgttgacttggagaaagatgtacattcaggacttattggtcctttgttggtgtgtcacactaacactctcaatccagcccatggcaggcaggtgacagtccaggaattcgctcttttctttaccatctttgatgagaccaagtcctggtacttcacggaaaacatggagcgcaattgcagagccccctgtaacatacagatggaggaccctacctttaaggaaaattatcggttccacgcaatcaacggatacattatggatacactccctggccttgtgatggctcaggaccaacgaatcaggtggtacctcctcagcatgggttctaatgagaacatacactccattcacttttcaggacatgtgttcactgtccggaagaaagaagagtataagatggccctctacaatttgtatccaggcgtgtttgagaccgttgaaatgcttccctctaaagctggcatctggagagtagagtgcttgatcggagaacatcttcacgcaggtatgagcaccttgttcctcgtgtacagcaacaaatgtcagaccccacttggcatggccagtggacacattcgcgactttcagatcacagcatctggccagtatggacaatgggccccaaagttggctcgcctccattactccggtagcataaatgcgtggtccactaaagaacctttcagctggattaaggtcgatcttcttgcccccatgatcatccacggcattaagacacagggagcgaggcagaaattctcctccctctacatctcacagttcattattatgtatagtttggacggcaagaagtggcaaacttatagaggtaacagtactggaacagacatggtgttcttcggcaacgttgatagctctggcatcaaacacaacatctttaatcctcccataatagctcggtacatcagattgcatccgacccactacagcattaggagtacactccgaatggagcttatgggttgcgacttgaattcctgttcaatgccactcggaatggagtctaaagccatctctgatgcacagataaccgccagtagctactttacgaacatgtttgctacgtggtcaccctctaaggcaaggcttcatttgcaaggccggtctaatgcctggagacctcaggtgaacaacccgaaagaatggctccaggtggactttcagaagaccatgaaagtaacaggtgtcactactcagggagttaagtccttggatactagcatgtatgtgaaggagttccttatttcctcatcacaagatggccaccagtggaccctcttctttcagaatggtaaggtcaaagtgtttcagggcaatcaagacagcttcacacccgtggtgaacagtcttgatcctccactcttgacacgataccttcgaatccatccacagtcttgggagcaccagattgcattgcgcatggaagtacttggatgcgaggctcaggacctctac

SEQ ID NO: 970 - protein, 1457 aa, synthetic construct
  REGION 1..1457: note = Variant of human B-domain deleted Factor VIII
MQIELSTCFFLCLGRFCFSATRRYYLGAVELSWDYMQSDLGELPVDARFPPRVPKSFPFNTSVVYKKTLFVEFTDHLFNIAKPRPPWMGLLGPTIQAEVYDTVVITLKNMASHPVSLHAVGVSYWKASEGAEYDDQTSQREKEDDKVFPGGSHTYVWQVLKENGPMASDPPCLTYSYLSHVDLVKDLNSGLIGALLVCREGSLAKEKTQTLHKFILLFAVFDEGKSWHSETKNSLMQDRDAASARAWPKMHTVNGYVNRTLPGLIGCHRKSVYWHVIGMGTTPEVHSIFLEGHTFLVRNHRQASLGISPITFLTAQTLLMDLGQFLLFCHIPSHQHDGMEAYVKVDSCPEEPQLRMKNNEEAEDYDDDLTDSEMDVVRFDDDNSPSIIQARSVAKKHPKTWVHYIAAEEEDWDYAPLVLAPDDRSYKSQYLNNGPQRIGRKYKKVRFMAYTDETFKTREAIQHESGILGPLLYGEVGDTLLIIFKNQASRPYNIYPHGITDVRPLYSRRLPKGVKHLKDFPILPGEIFKYKWTVTVEDGPTKSDPRCLTRYYSSFVNMERDLASGLIGPLLICYKESVDQRGNQIMSDKRNVILFSVFDENRSWYLTENIQRFLPNPAGVQLEDPEFQASNIMHSINGYVFDSLQLSVCLHEVAYWYILSIGAQTDFLSVFFSGYTFKHKMVYEDTLTLFPFSGETVFMSMENPGLWILGCHNSDFRNRGMTALLKVSSCDKNTGDYYEDSYEDISAYFDSKNNAIEPRSFSQNPPVLKRHQREITRTTLQSDQEEIDYDDTISVEMKKEDFDIYDEDENQSPRSFQKKTRHYFIAAVERLWDYGMSSSPHVLRNRAQSGSVPQFKKVVFQEFTDGSFTQPLYRGELNEHLGLLGPYIRAEVEDNIMVTFRNQASRPYSFYSSLISYEEDQRQGAEPRKNFVKPNETKTYFWKVQHHMAPTKDEFDCKAWAYFSDVDLEKDVHSGLIGPLLVCHTNTLNPAHGRQVTVQEFALFFTIFDETKSWYFTENMERNCRAPCNIQMEDPTFKENYRFHAINGYIMDTLPGLVMAQDQRIRWYLLSMGSNENIHSIHFSGHVFTVRKKEEYKMALYNLYPGVFETVEMLPSKAGIWRVECLIGEHLHAGMSTLFLVYSNKCQTPLGMASGHIRDFQITASGQYGQWAPKLARLHYSGSINAWSTKEPFSWIKVDLLAPMIIHGIKTQGARQKFSSLYISQFIIMYSLDGKKWQTYRGNSTGTDMVFFGNVDSSGIKHNIFNPPIIARYIRLHPTHYSIRSTLRMELMGCDLNSCSMPLGMESKAISDAQITASSYFTNMFATWSPSKARLHLQGRSNAWRPQVNNPKEWLQVDFQKTMKVTGVTTQGVKSLDTSMYVKEFLISSSQDGHQWTLFFQNGKVKVFQGNQDSFTPVVNSLDPPLLTRYLRIHPQSWEHQIALRMEVLGCEAQDLY

SEQ ID NO: 971 - DNA, 4371 bp, synthetic construct
  misc_feature 1..4371: note = Variant of human B-domain deleted Factor VIII
  source 1..4371: mol_type = other DNA
atgcagattgaactgtctacctgcttcttcctctgtttgctgaggttcgtgtttagcgccactagacggtactaccttggcgctgtggagctgtcctgggactatatgcagagtgatttgggagagcttcccgtcgacgcacgatttcctcctcgcgttccaaagtcatttccctttaacacaagcgtggtgtacaagaagacgctcttcgtcgaattcaccgatcacctgttcaatatcgccaaacccagaccaccatggatgggtcttttggggcctaccatacaagcggaggtgtatgacacagttgttatcactctcaagaacatggcttctcatccggtaagtcttcacgcagtgggcgtgtcctactggaaagcttcagaaggagccgagtatgatgatcagacatcccagagggagaaagaagacgacaaggtatttccaggtgggtctcatacctatgtgtggcaagtgctcaaagagaatggccctatggcaagcgatccgccgtgtttgacttacagctacctttcacacgttgacctcgtcaaggacctcaactccgggttgattggagccttgttggtatgcagggaaggatctcttgccaaagagaagacacagaccctccacaagtttatccttctctttgctgtgttcgatgagggcaaaagttggcatagcgaaacgaagaattccctcatgcaggatcgcgacgcagccagcgccagagcttggcccaagatgcacactgtgaacggatatgtcaataggacgcttcctggcttgattgggtgtcatcggaaaagtgtctactggcacgtgatcggaatggggacaacaccagaggtccactccatatttctcgaaggccataccttccttgttcgaaaccacagacaggcatccttggggatctctcccattacctttctcactgcccaaacgctccttatggacttgggtcagttccttctcttttgccatatcccgtcacaccagcatgatggtatggaagcttatgtgaaagtcgacagttgtcctgaggagccacagttgcgcatgaagaataatgaagaagccgaggattacgacgacgatctcaccgattctgagatggacgtggtgaggtttgatgacgacaactctccctccatcattcaagctcggagcgtggcgaagaaacaccccaagacttgggtccactatatagcggcggaagaggaggattgggattacgctcctcttgtattggcaccagatgaccgctcatacaaaagccagtacctcaacaacggaccgcagagaattggccggaagtataagaaagtgcgatttatggcctatacagacgaaacctttaagacaagggaggccatccagcatgagagtgggattttgggacctcttctttacggcgaagttggtgataccctcctcatcatcttcaagaatcaagcttctcgcccctataacatttacccacacgggatcactgacgttaggcctttgtatagcagaagacttcccaaaggcgtgaagcatctcaaagacttccccattttgccaggcgagatctttaagtacaaatggaccgtcacagtggaagatggaccgactaaatcagaccctcgatgccttacgcggtactattcctccttcgtgaatatggagagagatttggcaagcggactcataggaccactcctcatctgttacaaggaatctgtagaccagaggggtaaccagattatgagtgataaacgcaatgtgatcctttttagcgtcttcgacgagaaccggtcctggtacttgaccgagaatatacaaaggttccttcccaaccccgcaggcgttcagttggaagaccctgagtttcaggccagcaatattatgcactcaatcaacggctatgtgtttgatagtctccagctttctgtttgcctccatgaagtagcctattggtacatcttgtcaattggtgctcaaacagacttcctctccgtcttcttctccggctacacctttaagcacaagatggtgtatgaggacactctcacactctttccattttctggagaaaccgtgttcatgagcatggagaatccaggcctttggatcttgggttgccacaacagtgattttcgcaatcggggaatgactgctctcctcaaagtcagcagctgtgataagaacacaggcgactattacgaagattcttacgaggacataagtgcctactttgactccaagaataacgccattgagcccagatcattctcccagaatcctcccgtgcttaaaaggcatcagcgcgaaatcaccagaactactcttcagtctgatcaagaggagattgactatgacgacaccataagcgtggaaatgaagaaggaggatttcgatatctatgacgaagatgagaaccagtctccgcggagctttcagaagaagacgcgacactacttcattgcagcagtcgaaaggctttgggactacggtatgtcatcatcccctcatgtgttgcgcaatagagctcagagtggaagtgttccacagttcaagaaagtcgtctttcaagagtttacagatggcagcttcacacagcctctctatcggggcgagcttaacgaacatttgggactccttggtccctatatccgagccgaagtggaggacaacattatggttacctttaggaatcaagcctctcgcccctacagcttctactcctccctcatcagttatgaggaggatcagagacaaggcgctgaaccacggaagaactttgtgaaaccgaatgagacgaagacctacttctggaaagtacagcaccacatggcccccacaaaagacgaattcgattgcaaagcatgggcgtatttttcagacgttgacttggagaaagatgtacattcaggacttattggtcctttgttggtgtgtcacactaacactctcaatccagcccatggcaggcaggtgacagtccaggaattcgctcttttctttaccatctttgatgagaccaagtcctggtacttcacggaaaacatggagcgcaattgcagagccccctgtaacatacagatggaggaccctacctttaaggaaaattatcggttccacgcaatcaacggatacattatggatacactccctggccttgtgatggctcaggaccaacgaatcaggtggtacctcctcagcatgggttctaatgagaacatacactccattcacttttcaggacatgtgttcactgtccggaagaaagaagagtataagatggccctctacaatttgtatccaggcgtgtttgagaccgttgaaatgcttccctctaaagctggcatctggagagtagagtgcttgatcggagaacatcttcacgcaggtatgagcaccttgttcctcgtgtacagcaacaaatgtcagaccccacttggcatggccagtggacacattcgcgactttcagatcacagcatctggccagtatggacaatgggccccaaagttggctcgcctccattactccggtagcataaatgcgtggtccactaaagaacctttcagctggattaaggtcgatcttcttgcccccatgatcatccacggcattaagacacagggagcgaggcagaaattctcctccctctacatctcacagttcattattatgtatagtttggacggcaagaagtggcaaacttatagaggtaacagtactggaacagacatggtgttcttcggcaacgttgatagctctggcatcaaacacaacatctttaatcctcccataatagctcggtacatcagattgcatccgacccactacagcattaggagtacactccgaatggagcttatgggttgcgacttgaattcctgttcaatgccactcggaatggagtctaaagccatctctgatgcacagataaccgccagtagctactttacgaacatgtttgctacgtggtcaccctctaaggcaaggcttcatttgcaaggccggtctaatgcctggagacctcaggtgaacaacccgaaagaatggctccaggtggactttcagaagaccatgaaagtaacaggtgtcactactcagggagttaagtccttggatactagcatgtatgtgaaggagttccttatttcctcatcacaagatggccaccagtggaccctcttctttcagaatggtaaggtcaaagtgtttcagggcaatcaagacagcttcacacccgtggtgaacagtcttgatcctccactcttgacacgataccttcgaatccatccacagtcttgggagcaccagattgcattgcgcatggaagtacttggatgcgaggctcaggacctctac

SEQ ID NO: 972 - protein, 1457 aa, synthetic construct
  REGION 1..1457: note = Variant of human B-domain deleted Factor VIII
MQIELSTCFFLCLLRFVFSATRRYYLGAVELSWDYMQSDLGELPVDARFPPRVPKSFPFNTSVVYKKTLFVEFTDHLFNIAKPRPPWMGLLGPTIQAEVYDTVVITLKNMASHPVSLHAVGVSYWKASEGAEYDDQTSQREKEDDKVFPGGSHTYVWQVLKENGPMASDPPCLTYSYLSHVDLVKDLNSGLIGALLVCREGSLAKEKTQTLHKFILLFAVFDEGKSWHSETKNSLMQDRDAASARAWPKMHTVNGYVNRTLPGLIGCHRKSVYWHVIGMGTTPEVHSIFLEGHTFLVRNHRQASLGISPITFLTAQTLLMDLGQFLLFCHIPSHQHDGMEAYVKVDSCPEEPQLRMKNNEEAEDYDDDLTDSEMDVVRFDDDNSPSIIQARSVAKKHPKTWVHYIAAEEEDWDYAPLVLAPDDRSYKSQYLNNGPQRIGRKYKKVRFMAYTDETFKTREAIQHESGILGPLLYGEVGDTLLIIFKNQASRPYNIYPHGITDVRPLYSRRLPKGVKHLKDFPILPGEIFKYKWTVTVEDGPTKSDPRCLTRYYSSFVNMERDLASGLIGPLLICYKESVDQRGNQIMSDKRNVILFSVFDENRSWYLTENIQRFLPNPAGVQLEDPEFQASNIMHSINGYVFDSLQLSVCLHEVAYWYILSIGAQTDFLSVFFSGYTFKHKMVYEDTLTLFPFSGETVFMSMENPGLWILGCHNSDFRNRGMTALLKVSSCDKNTGDYYEDSYEDISAYFDSKNNAIEPRSFSQNPPVLKRHQREITRTTLQSDQEEIDYDDTISVEMKKEDFDIYDEDENQSPRSFQKKTRHYFIAAVERLWDYGMSSSPHVLRNRAQSGSVPQFKKVVFQEFTDGSFTQPLYRGELNEHLGLLGPYIRAEVEDNIMVTFRNQASRPYSFYSSLISYEEDQRQGAEPRKNFVKPNETKTYFWKVQHHMAPTKDEFDCKAWAYFSDVDLEKDVHSGLIGPLLVCHTNTLNPAHGRQVTVQEFALFFTIFDETKSWYFTENMERNCRAPCNIQMEDPTFKENYRFHAINGYIMDTLPGLVMAQDQRIRWYLLSMGSNENIHSIHFSGHVFTVRKKEEYKMALYNLYPGVFETVEMLPSKAGIWRVECLIGEHLHAGMSTLFLVYSNKCQTPLGMASGHIRDFQITASGQYGQWAPKLARLHYSGSINAWSTKEPFSWIKVDLLAPMIIHGIKTQGARQKFSSLYISQFIIMYSLDGKKWQTYRGNSTGTDMVFFGNVDSSGIKHNIFNPPIIARYIRLHPTHYSIRSTLRMELMGCDLNSCSMPLGMESKAISDAQITASSYFTNMFATWSPSKARLHLQGRSNAWRPQVNNPKEWLQVDFQKTMKVTGVTTQGVKSLDTSMYVKEFLISSSQDGHQWTLFFQNGKVKVFQGNQDSFTPVVNSLDPPLLTRYLRIHPQSWEHQIALRMEVLGCEAQDLY

SEQ ID NO: 973 - DNA, 4371 bp, synthetic construct
  misc_feature 1..4371: note = Variant of human B-domain deleted Factor VIII
  source 1..4371: mol_type = other DNA
atgcagattgaactgtctacctgcttcttcctctgtttgctgaggttctgctttagcgccactagacggtactaccttggcgctgtggagctgtcctgggactatatgcagagtgatttgggagagcttcccgtcgacgcacgatttcctcctcgcgttccaaagtcatttccctttaacacaagcgtggtgtacaagaagacgctcttcgtcgaattcaccgatcacctgttcaatatcgccaaacccagaccaccatggatgggtcttttggggcctaccatacaagcggaggtgtatgacacagttgttatcactctcaagaacatggcttctcatccggtaagtcttcacgcagtgggcgtgtcctactggaaagcttcagaaggagccgagtatgatgatcagacatcccagagggagaaagaagacgacaaggtatttccaggtgggtctcatacctatgtgtggcaagtgctcaaagagaatggccctatggcaagcgatccgccgtgtttgacttacagctacctttcacacgttgacctcgtcaaggacctcaactccgggttgattggagccttgttggtatgcagggaaggatctcttgccaaagagaagacacagaccctccacaagtttatccttctctttgctgtgttcgatgagggcaaaagttggcatagcgaaacgaagaattccctcatgcaggatcgcgacgcagccagcgccagagcttggcccaagatgcacactgtgaacggatatgtcaataggacgcttcctggcttgattgggtgtcatcggaaaagtgtctactggcacgtgatcggaatggggacaacaccagaggtccactccatatttctcgaaggccataccttccttgttcgaaaccacagacaggcatccttggggatctctcccattacctttctcactgcccaaacgctccttatggacttgggtcagttccttctcttttgccatatcccgtcacaccagcatgatggtatggaagcttatgtgaaagtcgacagttgtcctgaggagccacagttgcgcatgaagaataatgaagaagccgaggattacgacgacgatctcaccgattctgagatggacgtggtgaggtttgatgacgacaactctccctccatcattcaagctcggagcgtggcgaagaaacaccccaagacttgggtccactatatagcggcggaagaggaggattgggattacgctcctcttgtattggcaccagatgaccgctcatacaaaagccagtacctcaacaacggaccgcagagaattggccggaagtataagaaagtgcgatttatggcctatacagacgaaacctttaagacaagggaggccatccagcatgagagtgggattttgggacctcttctttacggcgaagttggtgataccctcctcatcatcttcaagaatcaagcttctcgcccctataacatttacccacacgggatcactgacgttaggcctttgtatagcagaagacttcccaaaggcgtgaagcatctcaaagacttccccattttgccaggcgagatctttaagtacaaatggaccgtcacagtggaagatggaccgactaaatcagaccctcgatgccttacgcggtactattcctccttcgtgaatatggagagagatttggcaagcggactcataggaccactcctcatctgttacaaggaatctgtagaccagaggggtaaccagattatgagtgataaacgcaatgtgatcctttttagcgtcttcgacgagaaccggtcctggtacttgaccgagaatatacaaaggttccttcccaaccccgcaggcgttcagttggaagaccctgagtttcaggccagcaatattatgcactcaatcaacggctatgtgtttgatagtctccagctttctgtttgcctccatgaagtagcctattggtacatcttgtcaattggtgctcaaacagacttcctctccgtcttcttctccggctacacctttaagcacaagatggtgtatgaggacactctcacactctttccattttctggagaaaccgtgttcatgagcatggagaatccaggcctttggatcttgggttgccacaacagtgattttcgcaatcggggaatgactgctctcctcaaagtcagcagctgtgataagaacacaggcgactattacgaagattcttacgaggacataagtgcctactttgactccaagaataacgccattgagcccagatcattctcccagaatcctcccgtgcttaaaaggcatcagcgcgaaatcaccagaactactcttcagtctgatcaagaggagattgactatgacgacaccataagcgtggaaatgaagaaggaggatttcgatatctatgacgaagatgagaaccagtctccgcggagctttcagaagaagacgcgacactacttcattgcagcagtcgaaaggctttgggactacggtgtttcatcatcccctcatgtgttgcgcaatagagctcagagtggaagtgttccacagttcaagaaagtcgtctttcaagagtttacagatggcagcttcacacagcctctctatcggggcgagcttaacgaacatttgggactccttggtccctatatccgagccgaagtggaggacaacattatggttacctttaggaatcaagcctctcgcccctacagcttctactcctccctcatcagttatgaggaggatcagagacaaggcgctgaaccacggaagaactttgtgaaaccgaatgagacgaagacctacttctggaaagtacagcaccacatggcccccacaaaagacgaattcgattgcaaagcatgggcgtatttttcagacgttgacttggagaaagatgtacattcaggacttattggtcctttgttggtgtgtcacactaacactctcaatccagcccatggcaggcaggtgacagtccaggaattcgctcttttctttaccatctttgatgagaccaagtcctggtacttcacggaaaacatggagcgcaattgcagagccccctgtaacatacagatggaggaccctacctttaaggaaaattatcggttccacgcaatcaacggatacattatggatacactccctggccttgtgatggctcaggaccaacgaatcaggtggtacctcctcagcatgggttctaatgagaacatacactccattcacttttcaggacatgtgttcactgtccggaagaaagaagagtataagatggccctctacaatttgtatccaggcgtgtttgagaccgttgaaatgcttccctctaaagctggcatctggagagtagagtgcttgatcggagaacatcttcacgcaggtatgagcaccttgttcctcgtgtacagcaacaaatgtcagaccccacttggcatggccagtggacacattcgcgactttcagatcacagcatctggccagtatggacaatgggccccaaagttggctcgcctccattactccggtagcataaatgcgtggtccactaaagaacctttcagctggattaaggtcgatcttcttgcccccatgatcatccacggcattaagacacagggagcgaggcagaaattctcctccctctacatctcacagttcattattatgtatagtttggacggcaagaagtggcaaacttatagaggtaacagtactggaacagacatggtgttcttcggcaacgttgatagctctggcatcaaacacaacatctttaatcctcccataatagctcggtacatcagattgcatccgacccactacagcattaggagtacactccgaatggagcttatgggttgcgacttgaattcctgttcaatgccactcggaatggagtctaaagccatctctgatgcacagataaccgccagtagctactttacgaacatgtttgctacgtggtcaccctctaaggcaaggcttcatttgcaaggccggtctaatgcctggagacctcaggtgaacaacccgaaagaatggctccaggtggactttcagaagaccatgaaagtaacaggtgtcactactcagggagttaagtccttggatactagcatgtatgtgaaggagttccttatttcctcatcacaagatggccaccagtggaccctcttctttcagaatggtaaggtcaaagtgtttcagggcaatcaagacagcttcacacccgtggtgaacagtcttgatcctccactcttgacacgataccttcgaatccatccacagtcttgggagcaccagattgcattgcgcatggaagtacttggatgcgaggctcaggacctctac

SEQ ID NO: 974 - protein, 1457 aa, synthetic construct
  REGION 1..1457: note = Variant of human B-domain deleted Factor VIII
MQIELSTCFFLCLLRFCFSATRRYYLGAVELSWDYMQSDLGELPVDARFPPRVPKSFPFNTSVVYKKTLFVEFTDHLFNIAKPRPPWMGLLGPTIQAEVYDTVVITLKNMASHPVSLHAVGVSYWKASEGAEYDDQTSQREKEDDKVFPGGSHTYVWQVLKENGPMASDPPCLTYSYLSHVDLVKDLNSGLIGALLVCREGSLAKEKTQTLHKFILLFAVFDEGKSWHSETKNSLMQDRDAASARAWPKMHTVNGYVNRTLPGLIGCHRKSVYWHVIGMGTTPEVHSIFLEGHTFLVRNHRQASLGISPITFLTAQTLLMDLGQFLLFCHIPSHQHDGMEAYVKVDSCPEEPQLRMKNNEEAEDYDDDLTDSEMDVVRFDDDNSPSIIQARSVAKKHPKTWVHYIAAEEEDWDYAPLVLAPDDRSYKSQYLNNGPQRIGRKYKKVRFMAYTDETFKTREAIQHESGILGPLLYGEVGDTLLIIFKNQASRPYNIYPHGITDVRPLYSRRLPKGVKHLKDFPILPGEIFKYKWTVTVEDGPTKSDPRCLTRYYSSFVNMERDLASGLIGPLLICYKESVDQRGNQIMSDKRNVILFSVFDENRSWYLTENIQRFLPNPAGVQLEDPEFQASNIMHSINGYVFDSLQLSVCLHEVAYWYILSIGAQTDFLSVFFSGYTFKHKMVYEDTLTLFPFSGETVFMSMENPGLWILGCHNSDFRNRGMTALLKVSSCDKNTGDYYEDSYEDISAYFDSKNNAIEPRSFSQNPPVLKRHQREITRTTLQSDQEEIDYDDTISVEMKKEDFDIYDEDENQSPRSFQKKTRHYFIAAVERLWDYGVSSSPHVLRNRAQSGSVPQFKKVVFQEFTDGSFTQPLYRGELNEHLGLLGPYIRAEVEDNIMVTFRNQASRPYSFYSSLISYEEDQRQGAEPRKNFVKPNETKTYFWKVQHHMAPTKDEFDCKAWAYFSDVDLEKDVHSGLIGPLLVCHTNTLNPAHGRQVTVQEFALFFTIFDETKSWYFTENMERNCRAPCNIQMEDPTFKENYRFHAINGYIMDTLPGLVMAQDQRIRWYLLSMGSNENIHSIHFSGHVFTVRKKEEYKMALYNLYPGVFETVEMLPSKAGIWRVECLIGEHLHAGMSTLFLVYSNKCQTPLGMASGHIRDFQITASGQYGQWAPKLARLHYSGSINAWSTKEPFSWIKVDLLAPMIIHGIKTQGARQKFSSLYISQFIIMYSLDGKKWQTYRGNSTGTDMVFFGNVDSSGIKHNIFNPPIIARYIRLHPTHYSIRSTLRMELMGCDLNSCSMPLGMESKAISDAQITASSYFTNMFATWSPSKARLHLQGRSNAWRPQVNNPKEWLQVDFQKTMKVTGVTTQGVKSLDTSMYVKEFLISSSQDGHQWTLFFQNGKVKVFQGNQDSFTPVVNSLDPPLLTRYLRIHPQSWEHQIALRMEVLGCEAQDLY

SEQ ID NO: 975 - DNA, 4371 bp, synthetic construct
  misc_feature 1..4371: note = Variant of human B-domain deleted Factor VIII
  source 1..4371: mol_type = other DNA
atgcagattgaactgtctacctgcttcttcctctgtttgctgaggttctgctttagcgccactagacggtactaccttggcgctgtggagctgtcctgggactatatgcagagtgatttgggagagcttcccgtcgacgcacgatttcctcctcgcgttccaaagtcatttccctttaacacaagcgtggtgtacaagaagacgctcttcgtcgaattcaccgatcacctgttcaatatcgccaaacccagaccaccatggatgggtcttttggggcctaccatacaagcggaggtgtatgacacagttgttatcactctcaagaacatggcttctcatccggtaagtcttcacgcagtgggcgtgtcctactggaaagcttcagaaggagccgagtatgatgatcagacatcccagagggagaaagaagacgacaaggtatttccaggtgggtctcatacctatgtgtggcaagtgctcaaagagaatggccctatggcaagcgatccgccgtgtttgacttacagctacctttcacacgttgacctcgtcaaggacctcaactccgggttgattggagccttgttggtatgcagggaaggatctcttgccaaagagaagacacagaccctccacaagtttatccttctctttgctgtgttcgatgagggcaaaagttggcatagcgaaacgaagaattccctcatgcaggatcgcgacgcagccagcgccagagcttggcccaagatgcacactgtgaacggatatgtcaataggacgcttcctggcttgattgggtgtcatcggaaaagtgtctactggcacgtgatcggaatggggacaacaccagaggtccactccatatttctcgaaggccataccttccttgttcgaaaccacagacaggcatccttggggatctctcccattacctttctcactgcccaaacgctccttatggacttgggtcagttccttctcttttgccatatcccgtcacaccagcatgatggtatggaagcttatgtgaaagtcgacagttgtcctgaggagccacagttgcgcatgaagaataatgaagaagccgaggattacgacgacgatctcaccgattctgagatggacgtggtgaggtttgatgacgacaactctccctccatcattcaagctcggagcgtggcgaagaaacaccccaagacttgggtccactatatagcggcggaagaggaggattgggattacgctcctcttgtattggcaccagatgaccgctcatacaaaagccagtacctcaacaacggaccgcagagaattggccggaagtataagaaagtgcgatttatggcctatacagacgaaacctttaagacaagggaggccatccagcatgagagtgggattttgggacctcttctttacggcgaagttggtgataccctcctcatcatcttcaagaatcaagcttctcgcccctataacatttacccacacgggatcactgacgttaggcctttgtatagcagaagacttcccaaaggcgtgaagcatctcaaagacttccccattttgccaggcgagatctttaagtacaaatggaccgtcacagtggaagatggaccgactaaatcagaccctcgatgccttacgcggtactattcctccttcgtgaatatggagagagatttggcaagcggactcataggaccactcctcatctgttacaaggaatctgtagaccagaggggtaaccagattatgagtgataaacgcaatgtgatcctttttagcgtcttcgacgagaaccggtcctggtacttgaccgagaatatacaaaggttccttcccaaccccgcaggcgttcagttggaagaccctgagtttcaggccagcaatattatgcactcaatcaacggctatgtgtttgatagtctccagctttctgtttgcctccatgaagtagcctattggtacatcttgtcaattggtgctcaaacagacttcctctccgtcttcttctccggctacacctttaagcacaagatggtgtatgaggacactctcacactctttccattttctggagaaaccgtgttcatgagcatggagaatccaggcctttggatcttgggttgccacaacagtgattttcgcaatcggggaatgactgctctcctcaaagtcagcagctgtgataagaacacaggcgactattacgaagattcttacgaggacataagtgcctactttgactccaagaataacgccattgagcccagatcattctcccagaatcctcccgtgcttaaaaggcatcagcgcgaaatcaccagaactactcttcagtctgatcaagaggagattgactatgacgacaccataagcgtggaaatgaagaaggaggatttcgatatctatgacgaagatgagaaccagtctccgcggagctttcagaagaagacgcgacactacttcattgcagcagtcgaaaggctttgggactacggtatgtcatcaccgcctcatgtgttgcgcaatagagctcagagtggaagtgttccacagttcaagaaagtcgtctttcaagagtttacagatggcagcttcacacagcctctctatcggggcgagcttaacgaacatttgggactccttggtccctatatccgagccgaagtggaggacaacattatggttacctttaggaatcaagcctctcgcccctacagcttctactcctccctcatcagttatgaggaggatcagagacaaggcgctgaaccacggaagaactttgtgaaaccgaatgagacgaagacctacttctggaaagtacagcaccacatggcccccacaaaagacgaattcgattgcaaagcatgggcgtatttttcagacgttgacttggagaaagatgtacattcaggacttattggtcctttgttggtgtgtcacactaacactctcaatccagcccatggcaggcaggtgacagtccaggaattcgctcttttctttaccatctttgatgagaccaagtcctggtacttcacggaaaacatggagcgcaattgcagagccccctgtaacatacagatggaggaccctacctttaaggaaaattatcggttccacgcaatcaacggatacattatggatacactccctggccttgtgatggctcaggaccaacgaatcaggtggtacctcctcagcatgggttctaatgagaacatacactccattcacttttcaggacatgtgttcactgtccggaagaaagaagagtataagatggccctctacaatttgtatccaggcgtgtttgagaccgttgaaatgcttccctctaaagctggcatctggagagtagagtgcttgatcggagaacatcttcacgcaggtatgagcaccttgttcctcgtgtacagcaacaaatgtcagaccccacttggcatggccagtggacacattcgcgactttcagatcacagcatctggccagtatggacaatgggccccaaagttggctcgcctccattactccggtagcataaatgcgtggtccactaaagaacctttcagctggattaaggtcgatcttcttgcccccatgatcatccacggcattaagacacagggagcgaggcagaaattctcctccctctacatctcacagttcattattatgtatagtttggacggcaagaagtggcaaacttatagaggtaacagtactggaacagacatggtgttcttcggcaacgttgatagctctggcatcaaacacaacatctttaatcctcccataatagctcggtacatcagattgcatccgacccactacagcattaggagtacactccgaatggagcttatgggttgcgacttgaattcctgttcaatgccactcggaatggagtctaaagccatctctgatgcacagataaccgccagtagctactttacgaacatgtttgctacgtggtcaccctctaaggcaaggcttcatttgcaaggccggtctaatgcctggagacctcaggtgaacaacccgaaagaatggctccaggtggactttcagaagaccatgaaagtaacaggtgtcactactcagggagttaagtccttggatactagcatgtatgtgaaggagttccttatttcctcatcacaagatggccaccagtggaccctcttctttcagaatggtaaggtcaaagtgtttcagggcaatcaagacagcttcacacccgtggtgaacagtcttgatcctccactcttgacacgataccttcgaatccatccacagtcttgggagcaccagattgcattgcgcatggaagtacttggatgcgaggctcaggacctctac

SEQ ID NO: 976 - protein, 1457 aa, synthetic construct
  REGION 1..1457: note = Variant of human B-domain deleted Factor VIII
MQIELSTCFFLCLLRFCFSATRRYYLGAVELSWDYMQSDLGELPVDARFPPRVPKSFPFNTSVVYKKTLFVEFTDHLFNIAKPRPPWMGLLGPTIQAEVYDTVVITLKNMASHPVSLHAVGVSYWKASEGAEYDDQTSQREKEDDKVFPGGSHTYVWQVLKENGPMASDPPCLTYSYLSHVDLVKDLNSGLIGALLVCREGSLAKEKTQTLHKFILLFAVFDEGKSWHSETKNSLMQDRDAASARAWPKMHTVNGYVNRTLPGLIGCHRKSVYWHVIGMGTTPEVHSIFLEGHTFLVRNHRQASLGISPITFLTAQTLLMDLGQFLLFCHIPSHQHDGMEAYVKVDSCPEEPQLRMKNNEEAEDYDDDLTDSEMDVVRFDDDNSPSIIQARSVAKKHPKTWVHYIAAEEEDWDYAPLVLAPDDRSYKSQYLNNGPQRIGRKYKKVRFMAYTDETFKTREAIQHESGILGPLLYGEVGDTLLIIFKNQASRPYNIYPHGITDVRPLYSRRLPKGVKHLKDFPILPGEIFKYKWTVTVEDGPTKSDPRCLTRYYSSFVNMERDLASGLIGPLLICYKESVDQRGNQIMSDKRNVILFSVFDENRSWYLTENIQRFLPNPAGVQLEDPEFQASNIMHSINGYVFDSLQLSVCLHEVAYWYILSIGAQTDFLSVFFSGYTFKHKMVYEDTLTLFPFSGETVFMSMENPGLWILGCHNSDFRNRGMTALLKVSSCDKNTGDYYEDSYEDISAYFDSKNNAIEPRSFSQNPPVLKRHQREITRTTLQSDQEEIDYDDTISVEMKKEDFDIYDEDENQSPRSFQKKTRHYFIAAVERLWDYGMSSPPHVLRNRAQSGSVPQFKKVVFQEFTDGSFTQPLYRGELNEHLGLLGPYIRAEVEDNIMVTFRNQASRPYSFYSSLISYEEDQRQGAEPRKNFVKPNETKTYFWKVQHHMAPTKDEFDCKAWAYFSDVDLEKDVHSGLIGPLLVCHTNTLNPAHGRQVTVQEFALFFTIFDETKSWYFTENMERNCRAPCNIQMEDPTFKENYRFHAINGYIMDTLPGLVMAQDQRIRWYLLSMGSNENIHSIHFSGHVFTVRKKEEYKMALYNLYPGVFETVEMLPSKAGIWRVECLIGEHLHAGMSTLFLVYSNKCQTPLGMASGHIRDFQITASGQYGQWAPKLARLHYSGSINAWSTKEPFSWIKVDLLAPMIIHGIKTQGARQKFSSLYISQFIIMYSLDGKKWQTYRGNSTGTDMVFFGNVDSSGIKHNIFNPPIIARYIRLHPTHYSIRSTLRMELMGCDLNSCSMPLGMESKAISDAQITASSYFTNMFATWSPSKARLHLQGRSNAWRPQVNNPKEWLQVDFQKTMKVTGVTTQGVKSLDTSMYVKEFLISSSQDGHQWTLFFQNGKVKVFQGNQDSFTPVVNSLDPPLLTRYLRIHPQSWEHQIALRMEVLGCEAQDLY

SEQ ID NO: 977 - DNA, 4371 bp, synthetic construct
  misc_feature 1..4371: note = Variant of human B-domain deleted Factor VIII
  source 1..4371: mol_type = other DNA
atgcagattgaactgtctacctgcttcttcctctgtttgctgaggttctgctttagcgccactagacggtactaccttggcgctgtggagctgtcctgggactatatgcagagtgatttgggagagcttcccgtcgacgcacgatttcctcctcgcgttccaaagtcatttccctttaacacaagcgtggtgtacaagaagacgctcttcgtcgaattcaccgatcacctgttcaatatcgccaaacccagaccaccatggatgggtcttttggggcctaccatacaagcggaggtgtatgacacagttgttatcactctcaagaacatggcttctcatccggtaagtcttcacgcagtgggcgtgtcctactggaaagcttcagaaggagccgagtatgatgatcagacatcccagagggagaaagaagacgacaaggtatttccaggtgggtctcatacctatgtgtggcaagtgctcaaagagaatggccctatggcaagcgatccgccgtgtttgacttacagctacctttcacacgttgacctcgtcaaggacctcaactccgggttgattggagccttgttggtatgcagggaaggatctcttgccaaagagaagacacagaccctccacaagtttatccttctctttgctgtgttcgatgagggcaaaagttggcatagcgaaacgaagaattccctcatgcaggatcgcgacgcagccagcgccagagcttggcccaagatgcacactgtgaacggatatgtcaataggacgcttcctggcttgattgggtgtcatcggaaaagtgtctactggcacgtgatcggaatggggacaacaccagaggtccactccatatttctcgaaggccataccttccttgttcgaaaccacagacaggcatccttggggatctctcccattacctttctcactgcccaaacgctccttatggacttgggtcagttccttctcttttgccatatcccgtcacaccagcatgatggtatggaagcttatgtgaaagtcgacagttgtcctgaggagccacagttgcgcatgaagaataatgaagaagccgaggattacgacgacgatctcaccgattctgagatggacgtggtgaggtttgatgacgacaactctccctccatcattcaagctcggagcgtggcgaagaaacaccccaagacttgggtccactatatagcggcggaagaggaggattgggattacgctcctcttgtattggcaccagatgaccgctcatacaaaagccagtacctcaacaacggaccgcagagaattggccggaagtataagaaagtgcgatttatggcctatacagacgaaacctttaagacaagggaggccatccagcatgagagtgggattttgggacctcttctttacggcgaagttggtgataccctcctcatcatcttcaagaatcaagcttctcgcccctataacatttacccacacgggatcactgacgttaggcctttgtatagcagaagacttcccaaaggcgtgaagcatctcaaagacttccccattttgccaggcgagatctttaagtacaaatggaccgtcacagtggaagatggaccgactaaatcagaccctcgatgccttacgcggtactattcctccttcgtgaatatggagagagatttggcaagcggactcataggaccactcctcatctgttacaaggaatctgtagaccagaggggtaaccagattatgagtgataaacgcaatgtgatcctttttagcgtcttcgacgagaaccggtcctggtacttgaccgagaatatacaaaggttccttcccaaccccgcaggcgttcagttggaagaccctgagtttcaggccagcaatattatgcactcaatcaacggctatgtgtttgatagtctccagctttctgtttgcctccatgaagtagcctattggtacatcttgtcaattggtgctcaaacagacttcctctccgtcttcttctccggctacacctttaagcacaagatggtgtatgaggacactctcacactctttccattttctggagaaaccgtgttcatgagcatggagaatccaggcctttggatcttgggttgccacaacagtgattttcgcaatcggggaatgactgctctcctcaaagtcagcagctgtgataagaacacaggcgactattacgaagattcttacgaggacataagtgcctactttgactccaagaataacgccattgagcccagatcattctcccagaatcctcccgtgcttaaaaggcatcagcgcgaaatcaccagaactactcttcagtctgatcaagaggagattgactatgacgacaccataagcgtggaaatgaagaaggaggatttcgatatctatgacgaagatgagaaccagtctccgcggagctttcagaagaagacgcgacactacttcattgcagcagtcgaaaggctttgggactacggtatgtcatcatcccctcatgtgttgcgcaatagagctcagagtggaagtgttccacagttcaagaaagtcgtctttcaagagtttacagatggcagcttcacacagcctctctatcggggcgagcttaacgaacatttgggactccttggtccctatatccgagccgaagtggaggacaacattatggttacctttaggaatcaagcctctcgcccctacagcttctactcctccctcatcagttatgaggaggatcagagacaaggcgctgaaccacggaagaactttgtgaaaccgaatgagacgaagacctacttctggaaagtacagcaccacatggcccccacaaaagacgaattcgattgcaaagcatgggcgtatttttcagacgttgacttggagaaagatgtacattcaggacttattggtcctttgttggtgtgtcacactaacactctcaatccagcccatggcaggcaggtgacagtccaggaattcgctcttttctttaccatctttgatgagaccaagtcctggtacttcacggaaaacatggagcgcaattgcagagccccctgtaacatacagatggaggaccctacctttaaggaaaattatcggttccacgcaatcaacggatacattatggatacactccctggccttgtgatggctcaggaccaacgaatcaggtggtacctcctcagcatgggttctaatgagaacatacactccattcacttttcaggacatgtgttcactgtccggaagaaagaagagtataagatggccctctacaatttgtatccaggcgtgtttgagaccgttgaaatgcttccctctaaagctggcatctggagagtagagtgcttgatcggagaacatcttcacgcaggtatgagcaccttgttcctcgtgtacagcaacaaatgtcagaccccacttggcatggccagtggacacattcgcgactttcagatcacagcatctggccagtatggacaatgggccccaaagttggctcgcctccattactccggtagcataaatgcgtggtccactaaagaacctttcagctggattaaggtcgatcttcttgcccccatgatcatccacggcatttggacacagggagcgaggcagaaattctcctccctctacatctcacagttcattattatgtatagtttggacggcaagaagtggcaaacttatagaggtaacagtactggaacagacatggtgttcttcggcaacgttgatagctctggcatcaaacacaacatctttaatcctcccataatagctcggtacatcagattgcatccgacccactacagcattaggagtacactccgaatggagcttatgggttgcgacttgaattcctgttcaatgccactcggaatggagtctaaagccatctctgatgcacagataaccgccagtagctactttacgaacatgtttgctacgtggtcaccctctaaggcaaggcttcatttgcaaggccggtctaatgcctggagacctcaggtgaacaacccgaaagaatggctccaggtggactttcagaagaccatgaaagtaacaggtgtcactactcagggagttaagtccttggatactagcatgtatgtgaaggagttccttatttcctcatcacaagatggccaccagtggaccctcttctttcagaatggtaaggtcaaagtgtttcagggcaatcaagacagcttcacacccgtggtgaacagtcttgatcctccactcttgacacgataccttcgaatccatccacagtcttgggagcaccagattgcattgcgcatggaagtacttggatgcgaggctcaggacctctac

SEQ ID NO: 978 - protein, 1457 aa, synthetic construct
  REGION 1..1457: note = Variant of human B-domain deleted Factor VIII
MQIELSTCFFLCLLRFCFSATRRYYLGAVELSWDYMQSDLGELPVDARFPPRVPKSFPFNTSVVYKKTLFVEFTDHLFNIAKPRPPWMGLLGPTIQAEVYDTVVITLKNMASHPVSLHAVGVSYWKASEGAEYDDQTSQREKEDDKVFPGGSHTYVWQVLKENGPMASDPPCLTYSYLSHVDLVKDLNSGLIGALLVCREGSLAKEKTQTLHKFILLFAVFDEGKSWHSETKNSLMQDRDAASARAWPKMHTVNGYVNRTLPGLIGCHRKSVYWHVIGMGTTPEVHSIFLEGHTFLVRNHRQASLGISPITFLTAQTLLMDLGQFLLFCHIPSHQHDGMEAYVKVDSCPEEPQLRMKNNEEAEDYDDDLTDSEMDVVRFDDDNSPSIIQARSVAKKHPKTWVHYIAAEEEDWDYAPLVLAPDDRSYKSQYLNNGPQRIGRKYKKVRFMAYTDETFKTREAIQHESGILGPLLYGEVGDTLLIIFKNQASRPYNIYPHGITDVRPLYSRRLPKGVKHLKDFPILPGEIFKYKWTVTVEDGPTKSDPRCLTRYYSSFVNMERDLASGLIGPLLICYKESVDQRGNQIMSDKRNVILFSVFDENRSWYLTENIQRFLPNPAGVQLEDPEFQASNIMHSINGYVFDSLQLSVCLHEVAYWYILSIGAQTDFLSVFFSGYTFKHKMVYEDTLTLFPFSGETVFMSMENPGLWILGCHNSDFRNRGMTALLKVSSCDKNTGDYYEDSYEDISAYFDSKNNAIEPRSFSQNPPVLKRHQREITRTTLQSDQEEIDYDDTISVEMKKEDFDIYDEDENQSPRSFQKKTRHYFIAAVERLWDYGMSSSPHVLRNRAQSGSVPQFKKVVFQEFTDGSFTQPLYRGELNEHLGLLGPYIRAEVEDNIMVTFRNQASRPYSFYSSLISYEEDQRQGAEPRKNFVKPNETKTYFWKVQHHMAPTKDEFDCKAWAYFSDVDLEKDVHSGLIGPLLVCHTNTLNPAHGRQVTVQEFALFFTIFDETKSWYFTENMERNCRAPCNIQMEDPTFKENYRFHAINGYIMDTLPGLVMAQDQRIRWYLLSMGSNENIHSIHFSGHVFTVRKKEEYKMALYNLYPGVFETVEMLPSKAGIWRVECLIGEHLHAGMSTLFLVYSNKCQTPLGMASGHIRDFQITASGQYGQWAPKLARLHYSGSINAWSTKEPFSWIKVDLLAPMIIHGIWTQGARQKFSSLYISQFIIMYSLDGKKWQTYRGNSTGTDMVFFGNVDSSGIKHNIFNPPIIARYIRLHPTHYSIRSTLRMELMGCDLNSCSMPLGMESKAISDAQITASSYFTNMFATWSPSKARLHLQGRSNAWRPQVNNPKEWLQVDFQKTMKVTGVTTQGVKSLDTSMYVKEFLISSSQDGHQWTLFFQNGKVKVFQGNQDSFTPVVNSLDPPLLTRYLRIHPQSWEHQIALRMEVLGCEAQDLY

SEQ ID NO: 979 - DNA, 4371 bp, synthetic construct
  misc_feature 1..4371: note = Variant of human B-domain deleted Factor VIII
  source 1..4371: mol_type = other DNA
atgcagattgaactgtctacctgcttcttcctctgtttgctgaggttctgctttagcgccactagacggtactaccttggcgctgtggagctgtcctgggactatatgcagagtgatttgggagagcttcccgtcgacgcacgatttcctcctcgcgttccaaagtcatttccctttaacacaagcgtggtgtacaagaagacgctcttcgtcgaattcaccgatcacctgttcaatatcgccaaacccagaccaccatggatgggtcttttggggcctaccatacaagcggaggtgtatgacacagttgttatcactctcaagaacatggcttctcatccggtaagtcttcacgcagtgggcgtgtcctactggaaagcttcagaaggagccgagtatgatgatcagacatcccagagggagaaagaagacgacaaggtatttccaggtgggtctcatacctatgtgtggcaagtgctcaaagagaatggccctatggcaagcgatccgccgtgtttgacttacagctacctttcacacgttgacctcgtcaaggacctcaactccgggttgattggagccttgttggtatgcagggaaggatctcttgccaaagagaagacacagaccctccacaagtttatccttctctttgctgtgttcgatgagggcaaaagttggcatagcgaaacgaagaattccctcatgcaggatcgcgacgcagccagcgccagagcttggcccaagatgcacactgtgaacggatatgtcaataggacgcttcctggcttgattgggtgtcatcggaaaagtgtctactggcacgtgatcggaatggggacaacaccagaggtccactccatatttctcgaaggccataccttccttgttcgaaaccacagacaggcatccttggggatctctcccattacctttctcactgcccaaacgctccttatggacttgggtcagttccttctcttttgccatatcccgtcacaccagcatgatggtatggaagcttatgtgaaagtcgacagttgtcctgaggagccacagttgcgcatgaagaataatgaagaagccgaggattacgacgacgatctcaccgattctgagatggacgtggtgaggtttgatgacgacaactctccctccatcattcaagctcggagcgtggcgaagaaacaccccaagacttgggtccactatatagcggcggaagaggaggattgggattacgctcctcttgtattggcaccagatgaccgctcatacaaaagccagtacctcaacaacggaccgcagagaattggccggaagtataagaaagtgcgatttatggcctatacagacgaaacctttaagacaagggaggccatccagcatgagagtgggattttgggacctcttctttacggcgaagttggtgataccctcctcatcatcttcaagaatcaagcttctcgcccctataacatttacccacacgggatcactgacgttaggcctttgtatagcagaagacttcccaaaggcgtgaagcatctcaaagacttccccattttgccaggcgagatctttaagtacaaatggaccgtcacagtggaagatggaccgactaaatcagaccctcgatgccttacgcggtactattcctccttcgtgaatatggagagagatttggcaagcggactcataggaccactcctcatctgttacaaggaatctgtagaccagaggggtaaccagattatgagtgataaacgcaatgtgatcctttttagcgtcttcgacgagaaccggtcctggtacttgaccgagaatatacaaaggttccttcccaaccccgcaggcgttcagttggaagaccctgagtttcaggccagcaatattatgcactcaatcaacggctatgtgtttgatagtctccagctttctgtttgcctccatgaagtagcctattggtacatcttgtcaattggtgctcaaacagacttcctctccgtcttcttctccggctacacctttaagcacaagatggtgtatgaggacactctcacactctttccattttctggagaaaccgtgttcatgagcatggagaatccaggcctttggatcttgggttgccacaacagtgattttcgcaatcggggaatgactgctctcctcaaagtcagcagctgtgataagaacacaggcgactattacgaagattcttacgaggacataagtgcctactttgactccaagaataacgccattgagcccagatcattctcccagaatcctcccgtgcttaaaaggcatcagcgcgaaatcaccagaactactcttcagtctgatcaagaggagattgactatgacgacaccataagcgtggaaatgaagaaggaggatttcgatatctatgacgaagatgagaaccagtctccgcggagctttcagaagaagacgcgacactacttcattgcagcagtcgaaaggctttgggactacggtatgtcatcatcccctcatgtgttgcgcaatagagctcagagtggaagtgttccacagttcaagaaagtcgtctttcaagagtttacagatggcagcttcacacagcctctctatcggggcgagcttaacgaacatttgggactccttggtccctatatccgagccgaagtggaggacaacattatggttacctttaggaatcaagcctctcgcccctacagcttctactcctccctcatcagttatgaggaggatcagagacaaggcgctgaaccacggaagaactttgtgaaaccgaatgagacgaagacctacttctggaaagtacagcaccacatggcccccacaaaagacgaattcgattgcaaagcatgggcgtatttttcagacgttgacttggagaaagatgtacattcaggacttattggtcctttgttggtgtgtcacactaacactctcaatccagcccatggcaggcaggtgacagtccaggaattcgctcttttctttaccatctttgatgagaccaagtcctggtacttcacggaaaacatggagcgcaattgcagagccccctgtaacatacagatggaggaccctacctttaaggaaaattatcggttccacgcaatcaacggatacattatggatacactccctggccttgtgatggctcaggaccaacgaatcaggtggtacctcctcagcatgggttctaatgagaacatacactccattcacttttcaggacatgtgttcactgtccggaagaaagaagagtataagatggccctctacaatttgtatccaggcgtgtttgagaccgttgaaatgcttccctctaaagctggcatctggagagtagagtgcttgatcggagaacatcttcacgcaggtatgagcaccttgttcctcgtgtacagcaacaaatgtcagaccccacttggcatggccagtggacacattcgcgactttcagatcacagcatctggccagtatggacaatgggccccaaagttggctcgcctccattactccggtagcataaatgcgtggtccactaaagaacctttcagctggattaaggtcgatcttcttgcccccatgatcatccacggcattaagacacagggagcgaggcagaaattctcctccctctacatctcacagttcattattatgtatagtttggacggcaagaagtggcaaacttatagaggtaacagtactggaacagacatggtgttcttcggcaacgttgatagctctggcatcaaacacaacatctttaatcctcccataatagctcggtacatcagattgcatccgacccacaggagcattaggagtacactccgaatggagcttatgggttgcgacttgaattcctgttcaatgccactcggaatggagtctaaagccatctctgatgcacagataaccgccagtagctactttacgaacatgtttgctacgtggtcaccctctaaggcaaggcttcatttgcaaggccggtctaatgcctggagacctcaggtgaacaacccgaaagaatggctccaggtggactttcagaagaccatgaaagtaacaggtgtcactactcagggagttaagtccttggatactagcatgtatgtgaaggagttccttatttcctcatcacaagatggccaccagtggaccctcttctttcagaatggtaaggtcaaagtgtttcagggcaatcaagacagcttcacacccgtggtgaacagtcttgatcctccactcttgacacgataccttcgaatccatccacagtcttgggagcaccagattgcattgcgcatggaagtacttggatgcgaggctcaggacctctac

SEQ ID NO: 980 - protein, 1457 aa, synthetic construct
  REGION 1..1457: note = Variant of human B-domain deleted Factor VIII
MQIELSTCFFLCLLRFCFSATRRYYLGAVELSWDYMQSDLGELPVDARFPPRVPKSFPFNTSVVYKKTLFVEFTDHLFNIAKPRPPWMGLLGPTIQAEVYDTVVITLKNMASHPVSLHAVGVSYWKASEGAEYDDQTSQREKEDDKVFPGGSHTYVWQVLKENGPMASDPPCLTYSYLSHVDLVKDLNSGLIGALLVCREGSLAKEKTQTLHKFILLFAVFDEGKSWHSETKNSLMQDRDAASARAWPKMHTVNGYVNRTLPGLIGCHRKSVYWHVIGMGTTPEVHSIFLEGHTFLVRNHRQASLGISPITFLTAQTLLMDLGQFLLFCHIPSHQHDGMEAYVKVDSCPEEPQLRMKNNEEAEDYDDDLTDSEMDVVRFDDDNSPSIIQARSVAKKHPKTWVHYIAAEEEDWDYAPLVLAPDDRSYKSQYLNNGPQRIGRKYKKVRFMAYTDETFKTREAIQHESGILGPLLYGEVGDTLLIIFKNQASRPYNIYPHGITDVRPLYSRRLPKGVKHLKDFPILPGEIFKYKWTVTVEDGPTKSDPRCLTRYYSSFVNMERDLASGLIGPLLICYKESVDQRGNQIMSDKRNVILFSVFDENRSWYLTENIQRFLPNPAGVQLEDPEFQASNIMHSINGYVFDSLQLSVCLHEVAYWYILSIGAQTDFLSVFFSGYTFKHKMVYEDTLTLFPFSGETVFMSMENPGLWILGCHNSDFRNRGMTALLKVSSCDKNTGDYYEDSYEDISAYFDSKNNAIEPRSFSQNPPVLKRHQREITRTTLQSDQEEIDYDDTISVEMKKEDFDIYDEDENQSPRSFQKKTRHYFIAAVERLWDYGMSSSPHVLRNRAQSGSVPQFKKVVFQEFTDGSFTQPLYRGELNEHLGLLGPYIRAEVEDNIMVTFRNQASRPYSFYSSLISYEEDQRQGAEPRKNFVKPNETKTYFWKVQHHMAPTKDEFDCKAWAYFSDVDLEKDVHSGLIGPLLVCHTNTLNPAHGRQVTVQEFALFFTIFDETKSWYFTENMERNCRAPCNIQMEDPTFKENYRFHAINGYIMDTLPGLVMAQDQRIRWYLLSMGSNENIHSIHFSGHVFTVRKKEEYKMALYNLYPGVFETVEMLPSKAGIWRVECLIGEHLHAGMSTLFLVYSNKCQTPLGMASGHIRDFQITASGQYGQWAPKLARLHYSGSINAWSTKEPFSWIKVDLLAPMIIHGIKTQGARQKFSSLYISQFIIMYSLDGKKWQTYRGNSTGTDMVFFGNVDSSGIKHNIFNPPIIARYIRLHPTHRSIRSTLRMELMGCDLNSCSMPLGMESKAISDAQITASSYFTNMFATWSPSKARLHLQGRSNAWRPQVNNPKEWLQVDFQKTMKVTGVTTQGVKSLDTSMYVKEFLISSSQDGHQWTLFFQNGKVKVFQGNQDSFTPVVNSLDPPLLTRYLRIHPQSWEHQIALRMEVLGCEAQDLY

SEQ ID NO: 981 - DNA, 4371 bp, synthetic construct
  misc_feature 1..4371: note = Variant of human B-domain deleted Factor VIII
  source 1..4371: mol_type = other DNA
atgcagattgaactgtctacctgcttcttcctctgtttgctgaggttctgctttagcgccactagacggtactaccttggcgctgtggagctgtcctgggactatatgcagagtgatttgggagagcttcccgtcgacgcacgatttcctcctcgcgttccaaagtcatttccctttaacacaagcgtggattacaagaagacgctcttcgtcgaattcaccgatcacctgttcaatatcgccaaacccagaccaccatggatgggtcttttggggcctaccatacaagcggaggtgtatgacacagttgttatcactctcaagaacatggcttctcatccggtaagtcttcacgcagtgggcgtgtcctactggaaagcttcagaaggagccgagtatgatgatcagacatcccagagggagaaagaagacgacaaggtatttccaggtgggtctcatacctatgtgtggcaagtgctcaaagagaatggccctatggcaagcgatccgccgtgtttgacttacagctacctttcacacgttgacctcgtcaaggacctcaactccgggttgattggagccttgttggtatgcagggaaggatctcttgccaaagagaagacacagaccctccacaagtttatccttctctttgctgtgttcgatgagggcaaaagttggcatagcgaaacgaagaattccctcatgcaggatcgcgacgcagccagcgccagagcttggcccaagatgcacactgtgaacggatatgtcaataggacgcttcctggcttgattgggtgtcatcggaaaagtgtctactggcacgtgatcggaatggggacaacaccagaggtccactccatatttctcgaaggccataccttccttgttcgaaaccacagacaggcatccttggggatctctcccattacctttctcactgcccaaacgctccttatggacttgggtcagttccttctcttttgccatatcccgtcacaccagcatgatggtatggaagcttatgtgaaagtcgacagttgtcctgaggagccacagttgcgcatgaagaataatgaagaagccgaggattacgacgacgatctcaccgattctgagatggacgtggtgaggtttgatgacgacaactctccctccatcattcaagctcggagcgtggcgaagaaacaccccaagacttgggtccactatatagcggcggaagaggaggattgggattacgctcctcttgtattggcaccagatgaccgctcatacaaaagccagtacctcaacaacggaccgcagagaattggccggaagtataagaaagtgcgatttatggcctatacagacgaaacctttaagacaagggaggccatccagcatgagagtgggattttgggacctcttctttacggcgaagttggtgataccctcctcatcatcttcaagaatcaagcttctcgcccctataacatttacccacacgggatcactgacgttaggcctttgtatagcagaagacttcccaaaggcgtgaagcatctcaaagacttccccattttgccaggcgagatctttaagtacaaatggaccgtcacagtggaagatggaccgactaaatcagaccctcgatgccttacgcggtactattcctccttcgtgaatatggagagagatttggcaagcggactcataggaccactcctcatctgttacaaggaatctgtagaccagaggggtaaccagattatgagtgataaacgcaatgtgatcctttttagcgtcttcgacgagaaccggtcctggtacttgaccgagaatatacaaaggttccttcccaaccccgcaggcgttcagttggaagaccctgagtttcaggccagcaatattatgcactcaatcaacggctatgtgtttgatagtctccagctttctgtttgcctccatgaagtagcctattggtacatcttgtcaattggtgctcaaacagacttcctctccgtcttcttctccggctacacctttaagcacaagatggtgtatgaggacactctcacactctttccattttctggagaaaccgtgttcatgagcatggagaatccaggcctttggatcttgggttgccacaacagtgattttcgcaatcggggaatgactgctctcctcaaagtcagcagctgtgataagaacacaggcgactattacgaagattcttacgaggacataagtgcctactttgactccaagaataacgccattgagcccagatcattctcccagaatcctcccgtgcttaaaaggcatcagcgcgaaatcaccagaactactcttcagtctgatcaagaggagattgactatgacgacaccataagcgtggaaatgaagaaggaggatttcgatatctatgacgaagatgagaaccagtctccgcggagctttcagaagaagacgcgacactacttcattgcagcagtcgaaaggctttgggactacggtatgtcatcatcccctcatgtgttgcgcaatagagctcagagtggaagtgttccacagttcaagaaagtcgtctttcaagagtttacagatggcagcttcacacagcctctctatcggggcgagcttaacgaacatttgggactccttggtccctatatccgagccgaagtggaggacaacattatggttacctttaggaatcaagcctctcgcccctacagcttctactcctccctcatcagttatgaggaggatcagagacaaggcgctgaaccacggaagaactttgtgaaaccgaatgagacgaagacctacttctggaaagtacagcaccacatggcccccacaaaagacgaattcgattgcaaagcatgggcgtatttttcagacgttgacttggagaaagatgtacattcaggacttattggtcctttgttggtgtgtcacactaacactctcaatccagcccatggcaggcaggtgacagtccaggaattcgctcttttctttaccatctttgatgagaccaagtcctggtacttcacggaaaacatggagcgcaattgcagagccccctgtaacatacagatggaggaccctacctttaaggaaaattatcggttccacgcaatcaacggatacattatggatacactccctggccttgtgatggctcaggaccaacgaatcaggtggtacctcctcagcatgggttctaatgagaacatacactccattcacttttcaggacatgtgttcactgtccggaagaaagaagagtataagatggccctctacaatttgtatccaggcgtgtttgagaccgttgaaatgcttccctctaaagctggcatctggagagtagagtgcttgatcggagaacatcttcacgcaggtatgagcaccttgttcctcgtgtacagcaacaaatgtcagaccccacttggcatggccagtggacacattcgcgactttcagatcacagcatctggccagtatggacaatgggccccaaagttggctcgcctccattactccggtagcataaatgcgtggtccactaaagaacctttcagctggattaaggtcgatcttcttgcccccatgatcatccacggcattaagacacagggagcgaggcagaaattctcctccctctacatctcacagttcattattatgtatagtttggacggcaagaagtggcaaacttatagaggtaacagtactggaacagacatggtgttcttcggcaacgttgatagctctggcatcaaacacaacatctttaatcctcccataatagctcggtacatcagattgcatccgacccactacagcattaggagtacactccgaatggagcttatgggttgcgacttgaattcctgttcaatgccactcggaatggagtctaaagccatctctgatgcacagataaccgccagtagctactttacgaacatgtttgctacgtggtcaccctctaaggcaaggcttcatttgcaaggccggtctaatgcctggagacctcaggtgaacaacccgaaagaatggctccaggtggactttcagaagaccatgaaagtaacaggtgtcactactcagggagttaagtccttggatactagcatgtatgtgaaggagttccttatttcctcatcacaagatggccaccagtggaccctcttctttcagaatggtaaggtcaaagtgtttcagggcaatcaagacagcttcacacccgtggtgaacagtcttgatcctccactcttgacacgataccttcgaatccatccacagtcttgggagcaccagattgcattgcgcatggaagtacttggatgcgaggctcaggacctctac

SEQ ID NO: 982 - protein, 1457 aa, synthetic construct
  REGION 1..1457: note = Variant of human B-domain deleted Factor VIII
MQIELSTCFFLCLLRFCFSATRRYYLGAVELSWDYMQSDLGELPVDARFPPRVPKSFPFNTSVDYKKTLFVEFTDHLFNIAKPRPPWMGLLGPTIQAEVYDTVVITLKNMASHPVSLHAVGVSYWKASEGAEYDDQTSQREKEDDKVFPGGSHTYVWQVLKENGPMASDPPCLTYSYLSHVDLVKDLNSGLIGALLVCREGSLAKEKTQTLHKFILLFAVFDEGKSWHSETKNSLMQDRDAASARAWPKMHTVNGYVNRTLPGLIGCHRKSVYWHVIGMGTTPEVHSIFLEGHTFLVRNHRQASLGISPITFLTAQTLLMDLGQFLLFCHIPSHQHDGMEAYVKVDSCPEEPQLRMKNNEEAEDYDDDLTDSEMDVVRFDDDNSPSIIQARSVAKKHPKTWVHYIAAEEEDWDYAPLVLAPDDRSYKSQYLNNGPQRIGRKYKKVRFMAYTDETFKTREAIQHESGILGPLLYGEVGDTLLIIFKNQASRPYNIYPHGITDVRPLYSRRLPKGVKHLKDFPILPGEIFKYKWTVTVEDGPTKSDPRCLTRYYSSFVNMERDLASGLIGPLLICYKESVDQRGNQIMSDKRNVILFSVFDENRSWYLTENIQRFLPNPAGVQLEDPEFQASNIMHSINGYVFDSLQLSVCLHEVAYWYILSIGAQTDFLSVFFSGYTFKHKMVYEDTLTLFPFSGETVFMSMENPGLWILGCHNSDFRNRGMTALLKVSSCDKNTGDYYEDSYEDISAYFDSKNNAIEPRSFSQNPPVLKRHQREITRTTLQSDQEEIDYDDTISVEMKKEDFDIYDEDENQSPRSFQKKTRHYFIAAVERLWDYGMSSSPHVLRNRAQSGSVPQFKKVVFQEFTDGSFTQPLYRGELNEHLGLLGPYIRAEVEDNIMVTFRNQASRPYSFYSSLISYEEDQRQGAEPRKNFVKPNETKTYFWKVQHHMAPTKDEFDCKAWAYFSDVDLEKDVHSGLIGPLLVCHTNTLNPAHGRQVTVQEFALFFTIFDETKSWYFTENMERNCRAPCNIQMEDPTFKENYRFHAINGYIMDTLPGLVMAQDQRIRWYLLSMGSNENIHSIHFSGHVFTVRKKEEYKMALYNLYPGVFETVEMLPSKAGIWRVECLIGEHLHAGMSTLFLVYSNKCQTPLGMASGHIRDFQITASGQYGQWAPKLARLHYSGSINAWSTKEPFSWIKVDLLAPMIIHGIKTQGARQKFSSLYISQFIIMYSLDGKKWQTYRGNSTGTDMVFFGNVDSSGIKHNIFNPPIIARYIRLHPTHYSIRSTLRMELMGCDLNSCSMPLGMESKAISDAQITASSYFTNMFATWSPSKARLHLQGRSNAWRPQVNNPKEWLQVDFQKTMKVTGVTTQGVKSLDTSMYVKEFLISSSQDGHQWTLFFQNGKVKVFQGNQDSFTPVVNSLDPPLLTRYLRIHPQSWEHQIALRMEVLGCEAQDLY

SEQ ID NO: 983 - DNA, 4371 bp, synthetic construct
  misc_feature 1..4371: note = Variant of human B-domain deleted Factor VIII
  source 1..4371: mol_type = other DNA
atgcagattgaactgtctacctgcttcttcctctgtttgctgaggttctgctttagcgccactagacggtactaccttggcgctgtggagctgtcctgggactatatgcagagtgatttgggagagcttcccgtcgacgcacgatttcctcctcgcgttccaaagtcatttccctttaacacaagcgtggtgtacaagaagacgctcttcgtcgaattcaccgatcacctgttcaatatcgccaaacccagaccaccatggatgggtcttttggggcctaccatacaagcggaggtgtatgacacagttgttatcactctcaagaacatggcttctcatccggtaagtcttcacgcagtgggcgtgtcctactggaaagcttcagaaggagccgagtatgatgatcagacatcccagagggagaaagaagacgacaaggtatttccaggtgggtctcatacctatgtgtggcaagtgctcaaagagaatggccctatggcaagcgatccgccgtgtttgacttacagctacctttcacacgttgacctcgtcaaggacctcaactccgggttgattggagccttgttggtatgcagggaaggatctcttgccaaagagaagacacagaccctcgggaagtttatccttctctttgctgtgttcgatgagggcaaaagttggcatagcgaaacgaagaattccctcatgcaggatcgcgacgcagccagcgccagagcttggcccaagatgcacactgtgaacggatatgtcaataggacgcttcctggcttgattgggtgtcatcggaaaagtgtctactggcacgtgatcggaatggggacaacaccagaggtccactccatatttctcgaaggccataccttccttgttcgaaaccacagacaggcatccttggggatctctcccattacctttctcactgcccaaacgctccttatggacttgggtcagttccttctcttttgccatatcccgtcacaccagcatgatggtatggaagcttatgtgaaagtcgacagttgtcctgaggagccacagttgcgcatgaagaataatgaagaagccgaggattacgacgacgatctcaccgattctgagatggacgtggtgaggtttgatgacgacaactctccctccatcattcaagctcggagcgtggcgaagaaacaccccaagacttgggtccactatatagcggcggaagaggaggattgggattacgctcctcttgtattggcaccagatgaccgctcatacaaaagccagtacctcaacaacggaccgcagagaattggccggaagtataagaaagtgcgatttatggcctatacagacgaaacctttaagacaagggaggccatccagcatgagagtgggattttgggacctcttctttacggcgaagttggtgataccctcctcatcatcttcaagaatcaagcttctcgcccctataacatttacccacacgggatcactgacgttaggcctttgtatagcagaagacttcccaaaggcgtgaagcatctcaaagacttccccattttgccaggcgagatctttaagtacaaatggaccgtcacagtggaagatggaccgactaaatcagaccctcgatgccttacgcggtactattcctccttcgtgaatatggagagagatttggcaagcggactcataggaccactcctcatctgttacaaggaatctgtagaccagaggggtaaccagattatgagtgataaacgcaatgtgatcctttttagcgtcttcgacgagaaccggtcctggtacttgaccgagaatatacaaaggttccttcccaaccccgcaggcgttcagttggaagaccctgagtttcaggccagcaatattatgcactcaatcaacggctatgtgtttgatagtctccagctttctgtttgcctccatgaagtagcctattggtacatcttgtcaattggtgctcaaacagacttcctctccgtcttcttctccggctacacctttaagcacaagatggtgtatgaggacactctcacactctttccattttctggagaaaccgtgttcatgagcatggagaatccaggcctttggatcttgggttgccacaacagtgattttcgcaatcggggaatgactgctctcctcaaagtcagcagctgtgataagaacacaggcgactattacgaagattcttacgaggacataagtgcctactttgactccaagaataacgccattgagcccagatcattctcccagaatcctcccgtgcttaaaaggcatcagcgcgaaatcaccagaactactcttcagtctgatcaagaggagattgactatgacgacaccataagcgtggaaatgaagaaggaggatttcgatatctatgacgaagatgagaaccagtctccgcggagctttcagaagaagacgcgacactacttcattgcagcagtcgaaaggctttgggactacggtatgtcatcatcccctcatgtgttgcgcaatagagctcagagtggaagtgttccacagttcaagaaagtcgtctttcaagagtttacagatggcagcttcacacagcctctctatcggggcgagcttaacgaacatttgggactccttggtccctatatccgagccgaagtggaggacaacattatggttacctttaggaatcaagcctctcgcccctacagcttctactcctccctcatcagttatgaggaggatcagagacaaggcgctgaaccacggaagaactttgtgaaaccgaatgagacgaagacctacttctggaaagtacagcaccacatggcccccacaaaagacgaattcgattgcaaagcatgggcgtatttttcagacgttgacttggagaaagatgtacattcaggacttattggtcctttgttggtgtgtcacactaacactctcaatccagcccatggcaggcaggtgacagtccaggaattcgctcttttctttaccatctttgatgagaccaagtcctggtacttcacggaaaacatggagcgcaattgcagagccccctgtaacatacagatggaggaccctacctttaaggaaaattatcggttccacgcaatcaacggatacattatggatacactccctggccttgtgatggctcaggaccaacgaatcaggtggtacctcctcagcatgggttctaatgagaacatacactccattcacttttcaggacatgtgttcactgtccggaagaaagaagagtataagatggccctctacaatttgtatccaggcgtgtttgagaccgttgaaatgcttccctctaaagctggcatctggagagtagagtgcttgatcggagaacatcttcacgcaggtatgagcaccttgttcctcgtgtacagcaacaaatgtcagaccccacttggcatggccagtggacacattcgcgactttcagatcacagcatctggccagtatggacaatgggccccaaagttggctcgcctccattactccggtagcataaatgcgtggtccactaaagaacctttcagctggattaaggtcgatcttcttgcccccatgatcatccacggcattaagacacagggagcgaggcagaaattctcctccctctacatctcacagttcattattatgtatagtttggacggcaagaagtggcaaacttatagaggtaacagtactggaacagacatggtgttcttcggcaacgttgatagctctggcatcaaacacaacatctttaatcctcccataatagctcggtacatcagattgcatccgacccactacagcattaggagtacactccgaatggagcttatgggttgcgacttgaattcctgttcaatgccactcggaatggagtctaaagccatctctgatgcacagataaccgccagtagctactttacgaacatgtttgctacgtggtcaccctctaaggcaaggcttcatttgcaaggccggtctaatgcctggagacctcaggtgaacaacccgaaagaatggctccaggtggactttcagaagaccatgaaagtaacaggtgtcactactcagggagttaagtccttggatactagcatgtatgtgaaggagttccttatttcctcatcacaagatggccaccagtggaccctcttctttcagaatggtaaggtcaaagtgtttcagggcaatcaagacagcttcacacccgtggtgaacagtcttgatcctccactcttgacacgataccttcgaatccatccacagtcttgggagcaccagattgcattgcgcatggaagtacttggatgcgaggctcaggacctctac

SEQ ID NO: 984 - protein, 1457 aa, synthetic construct
  REGION 1..1457: note = Variant of human B-domain deleted Factor VIII
MQIELSTCFFLCLLRFCFSATRRYYLGAVELSWDYMQSDLGELPVDARFPPRVPKSFPFNTSVVYKKTLFVEFTDHLFNIAKPRPPWMGLLGPTIQAEVYDTVVITLKNMASHPVSLHAVGVSYWKASEGAEYDDQTSQREKEDDKVFPGGSHTYVWQVLKENGPMASDPPCLTYSYLSHVDLVKDLNSGLIGALLVCREGSLAKEKTQTLGKFILLFAVFDEGKSWHSETKNSLMQDRDAASARAWPKMHTVNGYVNRTLPGLIGCHRKSVYWHVIGMGTTPEVHSIFLEGHTFLVRNHRQASLGISPITFLTAQTLLMDLGQFLLFCHIPSHQHDGMEAYVKVDSCPEEPQLRMKNNEEAEDYDDDLTDSEMDVVRFDDDNSPSIIQARSVAKKHPKTWVHYIAAEEEDWDYAPLVLAPDDRSYKSQYLNNGPQRIGRKYKKVRFMAYTDETFKTREAIQHESGILGPLLYGEVGDTLLIIFKNQASRPYNIYPHGITDVRPLYSRRLPKGVKHLKDFPILPGEIFKYKWTVTVEDGPTKSDPRCLTRYYSSFVNMERDLASGLIGPLLICYKESVDQRGNQIMSDKRNVILFSVFDENRSWYLTENIQRFLPNPAGVQLEDPEFQASNIMHSINGYVFDSLQLSVCLHEVAYWYILSIGAQTDFLSVFFSGYTFKHKMVYEDTLTLFPFSGETVFMSMENPGLWILGCHNSDFRNRGMTALLKVSSCDKNTGDYYEDSYEDISAYFDSKNNAIEPRSFSQNPPVLKRHQREITRTTLQSDQEEIDYDDTISVEMKKEDFDIYDEDENQSPRSFQKKTRHYFIAAVERLWDYGMSSSPHVLRNRAQSGSVPQFKKVVFQEFTDGSFTQPLYRGELNEHLGLLGPYIRAEVEDNIMVTFRNQASRPYSFYSSLISYEEDQRQGAEPRKNFVKPNETKTYFWKVQHHMAPTKDEFDCKAWAYFSDVDLEKDVHSGLIGPLLVCHTNTLNPAHGRQVTVQEFALFFTIFDETKSWYFTENMERNCRAPCNIQMEDPTFKENYRFHAINGYIMDTLPGLVMAQDQRIRWYLLSMGSNENIHSIHFSGHVFTVRKKEEYKMALYNLYPGVFETVEMLPSKAGIWRVECLIGEHLHAGMSTLFLVYSNKCQTPLGMASGHIRDFQITASGQYGQWAPKLARLHYSGSINAWSTKEPFSWIKVDLLAPMIIHGIKTQGARQKFSSLYISQFIIMYSLDGKKWQTYRGNSTGTDMVFFGNVDSSGIKHNIFNPPIIARYIRLHPTHYSIRSTLRMELMGCDLNSCSMPLGMESKAISDAQITASSYFTNMFATWSPSKARLHLQGRSNAWRPQVNNPKEWLQVDFQKTMKVTGVTTQGVKSLDTSMYVKEFLISSSQDGHQWTLFFQNGKVKVFQGNQDSFTPVVNSLDPPLLTRYLRIHPQSWEHQIALRMEVLGCEAQDLY

SEQ ID NO: 985 - DNA, 4371 bp, synthetic construct
  misc_feature 1..4371: note = Variant of human B-domain deleted Factor VIII
  source 1..4371: mol_type = other DNA
atgcagattgaactgtctacctgcttcttcctctgtttgctgaggttctgctttagcgccactagacggtactaccttggcgctgtggagctgtcctgggactatatgcagagtgatttgggagagcttcccgtcgacgcacgatttcctcctcgcgttccaaagtcatttccctttaacacaagcgtggtgtacaagaagacgctcttcgtcgaattcaccgatcacctgttcaatatcgccaaacccagaccaccatggatgggtcttttggggcctaccatacaagcggaggtgtatgacacagttgttatcactctcaagaacatggcttctcatccggtaagtcttcacgcagtgggcgtgtcctactggaaagcttcagaaggagccgagtatgatgatcagacatcccagagggagaaagaagacgacaaggtatttccaggtgggtctcatacctatgtgtggcaagtgctcaaagagaatggccctatggcaagcgatccgccgtgtttgacttacagctacctttcacacgttgacctcgtcaaggacctcaactccgggttgattggagccttgttggtatgcagggaaggatctcttgccaaagagaagacacagaccctccacaagtttatccttctctttgctgtgttcgatgagggcaaaagttggcatagcgaaacgaagaattccctcatgcaggatcgcgacgcagccagcgccagagcttggcccaagatgcacactgtgaacggatatgtcaataggacgcttcctggcttgattgggtgtcatcggaaaagtgtctactggcacgtgatcggaatggggacaacaccagaggtccactccatatttctcgaaggccataccttccttgttcgaaaccacagacaggcatccttggggatctctcccattacctttctcactgcccaaacgctccttatggacttgggtcagttccttctcttttgccatatcccgtcacaccagcatgatggtatggaagcttatgtgaaagtcgacagttgtcctgaggagccacagttgcgcatgaagaataatgaagaagccgaggattacgacgacgatctcaccgattctgagatggacgtggtgaggtttgatgacgacaactctccctccatcattcaagctcggagcgtggcgaagaaacaccccaagacttgggtccactatatagcggcggaagaggaggattgggattacgctcctcttgtattggcaccagatgaccgctcatacaaaagccagtacctcaacaacggaccgcagagaattggccggaagtataagaaagtgcgatttatggcctatacagacgaaacctttaagacaagggaggccatccagcatgagagtgggattttgggacctcttctttacggcgaagttggtgataccctcctcatcatcttcaagaatcaagcttctcgcccctataacatttacccacacgggatcactgacgttaggcctttgtatagcagaagacttcccaaaggcgtgaagcatctcaaagacttccccattttgccaggcgagatctttaagtacaaatggaccgtcacagtggaagatggaccgactaaatcagaccctcgatgccttacgcggtactattcctccttcgtgaatatggagagagatttggcaagcggactcataggaccactcctcatctgttacaaggaatctgtagaccagaggggtaaccagattatgagtgataaacgcaatgtgatcctttttagcgtcttcgacgagaaccggtcctggtacttgaccgagaatatacaaaggttccttcccaaccccgcaggcgttcagttggaagaccctgagtttcaggccagcaatattatgcactcaatcaacggctatgtgtttgatagtctccagctttctgtttgcctccatgaagtagcctattggtacatcttgtcaattggtgctcaaacagacttcctctccgtcttcttctccggctacacctttaagcacaagatgcggtatgaggacactctcacactctttccattttctggagaaaccgtgttcatgagcatggagaatccaggcctttggatcttgggttgccacaacagtgattttcgcaatcggggaatgactgctctcctcaaagtcagcagctgtgataagaacacaggcgactattacgaagattcttacgaggacataagtgcctactttgactccaagaataacgccattgagcccagatcattctcccagaatcctcccgtgcttaaaaggcatcagcgcgaaatcaccagaactactcttcagtctgatcaagaggagattgactatgacgacaccataagcgtggaaatgaagaaggaggatttcgatatctatgacgaagatgagaaccagtctccgcggagctttcagaagaagacgcgacactacttcattgcagcagtcgaaaggctttgggactacggtatgtcatcatcccctcatgtgttgcgcaatagagctcagagtggaagtgttccacagttcaagaaagtcgtctttcaagagtttacagatggcagcttcacacagcctctctatcggggcgagcttaacgaacatttgggactccttggtccctatatccgagccgaagtggaggacaacattatggttacctttaggaatcaagcctctcgcccctacagcttctactcctccctcatcagttatgaggaggatcagagacaaggcgctgaaccacggaagaactttgtgaaaccgaatgagacgaagacctacttctggaaagtacagcaccacatggcccccacaaaagacgaattcgattgcaaagcatgggcgtatttttcagacgttgacttggagaaagatgtacattcaggacttattggtcctttgttggtgtgtcacactaacactctcaatccagcccatggcaggcaggtgacagtccaggaattcgctcttttctttaccatctttgatgagaccaagtcctggtacttcacggaaaacatggagcgcaattgcagagccccctgtaacatacagatggaggaccctacctttaaggaaaattatcggttccacgcaatcaacggatacattatggatacactccctggccttgtgatggctcaggaccaacgaatcaggtggtacctcctcagcatgggttctaatgagaacatacactccattcacttttcaggacatgtgttcactgtccggaagaaagaagagtataagatggccctctacaatttgtatccaggcgtgtttgagaccgttgaaatgcttccctctaaagctggcatctggagagtagagtgcttgatcggagaacatcttcacgcaggtatgagcaccttgttcctcgtgtacagcaacaaatgtcagaccccacttggcatggccagtggacacattcgcgactttcagatcacagcatctggccagtatggacaatgggccccaaagttggctcgcctccattactccggtagcataaatgcgtggtccactaaagaacctttcagctggattaaggtcgatcttcttgcccccatgatcatccacggcattaagacacagggagcgaggcagaaattctcctccctctacatctcacagttcattattatgtatagtttggacggcaagaagtggcaaacttatagaggtaacagtactggaacagacatggtgttcttcggcaacgttgatagctctggcatcaaacacaacatctttaatcctcccataatagctcggtacatcagattgcatccgacccactacagcattaggagtacactccgaatggagcttatgggttgcgacttgaattcctgttcaatgccactcggaatggagtctaaagccatctctgatgcacagataaccgccagtagctactttacgaacatgtttgctacgtggtcaccctctaaggcaaggcttcatttgcaaggccggtctaatgcctggagacctcaggtgaacaacccgaaagaatggctccaggtggactttcagaagaccatgaaagtaacaggtgtcactactcagggagttaagtccttggatactagcatgtatgtgaaggagttccttatttcctcatcacaagatggccaccagtggaccctcttctttcagaatggtaaggtcaaagtgtttcagggcaatcaagacagcttcacacccgtggtgaacagtcttgatcctccactcttgacacgataccttcgaatccatccacagtcttgggagcaccagattgcattgcgcatggaagtacttggatgcgaggctcaggacctctac

SEQ ID NO: 986 - protein, 1457 aa, synthetic construct
  REGION 1..1457: note = Variant of human B-domain deleted Factor VIII
MQIELSTCFFLCLLRFCFSATRRYYLGAVELSWDYMQSDLGELPVDARFPPRVPKSFPFNTSVVYKKTLFVEFTDHLFNIAKPRPPWMGLLGPTIQAEVYDTVVITLKNMASHPVSLHAVGVSYWKASEGAEYDDQTSQREKEDDKVFPGGSHTYVWQVLKENGPMASDPPCLTYSYLSHVDLVKDLNSGLIGALLVCREGSLAKEKTQTLHKFILLFAVFDEGKSWHSETKNSLMQDRDAASARAWPKMHTVNGYVNRTLPGLIGCHRKSVYWHVIGMGTTPEVHSIFLEGHTFLVRNHRQASLGISPITFLTAQTLLMDLGQFLLFCHIPSHQHDGMEAYVKVDSCPEEPQLRMKNNEEAEDYDDDLTDSEMDVVRFDDDNSPSIIQARSVAKKHPKTWVHYIAAEEEDWDYAPLVLAPDDRSYKSQYLNNGPQRIGRKYKKVRFMAYTDETFKTREAIQHESGILGPLLYGEVGDTLLIIFKNQASRPYNIYPHGITDVRPLYSRRLPKGVKHLKDFPILPGEIFKYKWTVTVEDGPTKSDPRCLTRYYSSFVNMERDLASGLIGPLLICYKESVDQRGNQIMSDKRNVILFSVFDENRSWYLTENIQRFLPNPAGVQLEDPEFQASNIMHSINGYVFDSLQLSVCLHEVAYWYILSIGAQTDFLSVFFSGYTFKHKMRYEDTLTLFPFSGETVFMSMENPGLWILGCHNSDFRNRGMTALLKVSSCDKNTGDYYEDSYEDISAYFDSKNNAIEPRSFSQNPPVLKRHQREITRTTLQSDQEEIDYDDTISVEMKKEDFDIYDEDENQSPRSFQKKTRHYFIAAVERLWDYGMSSSPHVLRNRAQSGSVPQFKKVVFQEFTDGSFTQPLYRGELNEHLGLLGPYIRAEVEDNIMVTFRNQASRPYSFYSSLISYEEDQRQGAEPRKNFVKPNETKTYFWKVQHHMAPTKDEFDCKAWAYFSDVDLEKDVHSGLIGPLLVCHTNTLNPAHGRQVTVQEFALFFTIFDETKSWYFTENMERNCRAPCNIQMEDPTFKENYRFHAINGYIMDTLPGLVMAQDQRIRWYLLSMGSNENIHSIHFSGHVFTVRKKEEYKMALYNLYPGVFETVEMLPSKAGIWRVECLIGEHLHAGMSTLFLVYSNKCQTPLGMASGHIRDFQITASGQYGQWAPKLARLHYSGSINAWSTKEPFSWIKVDLLAPMIIHGIKTQGARQKFSSLYISQFIIMYSLDGKKWQTYRGNSTGTDMVFFGNVDSSGIKHNIFNPPIIARYIRLHPTHYSIRSTLRMELMGCDLNSCSMPLGMESKAISDAQITASSYFTNMFATWSPSKARLHLQGRSNAWRPQVNNPKEWLQVDFQKTMKVTGVTTQGVKSLDTSMYVKEFLISSSQDGHQWTLFFQNGKVKVFQGNQDSFTPVVNSLDPPLLTRYLRIHPQSWEHQIALRMEVLGCEAQDLY

SEQ ID NO: 987 - DNA, 4371 bp, synthetic construct
  misc_feature 1..4371: note = Variant of human B-domain deleted Factor VIII
  source 1..4371: mol_type = other DNA
atgcagattgaactgtctacctgcttcttcctctgtttgatgaggttctgctttagcgccactagacggtactaccttggcgctgtggagctgtcctgggactatatgcagagtgatttgggagagcttcccgtcgacgcacgatttcctcctcgcgttccaaagtcatttccctttaacacaagcgtggtgtacaagaagacgctcttcgtcgaattcaccgatcacctgttcaatatcgccaaacccagaccaccatggatgggtcttttggggcctaccatacaagcggaggtgtatgacacagttgttatcactctcaagaacatggcttctcatccggtaagtcttcacgcagtgggcgtgtcctactggaaagcttcagaaggagccgagtatgatgatcagacatcccagagggagaaagaagacgacaaggtatttccaggtgggtctcatacctatgtgtggcaagtgctcaaagagaatggccctatggcaagcgatccgccgtgtttgacttacagctacctttcacacgttgacctcgtcaaggacctcaactccgggttgattggagccttgttggtatgcagggaaggatctcttgccaaagagaagacacagaccctccacaagtttatccttctctttgctgtgttcgatgagggcaaaagttggcatagcgaaacgaagaattccctcatgcaggatcgcgacgcagccagcgccagagcttggcccaagatgcacactgtgaacggatatgtcaataggacgcttcctggcttgattgggtgtcatcggaaaagtgtctactggcacgtgatcggaatggggacaacaccagaggtccactccatatttctcgaaggccataccttccttgttcgaaaccacagacaggcatccttggggatctctcccattacctttctcactgcccaaacgctccttatggacttgggtcagttccttctcttttgccatatcccgtcacaccagcatgatggtatggaagcttatgtgaaagtcgacagttgtcctgaggagccacagttgcgcatgaagaataatgaagaagccgaggattacgacgacgatctcaccgattctgagatggacgtggtgaggtttgatgacgacaactctccctccatcattcaagctcggagcgtggcgaagaaacaccccaagacttgggtccactatatagcggcggaagaggaggattgggattacgctcctcttgtattggcaccagatgaccgctcatacaaaagccagtacctcaacaacggaccgcagagaattggccggaagtataagaaagtgcgatttatggcctatacagacgaaacctttaagacaagggaggccatccagcatgagagtgggattttgggacctcttctttacggcgaagttggtgataccctcctcatcatcttcaagaatcaagcttctcgcccctataacatttacccacacgggatcactgacgttaggcctttgtatagcagaagacttcccaaaggcgtgaagcatctcaaagacttccccattttgccaggcgagatctttaagtacaaatggaccgtcacagtggaagatggaccgactaaatcagaccctcgatgccttacgcggtactattcctccttcgtgaatatggagagagatttggcaagcggactcataggaccactcctcatctgttacaaggaatctgtagaccagaggggtaaccagattatgagtgataaacgcaatgtgatcctttttagcgtcttcgacgagaaccggtcctggtacttgaccgagaatatacaaaggttccttcccaaccccgcaggcgttcagttggaagaccctgagtttcaggccagcaatattatgcactcaatcaacggctatgtgtttgatagtctccagctttctgtttgcctccatgaagtagcctattggtacatcttgtcaattggtgctcaaacagacttcctctccgtcttcttctccggctacacctttaagcacaagatggtgtatgaggacactctcacactctttccattttctggagaaaccgtgttcatgagcatggagaatccaggcctttggatcttgggttgccacaacagtgattttcgcaatcggggaatgactgctctcctcaaagtcagcagctgtgataagaacacaggcgactattacgaagattcttacgaggacataagtgcctactttgactccaagaataacgccattgagcccagatcattctcccagaatcctcccgtgcttaaaaggcatcagcgcgaaatcaccagaactactcttcagtctgatcaagaggagattgactatgacgacaccataagcgtggaaatgaagaaggaggatttcgatatctatgacgaagatgagaaccagtctccgcggagctttcagaagaagacgcgacactacttcattgcagcagtcgaaaggctttgggactacggtatgtcatcatcccctcatgtgttgcgcaatagagctcagagtggaagtgttccacagttcaagaaagtcgtctttcaagagtttacagatggcagcttcacacagcctctctatcggggcgagcttaacgaacatttgggactccttggtccctatatccgagccgaagtggaggacaacattatggttacctttaggaatcaagcctctcgcccctacagcttctactcctccctcatcagttatgaggaggatcagagacaaggcgctgaaccacggaagaactttgtgaaaccgaatgagacgaagacctacttctggaaagtacagcaccacatggcccccacaaaagacgaattcgattgcaaagcatgggcgtatttttcagacgttgacttggagaaagatgtacattcaggacttattggtcctttgttggtgtgtcacactaacactctcaatccagcccatggcaggcaggtgacagtccaggaattcgctcttttctttaccatctttgatgagaccaagtcctggtacttcacggaaaacatggagcgcaattgcagagccccctgtaacatacagatggaggaccctacctttaaggaaaattatcggttccacgcaatcaacggatacattatggatacactccctggccttgtgatggctcaggaccaacgaatcaggtggtacctcctcagcatgggttctaatgagaacatacactccattcacttttcaggacatgtgttcactgtccggaagaaagaagagtataagatggccctctacaatttgtatccaggcgtgtttgagaccgttgaaatgcttccctctaaagctggcatctggagagtagagtgcttgatcggagaacatcttcacgcaggtatgagcaccttgttcctcgtgtacagcaacaaatgtcagaccccacttggcatggccagtggacacattcgcgactttcagatcacagcatctggccagtatggacaatgggccccaaagttggctcgcctccattactccggtagcataaatgcgtggtccactaaagaacctttcagctggattaaggtcgatcttcttgcccccatgatcatccacggcattaagacacagggagcgaggcagaaattctcctccctctacatctcacagttcattattatgtatagtttggacggcaagaagtggcaaacttatagaggtaacagtactggaacagacatggtgttcttcggcaacgttgatagctctggcatcaaacacaacatctttaatcctcccataatagctcggtacatcagattgcatccgacccactacagcattaggagtacactccgaatggagcttatgggttgcgacttgaattcctgttcaatgccactcggaatggagtctaaagccatctctgatgcacagataaccgccagtagctactttacgaacatgtttgctacgtggtcaccctctaaggcaaggcttcatttgcaaggccggtctaatgcctggagacctcaggtgaacaacccgaaagaatggctccaggtggactttcagaagaccatgaaagtaacaggtgtcactactcagggagttaagtccttggatactagcatgtatgtgaaggagttccttatttcctcatcacaagatggccaccagtggaccctcttctttcagaatggtaaggtcaaagtgtttcagggcaatcaagacagcttcacacccgtggtgaacagtcttgatcctccactcttgacacgataccttcgaatccatccacagtcttgggagcaccagattgcattgcgcatggaagtacttggatgcgaggctcaggacctctac

SEQ ID NO: 988 - protein, 1457 aa, synthetic construct
  REGION 1..1457: note = Variant of human B-domain deleted Factor VIII
MQIELSTCFFLCLMRFCFSATRRYYLGAVELSWDYMQSDLGELPVDARFPPRVPKSFPFNTSVVYKKTLFVEFTDHLFNIAKPRPPWMGLLGPTIQAEVYDTVVITLKNMASHPVSLHAVGVSYWKASEGAEYDDQTSQREKEDDKVFPGGSHTYVWQVLKENGPMASDPPCLTYSYLSHVDLVKDLNSGLIGALLVCREGSLAKEKTQTLHKFILLFAVFDEGKSWHSETKNSLMQDRDAASARAWPKMHTVNGYVNRTLPGLIGCHRKSVYWHVIGMGTTPEVHSIFLEGHTFLVRNHRQASLGISPITFLTAQTLLMDLGQFLLFCHIPSHQHDGMEAYVKVDSCPEEPQLRMKNNEEAEDYDDDLTDSEMDVVRFDDDNSPSIIQARSVAKKHPKTWVHYIAAEEEDWDYAPLVLAPDDRSYKSQYLNNGPQRIGRKYKKVRFMAYTDETFKTREAIQHESGILGPLLYGEVGDTLLIIFKNQASRPYNIYPHGITDVRPLYSRRLPKGVKHLKDFPILPGEIFKYKWTVTVEDGPTKSDPRCLTRYYSSFVNMERDLASGLIGPLLICYKESVDQRGNQIMSDKRNVILFSVFDENRSWYLTENIQRFLPNPAGVQLEDPEFQASNIMHSINGYVFDSLQLSVCLHEVAYWYILSIGAQTDFLSVFFSGYTFKHKMVYEDTLTLFPFSGETVFMSMENPGLWILGCHNSDFRNRGMTALLKVSSCDKNTGDYYEDSYEDISAYFDSKNNAIEPRSFSQNPPVLKRHQREITRTTLQSDQEEIDYDDTISVEMKKEDFDIYDEDENQSPRSFQKKTRHYFIAAVERLWDYGMSSSPHVLRNRAQSGSVPQFKKVVFQEFTDGSFTQPLYRGELNEHLGLLGPYIRAEVEDNIMVTFRNQASRPYSFYSSLISYEEDQRQGAEPRKNFVKPNETKTYFWKVQHHMAPTKDEFDCKAWAYFSDVDLEKDVHSGLIGPLLVCHTNTLNPAHGRQVTVQEFALFFTIFDETKSWYFTENMERNCRAPCNIQMEDPTFKENYRFHAINGYIMDTLPGLVMAQDQRIRWYLLSMGSNENIHSIHFSGHVFTVRKKEEYKMALYNLYPGVFETVEMLPSKAGIWRVECLIGEHLHAGMSTLFLVYSNKCQTPLGMASGHIRDFQITASGQYGQWAPKLARLHYSGSINAWSTKEPFSWIKVDLLAPMIIHGIKTQGARQKFSSLYISQFIIMYSLDGKKWQTYRGNSTGTDMVFFGNVDSSGIKHNIFNPPIIARYIRLHPTHYSIRSTLRMELMGCDLNSCSMPLGMESKAISDAQITASSYFTNMFATWSPSKARLHLQGRSNAWRPQVNNPKEWLQVDFQKTMKVTGVTTQGVKSLDTSMYVKEFLISSSQDGHQWTLFFQNGKVKVFQGNQDSFTPVVNSLDPPLLTRYLRIHPQSWEHQIALRMEVLGCEAQDLY

SEQ ID NO: 989 - DNA, 4371 bp, synthetic construct
  misc_feature 1..4371: note = Variant of human B-domain deleted Factor VIII
  source 1..4371: mol_type = other DNA
atgcagattgaactgtctacctgcttcttcctctgtttgctgaggttctgctttagcgccactagacggtactaccttggcgctgtggagctgtcctgggactatatgcagagtgatttgggagagcttcccgtcgacgcacgatttcctcctcgcgttccaaagtcatttccctttaacacaagcgtggtgtacaagaagacgctcttcgtcgaattcaccgatcacctgttcaatatcgccaaacccagaccaccatggatgggtcttttggggcctaccatacaagcggaggtgtatgacacagttgttatcactctcaagaacatggcttctcatccggtaagtcttcacgcagtgggcgtgtcctactggaaagcttcagaaggagccgagtatgatgatcagacatcccagagggagaaagaagacgacaaggtatttccaggtgggtctcatacctatgtgtggcaagtgctcaaagagaatggccctatggcaagcgatccgccgtgtttgacttacagctacctttcacacgttgacctcgtcaaggacctcaactccgggttgattggagccttgttggtatgcagggaaggatctcttgccaaagagaagacacagaccctccacaagtttatccttctctttgctgtgttcgatgagggcaaaagttggcatagcgaaacgaagaattccctcatgcaggatcgcgacgcagccagcgccagagcttggcccaagatgcacactgtgaacggatatgtcaataggacgcttcctggcttgattgggtgtcatcggaaaagtgtctactggcacgtgatcggaatggggacaacaccagaggtccactccatatttctcgaaggccataccttccttgttcgaaaccacagacaggcatccttggggatctctcccattacctttctcactgcccaaacgtgtcttatggacttgggtcagttccttctcttttgccatatcccgtcacaccagcatgatggtatggaagcttatgtgaaagtcgacagttgtcctgaggagccacagttgcgcatgaagaataatgaagaagccgaggattacgacgacgatctcaccgattctgagatggacgtggtgaggtttgatgacgacaactctccctccatcattcaagctcggagcgtggcgaagaaacaccccaagacttgggtccactatatagcggcggaagaggaggattgggattacgctcctcttgtattggcaccagatgaccgctcatacaaaagccagtacctcaacaacggaccgcagagaattggccggaagtataagaaagtgcgatttatggcctatacagacgaaacctttaagacaagggaggccatccagcatgagagtgggattttgggacctcttctttacggcgaagttggtgataccctcctcatcatcttcaagaatcaagcttctcgcccctataacatttacccacacgggatcactgacgttaggcctttgtatagcagaagacttcccaaaggcgtgaagcatctcaaagacttccccattttgccaggcgagatctttaagtacaaatggaccgtcacagtggaagatggaccgactaaatcagaccctcgatgccttacgcggtactattcctccttcgtgaatatggagagagatttggcaagcggactcataggaccactcctcatctgttacaaggaatctgtagaccagaggggtaaccagattatgagtgataaacgcaatgtgatcctttttagcgtcttcgacgagaaccggtcctggtacttgaccgagaatatacaaaggttccttcccaaccccgcaggcgttcagttggaagaccctgagtttcaggccagcaatattatgcactcaatcaacggctatgtgtttgatagtctccagctttctgtttgcctccatgaagtagcctattggtacatcttgtcaattggtgctcaaacagacttcctctccgtcttcttctccggctacacctttaagcacaagatggtgtatgaggacactctcacactctttccattttctggagaaaccgtgttcatgagcatggagaatccaggcctttggatcttgggttgccacaacagtgattttcgcaatcggggaatgactgctctcctcaaagtcagcagctgtgataagaacacaggcgactattacgaagattcttacgaggacataagtgcctactttgactccaagaataacgccattgagcccagatcattctcccagaatcctcccgtgcttaaaaggcatcagcgcgaaatcaccagaactactcttcagtctgatcaagaggagattgactatgacgacaccataagcgtggaaatgaagaaggaggatttcgatatctatgacgaagatgagaaccagtctccgcggagctttcagaagaagacgcgacactacttcattgcagcagtcgaaaggctttgggactacggtatgtcatcatcccctcatgtgttgcgcaatagagctcagagtggaagtgttccacagttcaagaaagtcgtctttcaagagtttacagatggcagcttcacacagcctctctatcggggcgagcttaacgaacatttgggactccttggtccctatatccgagccgaagtggaggacaacattatggttacctttaggaatcaagcctctcgcccctacagcttctactcctccctcatcagttatgaggaggatcagagacaaggcgctgaaccacggaagaactttgtgaaaccgaatgagacgaagacctacttctggaaagtacagcaccacatggcccccacaaaagacgaattcgattgcaaagcatgggcgtatttttcagacgttgacttggagaaagatgtacattcaggacttattggtcctttgttggtgtgtcacactaacactctcaatccagcccatggcaggcaggtgacagtccaggaattcgctcttttctttaccatctttgatgagaccaagtcctggtacttcacggaaaacatggagcgcaattgcagagccccctgtaacatacagatggaggaccctacctttaaggaaaattatcggttccacgcaatcaacggatacattatggatacactccctggccttgtgatggctcaggaccaacgaatcaggtggtacctcctcagcatgggttctaatgagaacatacactccattcacttttcaggacatgtgttcactgtccggaagaaagaagagtataagatggccctctacaatttgtatccaggcgtgtttgagaccgttgaaatgcttccctctaaagctggcatctggagagtagagtgcttgatcggagaacatcttcacgcaggtatgagcaccttgttcctcgtgtacagcaacaaatgtcagaccccacttggcatggccagtggacacattcgcgactttcagatcacagcatctggccagtatggacaatgggccccaaagttggctcgcctccattactccggtagcataaatgcgtggtccactaaagaacctttcagctggattaaggtcgatcttcttgcccccatgatcatccacggcattaagacacagggagcgaggcagaaattctcctccctctacatctcacagttcattattatgtatagtttggacggcaagaagtggcaaacttatagaggtaacagtactggaacagacatggtgttcttcggcaacgttgatagctctggcatcaaacacaacatctttaatcctcccataatagctcggtacatcagattgcatccgacccactacagcattaggagtacactccgaatggagcttatgggttgcgacttgaattcctgttcaatgccactcggaatggagtctaaagccatctctgatgcacagataaccgccagtagctactttacgaacatgtttgctacgtggtcaccctctaaggcaaggcttcatttgcaaggccggtctaatgcctggagacctcaggtgaacaacccgaaagaatggctccaggtggactttcagaagaccatgaaagtaacaggtgtcactactcagggagttaagtccttggatactagcatgtatgtgaaggagttccttatttcctcatcacaagatggccaccagtggaccctcttctttcagaatggtaaggtcaaagtgtttcagggcaatcaagacagcttcacacccgtggtgaacagtcttgatcctccactcttgacacgataccttcgaatccatccacagtcttgggagcaccagattgcattgcgcatggaagtacttggatgcgaggctcaggacctctac

SEQ ID NO: 990 - protein, 1457 aa, synthetic construct
  REGION 1..1457: note = Variant of human B-domain deleted Factor VIII
MQIELSTCFFLCLLRFCFSATRRYYLGAVELSWDYMQSDLGELPVDARFPPRVPKSFPFNTSVVYKKTLFVEFTDHLFNIAKPRPPWMGLLGPTIQAEVYDTVVITLKNMASHPVSLHAVGVSYWKASEGAEYDDQTSQREKEDDKVFPGGSHTYVWQVLKENGPMASDPPCLTYSYLSHVDLVKDLNSGLIGALLVCREGSLAKEKTQTLHKFILLFAVFDEGKSWHSETKNSLMQDRDAASARAWPKMHTVNGYVNRTLPGLIGCHRKSVYWHVIGMGTTPEVHSIFLEGHTFLVRNHRQASLGISPITFLTAQTCLMDLGQFLLFCHIPSHQHDGMEAYVKVDSCPEEPQLRMKNNEEAEDYDDDLTDSEMDVVRFDDDNSPSIIQARSVAKKHPKTWVHYIAAEEEDWDYAPLVLAPDDRSYKSQYLNNGPQRIGRKYKKVRFMAYTDETFKTREAIQHESGILGPLLYGEVGDTLLIIFKNQASRPYNIYPHGITDVRPLYSRRLPKGVKHLKDFPILPGEIFKYKWTVTVEDGPTKSDPRCLTRYYSSFVNMERDLASGLIGPLLICYKESVDQRGNQIMSDKRNVILFSVFDENRSWYLTENIQRFLPNPAGVQLEDPEFQASNIMHSINGYVFDSLQLSVCLHEVAYWYILSIGAQTDFLSVFFSGYTFKHKMVYEDTLTLFPFSGETVFMSMENPGLWILGCHNSDFRNRGMTALLKVSSCDKNTGDYYEDSYEDISAYFDSKNNAIEPRSFSQNPPVLKRHQREITRTTLQSDQEEIDYDDTISVEMKKEDFDIYDEDENQSPRSFQKKTRHYFIAAVERLWDYGMSSSPHVLRNRAQSGSVPQFKKVVFQEFTDGSFTQPLYRGELNEHLGLLGPYIRAEVEDNIMVTFRNQASRPYSFYSSLISYEEDQRQGAEPRKNFVKPNETKTYFWKVQHHMAPTKDEFDCKAWAYFSDVDLEKDVHSGLIGPLLVCHTNTLNPAHGRQVTVQEFALFFTIFDETKSWYFTENMERNCRAPCNIQMEDPTFKENYRFHAINGYIMDTLPGLVMAQDQRIRWYLLSMGSNENIHSIHFSGHVFTVRKKEEYKMALYNLYPGVFETVEMLPSKAGIWRVECLIGEHLHAGMSTLFLVYSNKCQTPLGMASGHIRDFQITASGQYGQWAPKLARLHYSGSINAWSTKEPFSWIKVDLLAPMIIHGIKTQGARQKFSSLYISQFIIMYSLDGKKWQTYRGNSTGTDMVFFGNVDSSGIKHNIFNPPIIARYIRLHPTHYSIRSTLRMELMGCDLNSCSMPLGMESKAISDAQITASSYFTNMFATWSPSKARLHLQGRSNAWRPQVNNPKEWLQVDFQKTMKVTGVTTQGVKSLDTSMYVKEFLISSSQDGHQWTLFFQNGKVKVFQGNQDSFTPVVNSLDPPLLTRYLRIHPQSWEHQIALRMEVLGCEAQDLY

SEQ ID NO: 991 - DNA, 4371 bp, synthetic construct
  misc_feature 1..4371: note = Variant of human B-domain deleted Factor VIII
  source 1..4371: mol_type = other DNA
atgcagattgaactgtctacctgcttcttcctctgtttgctgaggttctcttttagcgccactagacggtactaccttggcgctgtggagctgtcctgggactatatgcagagtgatttgggagagcttcccgtcgacgcacgatttcctcctcgcgttccaaagtcatttccctttaacacaagcgtggtgtacaagaagacgctcttcgtcgaattcaccgatcacctgttcaatatcgccaaacccagaccaccatggatgggtcttttggggcctaccatacaagcggaggtgtatgacacagttgttatcactctcaagaacatggcttctcatccggtaagtcttcacgcagtgggcgtgtcctactggaaagcttcagaaggagccgagtatgatgatcagacatcccagagggagaaagaagacgacaaggtatttccaggtgggtctcatacctatgtgtggcaagtgctcaaagagaatggccctatggcaagcgatccgccgtgtttgacttacagctacctttcacacgttgacctcgtcaaggacctcaactccgggttgattggagccttgttggtatgcagggaaggatctcttgccaaagagaagacacagaccctccacaagtttatccttctctttgctgtgttcgatgagggcaaaagttggcatagcgaaacgaagaattccctcatgcaggatcgcgacgcagccagcgccagagcttggcccaagatgcacactgtgaacggatatgtcaataggacgcttcctggcttgattgggtgtcatcggaaaagtgtctactggcacgtgatcggaatggggacaacaccagaggtccactccatatttctcgaaggccataccttccttgttcgaaaccacagacaggcatccttggggatctctcccattacctttctcactgcccaaacgctccttatggacttgggtcagttccttctcttttgccatatcccgtcacaccagcatgatggtatggaagcttatgtgaaagtcgacagttgtcctgaggagccacagttgcgcatgaagaataatgaagaagccgaggattacgacgacgatctcaccgattctgagatggacgtggtgaggtttgatgacgacaactctccctccatcattcaagctcggagcgtggcgaagaaacaccccaagacttgggtccactatatagcggcggaagaggaggattgggattacgctcctcttgtattggcaccagatgaccgctcatacaaaagccagtacctcaacaacggaccgcagagaattggccggaagtataagaaagtgcgatttatggcctatacagacgaaacctttaagacaagggaggccatccagcatgagagtgggattttgggacctcttctttacggcgaagttggtgataccctcctcatcatcttcaagaatcaagcttctcgcccctataacatttacccacacgggatcactgacgttaggcctttgtatagcagaagacttcccaaaggcgtgaagcatctcaaagacttccccattttgccaggcgagatctttaagtacaaatggaccgtcacagtggaagatggaccgactaaatcagaccctcgatgccttacgcggtactattcctccttcgtgaatatggagagagatttggcaagcggactcataggaccactcctcatctgttacaaggaatctgtagaccagaggggtaaccagattatgagtgataaacgcaatgtgatcctttttagcgtcttcgacgagaaccggtcctggtacttgaccgagaatatacaaaggttccttcccaaccccgcaggcgttcagttggaagaccctgagtttcaggccagcaatattatgcactcaatcaacggctatgtgtttgatagtctccagctttctgtttgcctccatgaagtagcctattggtacatcttgtcaattggtgctcaaacagacttcctctccgtcttcttctccggctacacctttaagcacaagatggtgtatgaggacactctcacactctttccattttctggagaaaccgtgttcatgagcatggagaatccaggcctttggatcttgggttgccacaacagtgattttcgcaatcggggaatgactgctctcctcaaagtcagcagctgtgataagaacacaggcgactattacgaagattcttacgaggacataagtgcctactttgactccaagaataacgccattgagcccagatcattctcccagaatcctcccgtgcttaaaaggcatcagcgcgaaatcaccagaactactcttcagtctgatcaagaggagattgactatgacgacaccataagcgtggaaatgaagaaggaggatttcgatatctatgacgaagatgagaaccagtctccgcggagctttcagaagaagacgcgacactacttcattgcagcagtcgaaaggctttgggactacggtatgtcatcatcccctcatgtgttgcgcaatagagctcagagtggaagtgttccacagttcaagaaagtcgtctttcaagagtttacagatggcagcttcacacagcctctctatcggggcgagcttaacgaacatttgggactccttggtccctatatccgagccgaagtggaggacaacattatggttacctttaggaatcaagcctctcgcccctacagcttctactcctccctcatcagttatgaggaggatcagagacaaggcgctgaaccacggaagaactttgtgaaaccgaatgagacgaagacctacttctggaaagtacagcaccacatggcccccacaaaagacgaattcgattgcaaagcatgggcgtatttttcagacgttgacttggagaaagatgtacattcaggacttattggtcctttgttggtgtgtcacactaacactctcaatccagcccatggcaggcaggtgacagtccaggaattcgctcttttctttaccatctttgatgagaccaagtcctggtacttcacggaaaacatggagcgcaattgcagagccccctgtaacatacagatggaggaccctacctttaaggaaaattatcggttccacgcaatcaacggatacattatggatacactccctggccttgtgatggctcaggaccaacgaatcaggtggtacctcctcagcatgggttctaatgagaacatacactccattcacttttcaggacatgtgttcactgtccggaagaaagaagagtataagatggccctctacaatttgtatccaggcgtgtttgagaccgttgaaatgcttccctctaaagctggcatctggagagtagagtgcttgatcggagaacatcttcacgcaggtatgagcaccttgttcctcgtgtacagcaacaaatgtcagaccccacttggcatggccagtggacacattcgcgactttcagatcacagcatctggccagtatggacaatgggccccaaagttggctcgcctccattactccggtagcataaatgcgtggtccactaaagaacctttcagctggattaaggtcgatcttcttgcccccatgatcatccacggcattaagacacagggagcgaggcagaaattctcctccctctacatctcacagttcattattatgtatagtttggacggcaagaagtggcaaacttatagaggtaacagtactggaacagacatggtgttcttcggcaacgttgatagctctggcatcaaacacaacatctttaatcctcccataatagctcggtacatcagattgcatccgacccactacagcattaggagtacactccgaatggagcttatgggttgcgacttgaattcctgttcaatgccactcggaatggagtctaaagccatctctgatgcacagataaccgccagtagctactttacgaacatgtttgctacgtggtcaccctctaaggcaaggcttcatttgcaaggccggtctaatgcctggagacctcaggtgaacaacccgaaagaatggctccaggtggactttcagaagaccatgaaagtaacaggtgtcactactcagggagttaagtccttggatactagcatgtatgtgaaggagttccttatttcctcatcacaagatggccaccagtggaccctcttctttcagaatggtaaggtcaaagtgtttcagggcaatcaagacagcttcacacccgtggtgaacagtcttgatcctccactcttgacacgataccttcgaatccatccacagtcttgggagcaccagattgcattgcgcatggaagtacttggatgcgaggctcaggacctctac

SEQ ID NO: 992 - protein, 1457 aa, synthetic construct
  REGION 1..1457: note = Variant of human B-domain deleted Factor VIII
MQIELSTCFFLCLLRFSFSATRRYYLGAVELSWDYMQSDLGELPVDARFPPRVPKSFPFNTSVVYKKTLFVEFTDHLFNIAKPRPPWMGLLGPTIQAEVYDTVVITLKNMASHPVSLHAVGVSYWKASEGAEYDDQTSQREKEDDKVFPGGSHTYVWQVLKENGPMASDPPCLTYSYLSHVDLVKDLNSGLIGALLVCREGSLAKEKTQTLHKFILLFAVFDEGKSWHSETKNSLMQDRDAASARAWPKMHTVNGYVNRTLPGLIGCHRKSVYWHVIGMGTTPEVHSIFLEGHTFLVRNHRQASLGISPITFLTAQTLLMDLGQFLLFCHIPSHQHDGMEAYVKVDSCPEEPQLRMKNNEEAEDYDDDLTDSEMDVVRFDDDNSPSIIQARSVAKKHPKTWVHYIAAEEEDWDYAPLVLAPDDRSYKSQYLNNGPQRIGRKYKKVRFMAYTDETFKTREAIQHESGILGPLLYGEVGDTLLIIFKNQASRPYNIYPHGITDVRPLYSRRLPKGVKHLKDFPILPGEIFKYKWTVTVEDGPTKSDPRCLTRYYSSFVNMERDLASGLIGPLLICYKESVDQRGNQIMSDKRNVILFSVFDENRSWYLTENIQRFLPNPAGVQLEDPEFQASNIMHSINGYVFDSLQLSVCLHEVAYWYILSIGAQTDFLSVFFSGYTFKHKMVYEDTLTLFPFSGETVFMSMENPGLWILGCHNSDFRNRGMTALLKVSSCDKNTGDYYEDSYEDISAYFDSKNNAIEPRSFSQNPPVLKRHQREITRTTLQSDQEEIDYDDTISVEMKKEDFDIYDEDENQSPRSFQKKTRHYFIAAVERLWDYGMSSSPHVLRNRAQSGSVPQFKKVVFQEFTDGSFTQPLYRGELNEHLGLLGPYIRAEVEDNIMVTFRNQASRPYSFYSSLISYEEDQRQGAEPRKNFVKPNETKTYFWKVQHHMAPTKDEFDCKAWAYFSDVDLEKDVHSGLIGPLLVCHTNTLNPAHGRQVTVQEFALFFTIFDETKSWYFTENMERNCRAPCNIQMEDPTFKENYRFHAINGYIMDTLPGLVMAQDQRIRWYLLSMGSNENIHSIHFSGHVFTVRKKEEYKMALYNLYPGVFETVEMLPSKAGIWRVECLIGEHLHAGMSTLFLVYSNKCQTPLGMASGHIRDFQITASGQYGQWAPKLARLHYSGSINAWSTKEPFSWIKVDLLAPMIIHGIKTQGARQKFSSLYISQFIIMYSLDGKKWQTYRGNSTGTDMVFFGNVDSSGIKHNIFNPPIIARYIRLHPTHYSIRSTLRMELMGCDLNSCSMPLGMESKAISDAQITASSYFTNMFATWSPSKARLHLQGRSNAWRPQVNNPKEWLQVDFQKTMKVTGVTTQGVKSLDTSMYVKEFLISSSQDGHQWTLFFQNGKVKVFQGNQDSFTPVVNSLDPPLLTRYLRIHPQSWEHQIALRMEVLGCEAQDLY

SEQ ID NO: 993 - DNA, 4371 bp, synthetic construct
  misc_feature 1..4371: note = Variant of human B-domain deleted Factor VIII
  source 1..4371: mol_type = other DNA
atgcagattgaactgtctacctgcttcttcctctgtttgctgaggttctgctttagcctgactagacggtactaccttggcgctgtggagctgtcctgggactatatgcagagtgatttgggagagcttcccgtcgacgcacgatttcctcctcgcgttccaaagtcatttccctttaacacaagcgtggtgtacaagaagacgctcttcgtcgaattcaccgatcacctgttcaatatcgccaaacccagaccaccatggatgggtcttttggggcctaccatacaagcggaggtgtatgacacagttgttatcactctcaagaacatggcttctcatccggtaagtcttcacgcagtgggcgtgtcctactggaaagcttcagaaggagccgagtatgatgatcagacatcccagagggagaaagaagacgacaaggtatttccaggtgggtctcatacctatgtgtggcaagtgctcaaagagaatggccctatggcaagcgatccgccgtgtttgacttacagctacctttcacacgttgacctcgtcaaggacctcaactccgggttgattggagccttgttggtatgcagggaaggatctcttgccaaagagaagacacagaccctccacaagtttatccttctctttgctgtgttcgatgagggcaaaagttggcatagcgaaacgaagaattccctcatgcaggatcgcgacgcagccagcgccagagcttggcccaagatgcacactgtgaacggatatgtcaataggacgcttcctggcttgattgggtgtcatcggaaaagtgtctactggcacgtgatcggaatggggacaacaccagaggtccactccatatttctcgaaggccataccttccttgttcgaaaccacagacaggcatccttggggatctctcccattacctttctcactgcccaaacgctccttatggacttgggtcagttccttctcttttgccatatcccgtcacaccagcatgatggtatggaagcttatgtgaaagtcgacagttgtcctgaggagccacagttgcgcatgaagaataatgaagaagccgaggattacgacgacgatctcaccgattctgagatggacgtggtgaggtttgatgacgacaactctccctccatcattcaagctcggagcgtggcgaagaaacaccccaagacttgggtccactatatagcggcggaagaggaggattgggattacgctcctcttgtattggcaccagatgaccgctcatacaaaagccagtacctcaacaacggaccgcagagaattggccggaagtataagaaagtgcgatttatggcctatacagacgaaacctttaagacaagggaggccatccagcatgagagtgggattttgggacctcttctttacggcgaagttggtgataccctcctcatcatcttcaagaatcaagcttctcgcccctataacatttacccacacgggatcactgacgttaggcctttgtatagcagaagacttcccaaaggcgtgaagcatctcaaagacttccccattttgccaggcgagatctttaagtacaaatggaccgtcacagtggaagatggaccgactaaatcagaccctcgatgccttacgcggtactattcctccttcgtgaatatggagagagatttggcaagcggactcataggaccactcctcatctgttacaaggaatctgtagaccagaggggtaaccagattatgagtgataaacgcaatgtgatcctttttagcgtcttcgacgagaaccggtcctggtacttgaccgagaatatacaaaggttccttcccaaccccgcaggcgttcagttggaagaccctgagtttcaggccagcaatattatgcactcaatcaacggctatgtgtttgatagtctccagctttctgtttgcctccatgaagtagcctattggtacatcttgtcaattggtgctcaaacagacttcctctccgtcttcttctccggctacacctttaagcacaagatggtgtatgaggacactctcacactctttccattttctggagaaaccgtgttcatgagcatggagaatccaggcctttggatcttgggttgccacaacagtgattttcgcaatcggggaatgactgctctcctcaaagtcagcagctgtgataagaacacaggcgactattacgaagattcttacgaggacataagtgcctactttgactccaagaataacgccattgagcccagatcattctcccagaatcctcccgtgcttaaaaggcatcagcgcgaaatcaccagaactactcttcagtctgatcaagaggagattgactatgacgacaccataagcgtggaaatgaagaaggaggatttcgatatctatgacgaagatgagaaccagtctccgcggagctttcagaagaagacgcgacactacttcattgcagcagtcgaaaggctttgggactacggtatgtcatcatcccctcatgtgttgcgcaatagagctcagagtggaagtgttccacagttcaagaaagtcgtctttcaagagtttacagatggcagcttcacacagcctctctatcggggcgagcttaacgaacatttgggactccttggtccctatatccgagccgaagtggaggacaacattatggttacctttaggaatcaagcctctcgcccctacagcttctactcctccctcatcagttatgaggaggatcagagacaaggcgctgaaccacggaagaactttgtgaaaccgaatgagacgaagacctacttctggaaagtacagcaccacatggcccccacaaaagacgaattcgattgcaaagcatgggcgtatttttcagacgttgacttggagaaagatgtacattcaggacttattggtcctttgttggtgtgtcacactaacactctcaatccagcccatggcaggcaggtgacagtccaggaattcgctcttttctttaccatctttgatgagaccaagtcctggtacttcacggaaaacatggagcgcaattgcagagccccctgtaacatacagatggaggaccctacctttaaggaaaattatcggttccacgcaatcaacggatacattatggatacactccctggccttgtgatggctcaggaccaacgaatcaggtggtacctcctcagcatgggttctaatgagaacatacactccattcacttttcaggacatgtgttcactgtccggaagaaagaagagtataagatggccctctacaatttgtatccaggcgtgtttgagaccgttgaaatgcttccctctaaagctggcatctggagagtagagtgcttgatcggagaacatcttcacgcaggtatgagcaccttgttcctcgtgtacagcaacaaatgtcagaccccacttggcatggccagtggacacattcgcgactttcagatcacagcatctggccagtatggacaatgggccccaaagttggctcgcctccattactccggtagcataaatgcgtggtccactaaagaacctttcagctggattaaggtcgatcttcttgcccccatgatcatccacggcattaagacacagggagcgaggcagaaattctcctccctctacatctcacagttcattattatgtatagtttggacggcaagaagtggcaaacttatagaggtaacagtactggaacagacatggtgttcttcggcaacgttgatagctctggcatcaaacacaacatctttaatcctcccataatagctcggtacatcagattgcatccgacccactacagcattaggagtacactccgaatggagcttatgggttgcgacttgaattcctgttcaatgccactcggaatggagtctaaagccatctctgatgcacagataaccgccagtagctactttacgaacatgtttgctacgtggtcaccctctaaggcaaggcttcatttgcaaggccggtctaatgcctggagacctcaggtgaacaacccgaaagaatggctccaggtggactttcagaagaccatgaaagtaacaggtgtcactactcagggagttaagtccttggatactagcatgtatgtgaaggagttccttatttcctcatcacaagatggccaccagtggaccctcttctttcagaatggtaaggtcaaagtgtttcagggcaatcaagacagcttcacacccgtggtgaacagtcttgatcctccactcttgacacgataccttcgaatccatccacagtcttgggagcaccagattgcattgcgcatggaagtacttggatgcgaggctcaggacctctac

SEQ ID NO: 994 - protein, 1457 aa, synthetic construct
  REGION 1..1457: note = Variant of human B-domain deleted Factor VIII
MQIELSTCFFLCLLRFCFSLTRRYYLGAVELSWDYMQSDLGELPVDARFPPRVPKSFPFNTSVVYKKTLFVEFTDHLFNIAKPRPPWMGLLGPTIQAEVYDTVVITLKNMASHPVSLHAVGVSYWKASEGAEYDDQTSQREKEDDKVFPGGSHTYVWQVLKENGPMASDPPCLTYSYLSHVDLVKDLNSGLIGALLVCREGSLAKEKTQTLHKFILLFAVFDEGKSWHSETKNSLMQDRDAASARAWPKMHTVNGYVNRTLPGLIGCHRKSVYWHVIGMGTTPEVHSIFLEGHTFLVRNHRQASLGISPITFLTAQTLLMDLGQFLLFCHIPSHQHDGMEAYVKVDSCPEEPQLRMKNNEEAEDYDDDLTDSEMDVVRFDDDNSPSIIQARSVAKKHPKTWVHYIAAEEEDWDYAPLVLAPDDRSYKSQYLNNGPQRIGRKYKKVRFMAYTDETFKTREAIQHESGILGPLLYGEVGDTLLIIFKNQASRPYNIYPHGITDVRPLYSRRLPKGVKHLKDFPILPGEIFKYKWTVTVEDGPTKSDPRCLTRYYSSFVNMERDLASGLIGPLLICYKESVDQRGNQIMSDKRNVILFSVFDENRSWYLTENIQRFLPNPAGVQLEDPEFQASNIMHSINGYVFDSLQLSVCLHEVAYWYILSIGAQTDFLSVFFSGYTFKHKMVYEDTLTLFPFSGETVFMSMENPGLWILGCHNSDFRNRGMTALLKVSSCDKNTGDYYEDSYEDISAYFDSKNNAIEPRSFSQNPPVLKRHQREITRTTLQSDQEEIDYDDTISVEMKKEDFDIYDEDENQSPRSFQKKTRHYFIAAVERLWDYGMSSSPHVLRNRAQSGSVPQFKKVVFQEFTDGSFTQPLYRGELNEHLGLLGPYIRAEVEDNIMVTFRNQASRPYSFYSSLISYEEDQRQGAEPRKNFVKPNETKTYFWKVQHHMAPTKDEFDCKAWAYFSDVDLEKDVHSGLIGPLLVCHTNTLNPAHGRQVTVQEFALFFTIFDETKSWYFTENMERNCRAPCNIQMEDPTFKENYRFHAINGYIMDTLPGLVMAQDQRIRWYLLSMGSNENIHSIHFSGHVFTVRKKEEYKMALYNLYPGVFETVEMLPSKAGIWRVECLIGEHLHAGMSTLFLVYSNKCQTPLGMASGHIRDFQITASGQYGQWAPKLARLHYSGSINAWSTKEPFSWIKVDLLAPMIIHGIKTQGARQKFSSLYISQFIIMYSLDGKKWQTYRGNSTGTDMVFFGNVDSSGIKHNIFNPPIIARYIRLHPTHYSIRSTLRMELMGCDLNSCSMPLGMESKAISDAQITASSYFTNMFATWSPSKARLHLQGRSNAWRPQVNNPKEWLQVDFQKTMKVTGVTTQGVKSLDTSMYVKEFLISSSQDGHQWTLFFQNGKVKVFQGNQDSFTPVVNSLDPPLLTRYLRIHPQSWEHQIALRMEVLGCEAQDLY

SEQ ID NO: 995 - DNA, 4371 bp, synthetic construct
  misc_feature 1..4371: note = Variant of human B-domain deleted Factor VIII
  source 1..4371: mol_type = other DNA
atgcagattgaactgtctacctgcttcttcctctgtttgctgaggttctgctttagcgccactagacggtactaccttggcgctgtggagctgtcctgggactatatgcagagtgatttgggagagcttcccgtcgacgcacgatttcctcctcgcgttccaaagtcatttccctttaacacaagcgtggtgtacaagaagacgctcttcgtcgaattcaccgatcacctgttcaatatcgccaaacccagaccaccatggatgggtcttttggggcctaccatacaagcggaggtgtatgacacagttgttatcactctcaagaacatggcttctcatccggtaagtcttcacgcagtgggcgtgtcctactggaaagcttcagaaggagccgagtatgatgatcagacatcccagagggagaaagaagacgacaaggtatttccaggtgggtctcatacctatgtgtggcaagtgctcaaagagaatggccctatggcaagcgatccgccgtgtttgacttacagctacctttcacacgttgacctcgtcaaggacctcaactccgggttgattggagccttgttggtatgcagggaaggatctcttgccaaagagaagacacagaccctccacaagtttatccttctctttgctgtgttcgatgagggcaaaagttggcatagcgaaacgaagaattccctcatgcaggatcgcgacgcagccagcgccagagcttggcccaagatgcacactgtgaacggatatgtcaataggacgcttcctggcttgattgggtgtcatcggaaaagtgtctactggcacgtgatcggaatggggacaacaccagaggtccactccatatttctcgaaggccataccttccttgttcgaaaccacagacaggcatccttggggatctctcccattacctttctcactgcccaaacgctccttatggacttgggtcagttccttctcttttgccatatcccgtcacaccagcatgatggtatggaagcttatgtgaaagtcgacagttgtcctgaggagccacagttgcgcatgaagaataatgaagaagccgaggattacgacgacgatctcaccgattctgagatggacgtggtgaggtttgatgacgacaactctccctccatcattcaagctcggagcgtggcgaagaaacaccccaagacttgggtccactatatagcggcggaagaggaggattgggattacgctcctcttgtattggcaccagatgaccgctcatacaaaagccagtacctcaacaacggaccgcagagaattggccggaagtataagaaagtgcgatttatggcctatacagacgaaacctttaagacaagggaggccatccagcatgagagtgggattttgggacctcttctttacggcgaagttggtgataccctcctcatcatcttcaagaatcaagcttctcgcccctataacatttacccacacgggatcactgacgttaggcctttgtatagcagaagacttcccaaaggcgtgaagcatctcaaagacttccccattttgccaggcgagatctttaagtacaaatggaccgtcacagtggaagatggaccgactaaatcagaccctcgatgccttacgcggtactattcctccttcgtgaatatggagagagatttggcaagcggactcataggaccactcctcatctgttacaaggaatctgtagaccagaggggtaaccagattatgagtgataaacgcaatgtgatcctttttagcgtcttcgacgagaaccggtcctggtacttgaccgagaatatacaaaggttccttcccaaccccgcaggcgttcagttggaagaccctgagtttcaggccagcaatattatgcactcaatcaacggctatgtgtttgatagtctccagctttctgtttgcctccatgaagtagcctattggtacatcttgtcaattggtgctcaaacagacttcctctccgtcttcttctccggctacacctttaagcacaagatggtgtatgaggacactctcacactctttccattttctggagaaaccgtgttcatgagcatggagaatccaggcctttggatcttgggttgccacaacagtgattttcgcaatcggggaatgactgctctcctcaaagtcagcagctgtgataagaacacaggcgactattacgaagattcttacgaggacataagtgcctactttgactccaagaataacgccattgagcccagatcattctcccagaatcctcccgtgcttaaaaggcatcagcgcgaaatcaccagaactactcttcagtctgatcaagaggagattgactatgacgacaccataagcgtggaaatgaagaaggaggatttcgatatctatgacgaagatgagaaccagtctccgcggagctttcagggtaagacgcgacactacttcattgcagcagtcgaaaggctttgggactacggtatgtcatcatcccctcatgtgttgcgcaatagagctcagagtggaagtgttccacagttcaagaaagtcgtctttcaagagtttacagatggcagcttcacacagcctctctatcggggcgagcttaacgaacatttgggactccttggtccctatatccgagccgaagtggaggacaacattatggttacctttaggaatcaagcctctcgcccctacagcttctactcctccctcatcagttatgaggaggatcagagacaaggcgctgaaccacggaagaactttgtgaaaccgaatgagacgaagacctacttctggaaagtacagcaccacatggcccccacaaaagacgaattcgattgcaaagcatgggcgtatttttcagacgttgacttggagaaagatgtacattcaggacttattggtcctttgttggtgtgtcacactaacactctcaatccagcccatggcaggcaggtgacagtccaggaattcgctcttttctttaccatctttgatgagaccaagtcctggtacttcacggaaaacatggagcgcaattgcagagccccctgtaacatacagatggaggaccctacctttaaggaaaattatcggttccacgcaatcaacggatacattatggatacactccctggccttgtgatggctcaggaccaacgaatcaggtggtacctcctcagcatgggttctaatgagaacatacactccattcacttttcaggacatgtgttcactgtccggaagaaagaagagtataagatggccctctacaatttgtatccaggcgtgtttgagaccgttgaaatgcttccctctaaagctggcatctggagagtagagtgcttgatcggagaacatcttcacgcaggtatgagcaccttgttcctcgtgtacagcaacaaatgtcagaccccacttggcatggccagtggacacattcgcgactttcagatcacagcatctggccagtatggacaatgggccccaaagttggctcgcctccattactccggtagcataaatgcgtggtccactaaagaacctttcagctggattaaggtcgatcttcttgcccccatgatcatccacggcattaagacacagggagcgaggcagaaattctcctccctctacatctcacagttcattattatgtatagtttggacggcaagaagtggcaaacttatagaggtaacagtactggaacagacatggtgttcttcggcaacgttgatagctctggcatcaaacacaacatctttaatcctcccataatagctcggtacatcagattgcatccgacccactacagcattaggagtacactccgaatggagcttatgggttgcgacttgaattcctgttcaatgccactcggaatggagtctaaagccatctctgatgcacagataaccgccagtagctactttacgaacatgtttgctacgtggtcaccctctaaggcaaggcttcatttgcaaggccggtctaatgcctggagacctcaggtgaacaacccgaaagaatggctccaggtggactttcagaagaccatgaaagtaacaggtgtcactactcagggagttaagtccttggatactagcatgtatgtgaaggagttccttatttcctcatcacaagatggccaccagtggaccctcttctttcagaatggtaaggtcaaagtgtttcagggcaatcaagacagcttcacacccgtggtgaacagtcttgatcctccactcttgacacgataccttcgaatccatccacagtcttgggagcaccagattgcattgcgcatggaagtacttggatgcgaggctcaggacctctac

SEQ ID NO: 996 - protein, 1457 aa, synthetic construct
  REGION 1..1457: note = Variant of human B-domain deleted Factor VIII
MQIELSTCFFLCLLRFCFSATRRYYLGAVELSWDYMQSDLGELPVDARFPPRVPKSFPFNTSVVYKKTLFVEFTDHLFNIAKPRPPWMGLLGPTIQAEVYDTVVITLKNMASHPVSLHAVGVSYWKASEGAEYDDQTSQREKEDDKVFPGGSHTYVWQVLKENGPMASDPPCLTYSYLSHVDLVKDLNSGLIGALLVCREGSLAKEKTQTLHKFILLFAVFDEGKSWHSETKNSLMQDRDAASARAWPKMHTVNGYVNRTLPGLIGCHRKSVYWHVIGMGTTPEVHSIFLEGHTFLVRNHRQASLGISPITFLTAQTLLMDLGQFLLFCHIPSHQHDGMEAYVKVDSCPEEPQLRMKNNEEAEDYDDDLTDSEMDVVRFDDDNSPSIIQARSVAKKHPKTWVHYIAAEEEDWDYAPLVLAPDDRSYKSQYLNNGPQRIGRKYKKVRFMAYTDETFKTREAIQHESGILGPLLYGEVGDTLLIIFKNQASRPYNIYPHGITDVRPLYSRRLPKGVKHLKDFPILPGEIFKYKWTVTVEDGPTKSDPRCLTRYYSSFVNMERDLASGLIGPLLICYKESVDQRGNQIMSDKRNVILFSVFDENRSWYLTENIQRFLPNPAGVQLEDPEFQASNIMHSINGYVFDSLQLSVCLHEVAYWYILSIGAQTDFLSVFFSGYTFKHKMVYEDTLTLFPFSGETVFMSMENPGLWILGCHNSDFRNRGMTALLKVSSCDKNTGDYYEDSYEDISAYFDSKNNAIEPRSFSQNPPVLKRHQREITRTTLQSDQEEIDYDDTISVEMKKEDFDIYDEDENQSPRSFQGKTRHYFIAAVERLWDYGMSSSPHVLRNRAQSGSVPQFKKVVFQEFTDGSFTQPLYRGELNEHLGLLGPYIRAEVEDNIMVTFRNQASRPYSFYSSLISYEEDQRQGAEPRKNFVKPNETKTYFWKVQHHMAPTKDEFDCKAWAYFSDVDLEKDVHSGLIGPLLVCHTNTLNPAHGRQVTVQEFALFFTIFDETKSWYFTENMERNCRAPCNIQMEDPTFKENYRFHAINGYIMDTLPGLVMAQDQRIRWYLLSMGSNENIHSIHFSGHVFTVRKKEEYKMALYNLYPGVFETVEMLPSKAGIWRVECLIGEHLHAGMSTLFLVYSNKCQTPLGMASGHIRDFQITASGQYGQWAPKLARLHYSGSINAWSTKEPFSWIKVDLLAPMIIHGIKTQGARQKFSSLYISQFIIMYSLDGKKWQTYRGNSTGTDMVFFGNVDSSGIKHNIFNPPIIARYIRLHPTHYSIRSTLRMELMGCDLNSCSMPLGMESKAISDAQITASSYFTNMFATWSPSKARLHLQGRSNAWRPQVNNPKEWLQVDFQKTMKVTGVTTQGVKSLDTSMYVKEFLISSSQDGHQWTLFFQNGKVKVFQGNQDSFTPVVNSLDPPLLTRYLRIHPQSWEHQIALRMEVLGCEAQDLY

SEQ ID NO: 997 - DNA, 4371 bp, synthetic construct
  misc_feature 1..4371: note = Variant of human B-domain deleted Factor VIII
  source 1..4371: mol_type = other DNA
atgcagattgaactgtctacctgcttcttcctctgtttgctgaggttctgctttagcgccactagacggtactaccttggcgctgtggagctgtcctgggactatatgcagagtgatttgggagagcttcccgtcgacgcacgatttcctcctcgcgttccaaagtcatttccctttaacacaagcgtggtgtacaagaagacgctcttcgtcgaattcaccgatcacctgttcaatatcgccaaacccagaccaccatggatgggtcttttggggcctaccatacaagcggaggtgtatgacacagttgttatcactctcaagaacatggcttctcatccggtaagtcttcacgcagtgggcgtgtcctactggaaagcttcagaaggagccgagtatgatgatcagacatcccagagggagaaagaagacgacaaggtatttccaggtgggtctcatacctatgtgtggcaagtgctcaaagagaatggccctatggcaagcgatccgccgtgtttgacttacagctacctttcacacgttgacctcgtcaaggacctcaactccgggttgattggagccttgttggtatgcagggaaggatctcttgccaaagagaagacacagaccctccacaagtttatccttctctttgctgtgttcgatgagggcaaaagttggcatagcgaaacgaagaattccctcatgcaggatcgcgacgcagccagcgccagagcttggcccaagatgcacactgtgaacggatatgtcaataggacgcttcctggcttgattgggtgtcatcggaaaagtgtctactggcacgtgatcggaatggggacaacaccagaggtccactccatatttctcgaaggccataccttccttgttcgaaaccacagacaggcatccttggggatctctcccattacctttctcactgcccaaacgctccttatggacttgggtcagttccttctcttttgccatatcccgtcacaccagcatgatggtatggaagcttatgtgaaagtcgacagttgtcctgaggagccacagttgcgcatgaagaataatgaagaagccgaggattacgacgacgatctcaccgattctgagatggacgtggtgaggtttgatgacgacaactctccctccatcattcaagctcggagcgtggcgaagaaacaccccaagacttgggtccactatatagcggcggaagaggaggattgggattacgctcctcttgtattggcaccagatgaccgctcatacaaaagccagtacctcaacaacggaccgcagagaattggccggaagtataagaaagtgcgatttatggcctatacagacgaaacctttaagacaagggaggccatccagcatgagagtgggattttgggacctcttctttacggcgaagttggtgataccctcctcatcatcttcaagaatcaagcttctcgcccctataacatttacccacacgggatcactgacgttaggcctttgtatagcagaagacttcccaaaggcgtgaagcatctcaaagacttccccattttgccaggcgagatctttaagtacaaatggaccgtcacagtggaagatggaccgactaaatcagaccctcgatgccttacgcggtactattcctccttcgtgaatatggagagagatttggcaagcggactcataggaccactcctcatctgttacaaggaatctgtagaccagaggggtaaccagattatgagtgataaacgcaatgtgatcctttttagcgtcttcgacgagaaccggtcctggtacttgaccgagaatatacaaaggttccttcccaaccccgcaggcgttcagttggaagaccctgagtttcaggccagcaatattatgcactcaatcaacggctatgtgtttgatagtctccagctttctgtttgcctccatgaagtagcctattggtacatcttgtcaattggtgctcaaacagacttcctctccgtcttcttctccggctacacctttaagcacaagatggtgtatgaggacactctcacactctttccattttctggagaaaccgtgttcatgagcatggagaatccaggcctttggatcttgggttgccacaacagtgattttcgcaatcggggaatgactgctctcctcaaagtcagcagctgtgataagaacacaggcgactattacgaagattcttacgaggacataagtgcctactttgactccaagaataacgccattgagcccagatcattctcccagaatcctcccgtgcttaaaaggcatcagcgcgaaatcaccagaactactcttcagtctgatcaagaggagattgactatgacgacaccataagcgtggaaatgaagaaggaggatttcgatatctatgacgaagatgagaaccagtctccgcggagctttcagaagaagacgcgacactacttcattgcagcagtcgaaaggctttgggactacggtgggtcatcatcccctcatgtgttgcgcaatagagctcagagtggaagtgttccacagttcaagaaagtcgtctttcaagagtttacagatggcagcttcacacagcctctctatcggggcgagcttaacgaacatttgggactccttggtccctatatccgagccgaagtggaggacaacattatggttacctttaggaatcaagcctctcgcccctacagcttctactcctccctcatcagttatgaggaggatcagagacaaggcgctgaaccacggaagaactttgtgaaaccgaatgagacgaagacctacttctggaaagtacagcaccacatggcccccacaaaagacgaattcgattgcaaagcatgggcgtatttttcagacgttgacttggagaaagatgtacattcaggacttattggtcctttgttggtgtgtcacactaacactctcaatccagcccatggcaggcaggtgacagtccaggaattcgctcttttctttaccatctttgatgagaccaagtcctggtacttcacggaaaacatggagcgcaattgcagagccccctgtaacatacagatggaggaccctacctttaaggaaaattatcggttccacgcaatcaacggatacattatggatacactccctggccttgtgatggctcaggaccaacgaatcaggtggtacctcctcagcatgggttctaatgagaacatacactccattcacttttcaggacatgtgttcactgtccggaagaaagaagagtataagatggccctctacaatttgtatccaggcgtgtttgagaccgttgaaatgcttccctctaaagctggcatctggagagtagagtgcttgatcggagaacatcttcacgcaggtatgagcaccttgttcctcgtgtacagcaacaaatgtcagaccccacttggcatggccagtggacacattcgcgactttcagatcacagcatctggccagtatggacaatgggccccaaagttggctcgcctccattactccggtagcataaatgcgtggtccactaaagaacctttcagctggattaaggtcgatcttcttgcccccatgatcatccacggcattaagacacagggagcgaggcagaaattctcctccctctacatctcacagttcattattatgtatagtttggacggcaagaagtggcaaacttatagaggtaacagtactggaacagacatggtgttcttcggcaacgttgatagctctggcatcaaacacaacatctttaatcctcccataatagctcggtacatcagattgcatccgacccactacagcattaggagtacactccgaatggagcttatgggttgcgacttgaattcctgttcaatgccactcggaatggagtctaaagccatctctgatgcacagataaccgccagtagctactttacgaacatgtttgctacgtggtcaccctctaaggcaaggcttcatttgcaaggccggtctaatgcctggagacctcaggtgaacaacccgaaagaatggctccaggtggactttcagaagaccatgaaagtaacaggtgtcactactcagggagttaagtccttggatactagcatgtatgtgaaggagttccttatttcctcatcacaagatggccaccagtggaccctcttctttcagaatggtaaggtcaaagtgtttcagggcaatcaagacagcttcacacccgtggtgaacagtcttgatcctccactcttgacacgataccttcgaatccatccacagtcttgggagcaccagattgcattgcgcatggaagtacttggatgcgaggctcaggacctctac

SEQ ID NO: 998 - protein, 1457 aa, synthetic construct
  REGION 1..1457: note = Variant of human B-domain deleted Factor VIII
MQIELSTCFFLCLLRFCFSATRRYYLGAVELSWDYMQSDLGELPVDARFPPRVPKSFPFNTSVVYKKTLFVEFTDHLFNIAKPRPPWMGLLGPTIQAEVYDTVVITLKNMASHPVSLHAVGVSYWKASEGAEYDDQTSQREKEDDKVFPGGSHTYVWQVLKENGPMASDPPCLTYSYLSHVDLVKDLNSGLIGALLVCREGSLAKEKTQTLHKFILLFAVFDEGKSWHSETKNSLMQDRDAASARAWPKMHTVNGYVNRTLPGLIGCHRKSVYWHVIGMGTTPEVHSIFLEGHTFLVRNHRQASLGISPITFLTAQTLLMDLGQFLLFCHIPSHQHDGMEAYVKVDSCPEEPQLRMKNNEEAEDYDDDLTDSEMDVVRFDDDNSPSIIQARSVAKKHPKTWVHYIAAEEEDWDYAPLVLAPDDRSYKSQYLNNGPQRIGRKYKKVRFMAYTDETFKTREAIQHESGILGPLLYGEVGDTLLIIFKNQASRPYNIYPHGITDVRPLYSRRLPKGVKHLKDFPILPGEIFKYKWTVTVEDGPTKSDPRCLTRYYSSFVNMERDLASGLIGPLLICYKESVDQRGNQIMSDKRNVILFSVFDENRSWYLTENIQRFLPNPAGVQLEDPEFQASNIMHSINGYVFDSLQLSVCLHEVAYWYILSIGAQTDFLSVFFSGYTFKHKMVYEDTLTLFPFSGETVFMSMENPGLWILGCHNSDFRNRGMTALLKVSSCDKNTGDYYEDSYEDISAYFDSKNNAIEPRSFSQNPPVLKRHQREITRTTLQSDQEEIDYDDTISVEMKKEDFDIYDEDENQSPRSFQKKTRHYFIAAVERLWDYGGSSSPHVLRNRAQSGSVPQFKKVVFQEFTDGSFTQPLYRGELNEHLGLLGPYIRAEVEDNIMVTFRNQASRPYSFYSSLISYEEDQRQGAEPRKNFVKPNETKTYFWKVQHHMAPTKDEFDCKAWAYFSDVDLEKDVHSGLIGPLLVCHTNTLNPAHGRQVTVQEFALFFTIFDETKSWYFTENMERNCRAPCNIQMEDPTFKENYRFHAINGYIMDTLPGLVMAQDQRIRWYLLSMGSNENIHSIHFSGHVFTVRKKEEYKMALYNLYPGVFETVEMLPSKAGIWRVECLIGEHLHAGMSTLFLVYSNKCQTPLGMASGHIRDFQITASGQYGQWAPKLARLHYSGSINAWSTKEPFSWIKVDLLAPMIIHGIKTQGARQKFSSLYISQFIIMYSLDGKKWQTYRGNSTGTDMVFFGNVDSSGIKHNIFNPPIIARYIRLHPTHYSIRSTLRMELMGCDLNSCSMPLGMESKAISDAQITASSYFTNMFATWSPSKARLHLQGRSNAWRPQVNNPKEWLQVDFQKTMKVTGVTTQGVKSLDTSMYVKEFLISSSQDGHQWTLFFQNGKVKVFQGNQDSFTPVVNSLDPPLLTRYLRIHPQSWEHQIALRMEVLGCEAQDLY

SEQ ID NO: 999 - DNA, 4371 bp, synthetic construct
  misc_feature 1..4371: note = Variant of human B-domain deleted Factor VIII
  source 1..4371: mol_type = other DNA
atgcagattgaactgtctacctgcttcttcctctgtttgctgaggttctgctttagcgccatgagacggtactaccttggcgctgtggagctgtcctgggactatatgcagagtgatttgggagagcttcccgtcgacgcacgatttcctcctcgcgttccaaagtcatttccctttaacacaagcgtggtgtacaagaagacgctcttcgtcgaattcaccgatcacctgttcaatatcgccaaacccagaccaccatggatgggtcttttggggcctaccatacaagcggaggtgtatgacacagttgttatcactctcaagaacatggcttctcatccggtaagtcttcacgcagtgggcgtgtcctactggaaagcttcagaaggagccgagtatgatgatcagacatcccagagggagaaagaagacgacaaggtatttccaggtgggtctcatacctatgtgtggcaagtgctcaaagagaatggccctatggcaagcgatccgccgtgtttgacttacagctacctttcacacgttgacctcgtcaaggacctcaactccgggttgattggagccttgttggtatgcagggaaggatctcttgccaaagagaagacacagaccctccacaagtttatccttctctttgctgtgttcgatgagggcaaaagttggcatagcgaaacgaagaattccctcatgcaggatcgcgacgcagccagcgccagagcttggcccaagatgcacactgtgaacggatatgtcaataggacgcttcctggcttgattgggtgtcatcggaaaagtgtctactggcacgtgatcggaatggggacaacaccagaggtccactccatatttctcgaaggccataccttccttgttcgaaaccacagacaggcatccttggggatctctcccattacctttctcactgcccaaacgctccttatggacttgggtcagttccttctcttttgccatatcccgtcacaccagcatgatggtatggaagcttatgtgaaagtcgacagttgtcctgaggagccacagttgcgcatgaagaataatgaagaagccgaggattacgacgacgatctcaccgattctgagatggacgtggtgaggtttgatgacgacaactctccctccatcattcaagctcggagcgtggcgaagaaacaccccaagacttgggtccactatatagcggcggaagaggaggattgggattacgctcctcttgtattggcaccagatgaccgctcatacaaaagccagtacctcaacaacggaccgcagagaattggccggaagtataagaaagtgcgatttatggcctatacagacgaaacctttaagacaagggaggccatccagcatgagagtgggattttgggacctcttctttacggcgaagttggtgataccctcctcatcatcttcaagaatcaagcttctcgcccctataacatttacccacacgggatcactgacgttaggcctttgtatagcagaagacttcccaaaggcgtgaagcatctcaaagacttccccattttgccaggcgagatctttaagtacaaatggaccgtcacagtggaagatggaccgactaaatcagaccctcgatgccttacgcggtactattcctccttcgtgaatatggagagagatttggcaagcggactcataggaccactcctcatctgttacaaggaatctgtagaccagaggggtaaccagattatgagtgataaacgcaatgtgatcctttttagcgtcttcgacgagaaccggtcctggtacttgaccgagaatatacaaaggttccttcccaaccccgcaggcgttcagttggaagaccctgagtttcaggccagcaatattatgcactcaatcaacggctatgtgtttgatagtctccagctttctgtttgcctccatgaagtagcctattggtacatcttgtcaattggtgctcaaacagacttcctctccgtcttcttctccggctacacctttaagcacaagatggtgtatgaggacactctcacactctttccattttctggagaaaccgtgttcatgagcatggagaatccaggcctttggatcttgggttgccacaacagtgattttcgcaatcggggaatgactgctctcctcaaagtcagcagctgtgataagaacacaggcgactattacgaagattcttacgaggacataagtgcctactttgactccaagaataacgccattgagcccagatcattctcccagaatcctcccgtgcttaaaaggcatcagcgcgaaatcaccagaactactcttcagtctgatcaagaggagattgactatgacgacaccataagcgtggaaatgaagaaggaggatttcgatatctatgacgaagatgagaaccagtctccgcggagctttcagaagaagacgcgacactacttcattgcagcagtcgaaaggctttgggactacggtatgtcatcatcccctcatgtgttgcgcaatagagctcagagtggaagtgttccacagttcaagaaagtcgtctttcaagagtttacagatggcagcttcacacagcctctctatcggggcgagcttaacgaacatttgggactccttggtccctatatccgagccgaagtggaggacaacattatggttacctttaggaatcaagcctctcgcccctacagcttctactcctccctcatcagttatgaggaggatcagagacaaggcgctgaaccacggaagaactttgtgaaaccgaatgagacgaagacctacttctggaaagtacagcaccacatggcccccacaaaagacgaattcgattgcaaagcatgggcgtatttttcagacgttgacttggagaaagatgtacattcaggacttattggtcctttgttggtgtgtcacactaacactctcaatccagcccatggcaggcaggtgacagtccaggaattcgctcttttctttaccatctttgatgagaccaagtcctggtacttcacggaaaacatggagcgcaattgcagagccccctgtaacatacagatggaggaccctacctttaaggaaaattatcggttccacgcaatcaacggatacattatggatacactccctggccttgtgatggctcaggaccaacgaatcaggtggtacctcctcagcatgggttctaatgagaacatacactccattcacttttcaggacatgtgttcactgtccggaagaaagaagagtataagatggccctctacaatttgtatccaggcgtgtttgagaccgttgaaatgcttccctctaaagctggcatctggagagtagagtgcttgatcggagaacatcttcacgcaggtatgagcaccttgttcctcgtgtacagcaacaaatgtcagaccccacttggcatggccagtggacacattcgcgactttcagatcacagcatctggccagtatggacaatgggccccaaagttggctcgcctccattactccggtagcataaatgcgtggtccactaaagaacctttcagctggattaaggtcgatcttcttgcccccatgatcatccacggcattaagacacagggagcgaggcagaaattctcctccctctacatctcacagttcattattatgtatagtttggacggcaagaagtggcaaacttatagaggtaacagtactggaacagacatggtgttcttcggcaacgttgatagctctggcatcaaacacaacatctttaatcctcccataatagctcggtacatcagattgcatccgacccactacagcattaggagtacactccgaatggagcttatgggttgcgacttgaattcctgttcaatgccactcggaatggagtctaaagccatctctgatgcacagataaccgccagtagctactttacgaacatgtttgctacgtggtcaccctctaaggcaaggcttcatttgcaaggccggtctaatgcctggagacctcaggtgaacaacccgaaagaatggctccaggtggactttcagaagaccatgaaagtaacaggtgtcactactcagggagttaagtccttggatactagcatgtatgtgaaggagttccttatttcctcatcacaagatggccaccagtggaccctcttctttcagaatggtaaggtcaaagtgtttcagggcaatcaagacagcttcacacccgtggtgaacagtcttgatcctccactcttgacacgataccttcgaatccatccacagtcttgggagcaccagattgcattgcgcatggaagtacttggatgcgaggctcaggacctctac

SEQ ID NO: 1000 - protein, 1457 aa, synthetic construct
  REGION 1..1457: note = Variant of human B-domain deleted Factor VIII
MQIELSTCFFLCLLRFCFSAMRRYYLGAVELSWDYMQSDLGELPVDARFPPRVPKSFPFNTSVVYKKTLFVEFTDHLFNIAKPRPPWMGLLGPTIQAEVYDTVVITLKNMASHPVSLHAVGVSYWKASEGAEYDDQTSQREKEDDKVFPGGSHTYVWQVLKENGPMASDPPCLTYSYLSHVDLVKDLNSGLIGALLVCREGSLAKEKTQTLHKFILLFAVFDEGKSWHSETKNSLMQDRDAASARAWPKMHTVNGYVNRTLPGLIGCHRKSVYWHVIGMGTTPEVHSIFLEGHTFLVRNHRQASLGISPITFLTAQTLLMDLGQFLLFCHIPSHQHDGMEAYVKVDSCPEEPQLRMKNNEEAEDYDDDLTDSEMDVVRFDDDNSPSIIQARSVAKKHPKTWVHYIAAEEEDWDYAPLVLAPDDRSYKSQYLNNGPQRIGRKYKKVRFMAYTDETFKTREAIQHESGILGPLLYGEVGDTLLIIFKNQASRPYNIYPHGITDVRPLYSRRLPKGVKHLKDFPILPGEIFKYKWTVTVEDGPTKSDPRCLTRYYSSFVNMERDLASGLIGPLLICYKESVDQRGNQIMSDKRNVILFSVFDENRSWYLTENIQRFLPNPAGVQLEDPEFQASNIMHSINGYVFDSLQLSVCLHEVAYWYILSIGAQTDFLSVFFSGYTFKHKMVYEDTLTLFPFSGETVFMSMENPGLWILGCHNSDFRNRGMTALLKVSSCDKNTGDYYEDSYEDISAYFDSKNNAIEPRSFSQNPPVLKRHQREITRTTLQSDQEEIDYDDTISVEMKKEDFDIYDEDENQSPRSFQKKTRHYFIAAVERLWDYGMSSSPHVLRNRAQSGSVPQFKKVVFQEFTDGSFTQPLYRGELNEHLGLLGPYIRAEVEDNIMVTFRNQASRPYSFYSSLISYEEDQRQGAEPRKNFVKPNETKTYFWKVQHHMAPTKDEFDCKAWAYFSDVDLEKDVHSGLIGPLLVCHTNTLNPAHGRQVTVQEFALFFTIFDETKSWYFTENMERNCRAPCNIQMEDPTFKENYRFHAINGYIMDTLPGLVMAQDQRIRWYLLSMGSNENIHSIHFSGHVFTVRKKEEYKMALYNLYPGVFETVEMLPSKAGIWRVECLIGEHLHAGMSTLFLVYSNKCQTPLGMASGHIRDFQITASGQYGQWAPKLARLHYSGSINAWSTKEPFSWIKVDLLAPMIIHGIKTQGARQKFSSLYISQFIIMYSLDGKKWQTYRGNSTGTDMVFFGNVDSSGIKHNIFNPPIIARYIRLHPTHYSIRSTLRMELMGCDLNSCSMPLGMESKAISDAQITASSYFTNMFATWSPSKARLHLQGRSNAWRPQVNNPKEWLQVDFQKTMKVTGVTTQGVKSLDTSMYVKEFLISSSQDGHQWTLFFQNGKVKVFQGNQDSFTPVVNSLDPPLLTRYLRIHPQSWEHQIALRMEVLGCEAQDLY

SEQ ID NO: 1001 - DNA, 4371 bp, synthetic construct
  misc_feature 1..4371: note = Variant of human B-domain deleted Factor VIII
  source 1..4371: mol_type = other DNA
atgcagattgaactgtctacctgcttcttcctctgtttgctgaggttctgctttagcgccactagacggtactaccttggcgctgtggagctgtcctgggactatatgcagagtgatttgggagagcttcccgtcgacgcacgatttcctcctcgcgttccaaagtcatttccctttaacacaagcgtggtgtacaagaagacgctcttcgtcgaattcaccgatcacctgttcaatatcgccaaacccagaccaccatggatgggtcttttggggcctaccatacaagcggaggtgtatgacacagttgttatcactctcaagaacatggcttctcatccggtaagtcttcacgcagtgggcgtgtcctactggaaagcttcagaaggagccgagtatgatgatcagacatcccagagggagaaagaagacgacaaggtatttccaggtgggtctcatacctatgtgtggcaagtgctcaaagagaatggccctatggcaagcgatccgccgtgtttgacttacagctacctttcacacgttgacctcgtcaaggacctcaactccgggttgattggagccttgttggtatgcagggaaggatctcttgccaaagagaagacacagaccctccacaagtttatccttctctttgctgtgttcgatgagggcaaaagttggcatagcgaaacgaagaattccctcatgcaggatcgcgacgcagccagcgccagagcttggcccaagatgcacactgtgaacggatatgtcaataggacgcttcctggcttgattgggtgtcatcggaaaagtgtctactggcacgtgatcggaatggggacaacaccagaggtccactccatatttctcgaaggccataccttccttgttcgaaaccacagacaggcatccttggggatctctcccattacctttctcactgcccaaacgctccttatggacttgggtcagttccttctcttttgccatatcccgtcacaccagcatgatggtatggaagcttatgtgaaagtcgacagttgtcctgaggagccacagttgcgcatgaagaataatgaagaagccgaggattacgacgacgatctcaccgattctgagatggacgtggtgaggtttgatgacgacaactctccctccatcattcaagctcggagcgtggcgaagaaacaccccaagacttgggtccactatatagcggcggaagaggaggattgggattacgctcctcttgtattggcaccagatgaccgctcatacaaaagccagtacctcaacaacggaccgcagagaattggccggaagtataagaaagtgcgatttatggcctatacagacgaaacctttaagacaagggaggccatccagcatgagagtgggattttgggacctcttctttacggcgaagttggtgataccctcctcatcatcttcaagaatcaagcttctcgcccctataacatttacccacacgggatcactgacgttaggcctttgtatagcagaagacttcccaaaggcgtgaagcatctcaaagacttccccattttgccaggcgagatctttaagtacaaatggaccgtcacagtggaagatggaccgactaaatcagaccctcgatgccttacgcggtactattcctccttcgtgaatatggagagagatttggcaagcggactcataggaccactcctcatctgttacaaggaatctgtagaccagaggggtaaccagattatgagtgataaacgcaatgtgatcctttttagcgtcttcgacgagaaccggtcctggtacttgaccgagaatatacaaaggttccttcccaaccccgcaggcgttcagttggaagaccctgagtttcaggccagcaatattatgcactcaatcaacggctatgtgtttgatagtctccagctttctgtttgcctccatgaagtagcctattggtacatcttgtcaattggtgctcaaacagacttcctctccgtcttcttctccggctacacctttaagcacaagatggtgtatgaggacactctcacactctttccattttctggagaaaccgtgttcatgagcatggagaatccaggcctttggatcttgggttgccacaacagtgattttcgcaatcggggaatgactgctctcctcaaagtcagcagctgtgataagaacacaggcgactattacgaagattcttacgaggacataagtgcctactttgactccaagaataacgccattgagcccagatcattctcccagaatcctcccgtgcttaaaaggcatcagcgcgaaatcaccagaactactcttcagtctgatcaagaggagattgactatgacgacaccataagcgtggaaatgaagaaggaggatttcgatatctatgacgaagatgagaaccagtctccgcggagctttcagaagaagacgcgacactacttcattgcagcagtcgaaaggctttgggactacggtcggtcatcatcccctcatgtgttgcgcaatagagctcagagtggaagtgttccacagttcaagaaagtcgtctttcaagagtttacagatggcagcttcacacagcctctctatcggggcgagcttaacgaacatttgggactccttggtccctatatccgagccgaagtggaggacaacattatggttacctttaggaatcaagcctctcgcccctacagcttctactcctccctcatcagttatgaggaggatcagagacaaggcgctgaaccacggaagaactttgtgaaaccgaatgagacgaagacctacttctggaaagtacagcaccacatggcccccacaaaagacgaattcgattgcaaagcatgggcgtatttttcagacgttgacttggagaaagatgtacattcaggacttattggtcctttgttggtgtgtcacactaacactctcaatccagcccatggcaggcaggtgacagtccaggaattcgctcttttctttaccatctttgatgagaccaagtcctggtacttcacggaaaacatggagcgcaattgcagagccccctgtaacatacagatggaggaccctacctttaaggaaaattatcggttccacgcaatcaacggatacattatggatacactccctggccttgtgatggctcaggaccaacgaatcaggtggtacctcctcagcatgggttctaatgagaacatacactccattcacttttcaggacatgtgttcactgtccggaagaaagaagagtataagatggccctctacaatttgtatccaggcgtgtttgagaccgttgaaatgcttccctctaaagctggcatctggagagtagagtgcttgatcggagaacatcttcacgcaggtatgagcaccttgttcctcgtgtacagcaacaaatgtcagaccccacttggcatggccagtggacacattcgcgactttcagatcacagcatctggccagtatggacaatgggccccaaagttggctcgcctccattactccggtagcataaatgcgtggtccactaaagaacctttcagctggattaaggtcgatcttcttgcccccatgatcatccacggcattaagacacagggagcgaggcagaaattctcctccctctacatctcacagttcattattatgtatagtttggacggcaagaagtggcaaacttatagaggtaacagtactggaacagacatggtgttcttcggcaacgttgatagctctggcatcaaacacaacatctttaatcctcccataatagctcggtacatcagattgcatccgacccactacagcattaggagtacactccgaatggagcttatgggttgcgacttgaattcctgttcaatgccactcggaatggagtctaaagccatctctgatgcacagataaccgccagtagctactttacgaacatgtttgctacgtggtcaccctctaaggcaaggcttcatttgcaaggccggtctaatgcctggagacctcaggtgaacaacccgaaagaatggctccaggtggactttcagaagaccatgaaagtaacaggtgtcactactcagggagttaagtccttggatactagcatgtatgtgaaggagttccttatttcctcatcacaagatggccaccagtggaccctcttctttcagaatggtaaggtcaaagtgtttcagggcaatcaagacagcttcacacccgtggtgaacagtcttgatcctccactcttgacacgataccttcgaatccatccacagtcttgggagcaccagattgcattgcgcatggaagtacttggatgcgaggctcaggacctctac

SEQ ID NO: 1002 - protein, 1457 aa, synthetic construct
  REGION 1..1457: note = Variant of human B-domain deleted Factor VIII
MQIELSTCFFLCLLRFCFSATRRYYLGAVELSWDYMQSDLGELPVDARFPPRVPKSFPFNTSVVYKKTLFVEFTDHLFNIAKPRPPWMGLLGPTIQAEVYDTVVITLKNMASHPVSLHAVGVSYWKASEGAEYDDQTSQREKEDDKVFPGGSHTYVWQVLKENGPMASDPPCLTYSYLSHVDLVKDLNSGLIGALLVCREGSLAKEKTQTLHKFILLFAVFDEGKSWHSETKNSLMQDRDAASARAWPKMHTVNGYVNRTLPGLIGCHRKSVYWHVIGMGTTPEVHSIFLEGHTFLVRNHRQASLGISPITFLTAQTLLMDLGQFLLFCHIPSHQHDGMEAYVKVDSCPEEPQLRMKNNEEAEDYDDDLTDSEMDVVRFDDDNSPSIIQARSVAKKHPKTWVHYIAAEEEDWDYAPLVLAPDDRSYKSQYLNNGPQRIGRKYKKVRFMAYTDETFKTREAIQHESGILGPLLYGEVGDTLLIIFKNQASRPYNIYPHGITDVRPLYSRRLPKGVKHLKDFPILPGEIFKYKWTVTVEDGPTKSDPRCLTRYYSSFVNMERDLASGLIGPLLICYKESVDQRGNQIMSDKRNVILFSVFDENRSWYLTENIQRFLPNPAGVQLEDPEFQASNIMHSINGYVFDSLQLSVCLHEVAYWYILSIGAQTDFLSVFFSGYTFKHKMVYEDTLTLFPFSGETVFMSMENPGLWILGCHNSDFRNRGMTALLKVSSCDKNTGDYYEDSYEDISAYFDSKNNAIEPRSFSQNPPVLKRHQREITRTTLQSDQEEIDYDDTISVEMKKEDFDIYDEDENQSPRSFQKKTRHYFIAAVERLWDYGRSSSPHVLRNRAQSGSVPQFKKVVFQEFTDGSFTQPLYRGELNEHLGLLGPYIRAEVEDNIMVTFRNQASRPYSFYSSLISYEEDQRQGAEPRKNFVKPNETKTYFWKVQHHMAPTKDEFDCKAWAYFSDVDLEKDVHSGLIGPLLVCHTNTLNPAHGRQVTVQEFALFFTIFDETKSWYFTENMERNCRAPCNIQMEDPTFKENYRFHAINGYIMDTLPGLVMAQDQRIRWYLLSMGSNENIHSIHFSGHVFTVRKKEEYKMALYNLYPGVFETVEMLPSKAGIWRVECLIGEHLHAGMSTLFLVYSNKCQTPLGMASGHIRDFQITASGQYGQWAPKLARLHYSGSINAWSTKEPFSWIKVDLLAPMIIHGIKTQGARQKFSSLYISQFIIMYSLDGKKWQTYRGNSTGTDMVFFGNVDSSGIKHNIFNPPIIARYIRLHPTHYSIRSTLRMELMGCDLNSCSMPLGMESKAISDAQITASSYFTNMFATWSPSKARLHLQGRSNAWRPQVNNPKEWLQVDFQKTMKVTGVTTQGVKSLDTSMYVKEFLISSSQDGHQWTLFFQNGKVKVFQGNQDSFTPVVNSLDPPLLTRYLRIHPQSWEHQIALRMEVLGCEAQDLY

SEQ ID NO: 1003 - DNA, 4371 bp, synthetic construct
  misc_feature 1..4371: note = Variant of human B-domain deleted Factor VIII
  source 1..4371: mol_type = other DNA
atgcagattgaactgtctacctgcttcttcctctgtttgctgaggttctgctttagcgccactagacggtactaccttggcgctgtggagctgtcctgggactatatgcagagtgatttgggagagcttcccgtcgacgcacgatttcctcctcgcgttccaaagtcatttccctttaacacaagcgtggtgtacaagaagacgctcttcgtcgaattcaccgatcacctgttcaatatcgccaaacccagaccaccatggatgggtcttttggggcctaccatacaagcggaggtgtatgacacagttgttatcactctcaagaacatggcttctcatccggtaagtcttcacgcagtgggcgtgtcctactggaaagcttcagaaggagccgagtatgatgatcagacatcccagagggagaaagaagacgacaaggtatttccaggtgggtctcatacctatgtgtggcaagtgctcaaagagaatggccctatggcaagcgatccgccgtgtttgacttacagctacctttcacacgttgacctcgtcaaggacctcaactccgggttgattggagccttgttggtatgcagggaaggatctcttgccaaagagaagacacagaccctccacaagtttatccttctctttgctgtgttcgatgagggcaaaagttggcatagcgaaacgaagaattccctcatgcaggatcgcgacgcagccagcgccagagcttggcccaagatgcacactgtgaacggatatgtcaataggacgcttcctggcttgattgggtgtcatcggaaaagtgtctactggcacgtgatcggaatggggacaacaccagaggtccactccatatttctcgaaggccataccttccttgttcgaaaccacagacaggcatccttggggatctctcccattacctttctcactgcccaaacgctccttatggacttgggtcagtatcttctcttttgccatatcccgtcacaccagcatgatggtatggaagcttatgtgaaagtcgacagttgtcctgaggagccacagttgcgcatgaagaataatgaagaagccgaggattacgacgacgatctcaccgattctgagatggacgtggtgaggtttgatgacgacaactctccctccatcattcaagctcggagcgtggcgaagaaacaccccaagacttgggtccactatatagcggcggaagaggaggattgggattacgctcctcttgtattggcaccagatgaccgctcatacaaaagccagtacctcaacaacggaccgcagagaattggccggaagtataagaaagtgcgatttatggcctatacagacgaaacctttaagacaagggaggccatccagcatgagagtgggattttgggacctcttctttacggcgaagttggtgataccctcctcatcatcttcaagaatcaagcttctcgcccctataacatttacccacacgggatcactgacgttaggcctttgtatagcagaagacttcccaaaggcgtgaagcatctcaaagacttccccattttgccaggcgagatctttaagtacaaatggaccgtcacagtggaagatggaccgactaaatcagaccctcgatgccttacgcggtactattcctccttcgtgaatatggagagagatttggcaagcggactcataggaccactcctcatctgttacaaggaatctgtagaccagaggggtaaccagattatgagtgataaacgcaatgtgatcctttttagcgtcttcgacgagaaccggtcctggtacttgaccgagaatatacaaaggttccttcccaaccccgcaggcgttcagttggaagaccctgagtttcaggccagcaatattatgcactcaatcaacggctatgtgtttgatagtctccagctttctgtttgcctccatgaagtagcctattggtacatcttgtcaattggtgctcaaacagacttcctctccgtcttcttctccggctacacctttaagcacaagatggtgtatgaggacactctcacactctttccattttctggagaaaccgtgttcatgagcatggagaatccaggcctttggatcttgggttgccacaacagtgattttcgcaatcggggaatgactgctctcctcaaagtcagcagctgtgataagaacacaggcgactattacgaagattcttacgaggacataagtgcctactttgactccaagaataacgccattgagcccagatcattctcccagaatcctcccgtgcttaaaaggcatcagcgcgaaatcaccagaactactcttcagtctgatcaagaggagattgactatgacgacaccataagcgtggaaatgaagaaggaggatttcgatatctatgacgaagatgagaaccagtctccgcggagctttcagaagaagacgcgacactacttcattgcagcagtcgaaaggctttgggactacggtatgtcatcatcccctcatgtgttgcgcaatagagctcagagtggaagtgttccacagttcaagaaagtcgtctttcaagagtttacagatggcagcttcacacagcctctctatcggggcgagcttaacgaacatttgggactccttggtccctatatccgagccgaagtggaggacaacattatggttacctttaggaatcaagcctctcgcccctacagcttctactcctccctcatcagttatgaggaggatcagagacaaggcgctgaaccacggaagaactttgtgaaaccgaatgagacgaagacctacttctggaaagtacagcaccacatggcccccacaaaagacgaattcgattgcaaagcatgggcgtatttttcagacgttgacttggagaaagatgtacattcaggacttattggtcctttgttggtgtgtcacactaacactctcaatccagcccatggcaggcaggtgacagtccaggaattcgctcttttctttaccatctttgatgagaccaagtcctggtacttcacggaaaacatggagcgcaattgcagagccccctgtaacatacagatggaggaccctacctttaaggaaaattatcggttccacgcaatcaacggatacattatggatacactccctggccttgtgatggctcaggaccaacgaatcaggtggtacctcctcagcatgggttctaatgagaacatacactccattcacttttcaggacatgtgttcactgtccggaagaaagaagagtataagatggccctctacaatttgtatccaggcgtgtttgagaccgttgaaatgcttccctctaaagctggcatctggagagtagagtgcttgatcggagaacatcttcacgcaggtatgagcaccttgttcctcgtgtacagcaacaaatgtcagaccccacttggcatggccagtggacacattcgcgactttcagatcacagcatctggccagtatggacaatgggccccaaagttggctcgcctccattactccggtagcataaatgcgtggtccactaaagaacctttcagctggattaaggtcgatcttcttgcccccatgatcatccacggcattaagacacagggagcgaggcagaaattctcctccctctacatctcacagttcattattatgtatagtttggacggcaagaagtggcaaacttatagaggtaacagtactggaacagacatggtgttcttcggcaacgttgatagctctggcatcaaacacaacatctttaatcctcccataatagctcggtacatcagattgcatccgacccactacagcattaggagtacactccgaatggagcttatgggttgcgacttgaattcctgttcaatgccactcggaatggagtctaaagccatctctgatgcacagataaccgccagtagctactttacgaacatgtttgctacgtggtcaccctctaaggcaaggcttcatttgcaaggccggtctaatgcctggagacctcaggtgaacaacccgaaagaatggctccaggtggactttcagaagaccatgaaagtaacaggtgtcactactcagggagttaagtccttggatactagcatgtatgtgaaggagttccttatttcctcatcacaagatggccaccagtggaccctcttctttcagaatggtaaggtcaaagtgtttcagggcaatcaagacagcttcacacccgtggtgaacagtcttgatcctccactcttgacacgataccttcgaatccatccacagtcttgggagcaccagattgcattgcgcatggaagtacttggatgcgaggctcaggacctctac

SEQ ID NO: 1004 - protein, 1457 aa, synthetic construct
  REGION 1..1457: note = Variant of human B-domain deleted Factor VIII
MQIELSTCFFLCLLRFCFSATRRYYLGAVELSWDYMQSDLGELPVDARFPPRVPKSFPFNTSVVYKKTLFVEFTDHLFNIAKPRPPWMGLLGPTIQAEVYDTVVITLKNMASHPVSLHAVGVSYWKASEGAEYDDQTSQREKEDDKVFPGGSHTYVWQVLKENGPMASDPPCLTYSYLSHVDLVKDLNSGLIGALLVCREGSLAKEKTQTLHKFILLFAVFDEGKSWHSETKNSLMQDRDAASARAWPKMHTVNGYVNRTLPGLIGCHRKSVYWHVIGMGTTPEVHSIFLEGHTFLVRNHRQASLGISPITFLTAQTLLMDLGQYLLFCHIPSHQHDGMEAYVKVDSCPEEPQLRMKNNEEAEDYDDDLTDSEMDVVRFDDDNSPSIIQARSVAKKHPKTWVHYIAAEEEDWDYAPLVLAPDDRSYKSQYLNNGPQRIGRKYKKVRFMAYTDETFKTREAIQHESGILGPLLYGEVGDTLLIIFKNQASRPYNIYPHGITDVRPLYSRRLPKGVKHLKDFPILPGEIFKYKWTVTVEDGPTKSDPRCLTRYYSSFVNMERDLASGLIGPLLICYKESVDQRGNQIMSDKRNVILFSVFDENRSWYLTENIQRFLPNPAGVQLEDPEFQASNIMHSINGYVFDSLQLSVCLHEVAYWYILSIGAQTDFLSVFFSGYTFKHKMVYEDTLTLFPFSGETVFMSMENPGLWILGCHNSDFRNRGMTALLKVSSCDKNTGDYYEDSYEDISAYFDSKNNAIEPRSFSQNPPVLKRHQREITRTTLQSDQEEIDYDDTISVEMKKEDFDIYDEDENQSPRSFQKKTRHYFIAAVERLWDYGMSSSPHVLRNRAQSGSVPQFKKVVFQEFTDGSFTQPLYRGELNEHLGLLGPYIRAEVEDNIMVTFRNQASRPYSFYSSLISYEEDQRQGAEPRKNFVKPNETKTYFWKVQHHMAPTKDEFDCKAWAYFSDVDLEKDVHSGLIGPLLVCHTNTLNPAHGRQVTVQEFALFFTIFDETKSWYFTENMERNCRAPCNIQMEDPTFKENYRFHAINGYIMDTLPGLVMAQDQRIRWYLLSMGSNENIHSIHFSGHVFTVRKKEEYKMALYNLYPGVFETVEMLPSKAGIWRVECLIGEHLHAGMSTLFLVYSNKCQTPLGMASGHIRDFQITASGQYGQWAPKLARLHYSGSINAWSTKEPFSWIKVDLLAPMIIHGIKTQGARQKFSSLYISQFIIMYSLDGKKWQTYRGNSTGTDMVFFGNVDSSGIKHNIFNPPIIARYIRLHPTHYSIRSTLRMELMGCDLNSCSMPLGMESKAISDAQITASSYFTNMFATWSPSKARLHLQGRSNAWRPQVNNPKEWLQVDFQKTMKVTGVTTQGVKSLDTSMYVKEFLISSSQDGHQWTLFFQNGKVKVFQGNQDSFTPVVNSLDPPLLTRYLRIHPQSWEHQIALRMEVLGCEAQDLY

SEQ ID NO: 1005 - DNA, 4371 bp, synthetic construct
  misc_feature 1..4371: note = Variant of human B-domain deleted Factor VIII
  source 1..4371: mol_type = other DNA
atgcagattgaactgtctacctgcttcttcctctgtttgctgaggttctgctttagcgccactagacggtactaccttggcgctgtggagctgtcctgggactatatgcagagtgatttgggagagcttcccgtcgacgcacgatttcctcctcgcgttccaaagtcatttccctttaacacaagcgtggtgtacaagaagacgctcttcgtcgaattcaccgatcacctgttcaatatcgccaaacccagaccaccatggatgggtcttttggggcctaccatacaagcggaggtgtatgacacagttgttatcactctcaagaacatggcttctcatccggtaagtcttcacgcagtgggcgtgtcctactggaaagcttcagaaggagccgagtatgatgatcagacatcccagagggagaaagaagacgacaaggtatttccaggtgggtctcatacctatgtgtggcaagtgctcaaagagaatggccctatggcaagcgatccgccgtgtttgacttacagctacctttcacacgttgacctcgtcaaggacctcaactccgggttgattggagccttgttggtatgcagggaaggatctcttgccaaagagaagacacagaccctccacaagtttatccttctctttgctgtgttcgatgagggcaaaagttggcatagcgaaacgaagaattccctcatgcaggatcgcgacgcagccagcgccagagcttggcccaagatgcacactgtgaacggatatgtcaataggacgcttcctggcttgattgggtgtcatcggaaaagtgtctactggcacgtgatcggaatggggacaacaccagaggtccactccatatttctcgaaggccataccttccttgttcgaaaccacagacaggcatccttggggatctctcccattacctttctcactgcccaaacgctccttatggacttgggtcagttccttctcttttgccatatcccgtcacaccagcatgatggtatggaagcttatgtgaaagtcgacagttgtcctgaggagccacagttgcgcatgaagaataatgaagaagccgaggattacgacgacgatctcaccgattctgagatggacgtggtgaggtttgatgacgacaactctccctccatcattcaagctcggagcgtggcgaagaaacaccccaagacttgggtccactatatagcggcggaagaggaggattgggattacgctcctcttgtattggcaccagatgaccgctcatacaaaagccagtacctcaacaacggaccgcagagaattggccggaagtataagaaagtgcgatttatggcctatacagacgaaacctttaagacaagggaggccatccagcatgagagtgggattttgggacctcttctttacggcgaagttggtgataccctcctcatcatcttcaagaatcaagcttctcgcccctataacatttacccacacgggatcactgacgttaggcctttgtatagcagaagacttcccaaaggcgtgaagcatctcaaagacttccccattttgccaggcgagatctttaagtacaaatgggtggtcacagtggaagatggaccgactaaatcagaccctcgatgccttacgcggtactattcctccttcgtgaatatggagagagatttggcaagcggactcataggaccactcctcatctgttacaaggaatctgtagaccagaggggtaaccagattatgagtgataaacgcaatgtgatcctttttagcgtcttcgacgagaaccggtcctggtacttgaccgagaatatacaaaggttccttcccaaccccgcaggcgttcagttggaagaccctgagtttcaggccagcaatattatgcactcaatcaacggctatgtgtttgatagtctccagctttctgtttgcctccatgaagtagcctattggtacatcttgtcaattggtgctcaaacagacttcctctccgtcttcttctccggctacacctttaagcacaagatggtgtatgaggacactctcacactctttccattttctggagaaaccgtgttcatgagcatggagaatccaggcctttggatcttgggttgccacaacagtgattttcgcaatcggggaatgactgctctcctcaaagtcagcagctgtgataagaacacaggcgactattacgaagattcttacgaggacataagtgcctactttgactccaagaataacgccattgagcccagatcattctcccagaatcctcccgtgcttaaaaggcatcagcgcgaaatcaccagaactactcttcagtctgatcaagaggagattgactatgacgacaccataagcgtggaaatgaagaaggaggatttcgatatctatgacgaagatgagaaccagtctccgcggagctttcagaagaagacgcgacactacttcattgcagcagtcgaaaggctttgggactacggtatgtcatcatcccctcatgtgttgcgcaatagagctcagagtggaagtgttccacagttcaagaaagtcgtctttcaagagtttacagatggcagcttcacacagcctctctatcggggcgagcttaacgaacatttgggactccttggtccctatatccgagccgaagtggaggacaacattatggttacctttaggaatcaagcctctcgcccctacagcttctactcctccctcatcagttatgaggaggatcagagacaaggcgctgaaccacggaagaactttgtgaaaccgaatgagacgaagacctacttctggaaagtacagcaccacatggcccccacaaaagacgaattcgattgcaaagcatgggcgtatttttcagacgttgacttggagaaagatgtacattcaggacttattggtcctttgttggtgtgtcacactaacactctcaatccagcccatggcaggcaggtgacagtccaggaattcgctcttttctttaccatctttgatgagaccaagtcctggtacttcacggaaaacatggagcgcaattgcagagccccctgtaacatacagatggaggaccctacctttaaggaaaattatcggttccacgcaatcaacggatacattatggatacactccctggccttgtgatggctcaggaccaacgaatcaggtggtacctcctcagcatgggttctaatgagaacatacactccattcacttttcaggacatgtgttcactgtccggaagaaagaagagtataagatggccctctacaatttgtatccaggcgtgtttgagaccgttgaaatgcttccctctaaagctggcatctggagagtagagtgcttgatcggagaacatcttcacgcaggtatgagcaccttgttcctcgtgtacagcaacaaatgtcagaccccacttggcatggccagtggacacattcgcgactttcagatcacagcatctggccagtatggacaatgggccccaaagttggctcgcctccattactccggtagcataaatgcgtggtccactaaagaacctttcagctggattaaggtcgatcttcttgcccccatgatcatccacggcattaagacacagggagcgaggcagaaattctcctccctctacatctcacagttcattattatgtatagtttggacggcaagaagtggcaaacttatagaggtaacagtactggaacagacatggtgttcttcggcaacgttgatagctctggcatcaaacacaacatctttaatcctcccataatagctcggtacatcagattgcatccgacccactacagcattaggagtacactccgaatggagcttatgggttgcgacttgaattcctgttcaatgccactcggaatggagtctaaagccatctctgatgcacagataaccgccagtagctactttacgaacatgtttgctacgtggtcaccctctaaggcaaggcttcatttgcaaggccggtctaatgcctggagacctcaggtgaacaacccgaaagaatggctccaggtggactttcagaagaccatgaaagtaacaggtgtcactactcagggagttaagtccttggatactagcatgtatgtgaaggagttccttatttcctcatcacaagatggccaccagtggaccctcttctttcagaatggtaaggtcaaagtgtttcagggcaatcaagacagcttcacacccgtggtgaacagtcttgatcctccactcttgacacgataccttcgaatccatccacagtcttgggagcaccagattgcattgcgcatggaagtacttggatgcgaggctcaggacctctac

SEQ ID NO: 1006 - protein, 1457 aa, synthetic construct
  REGION 1..1457: note = Variant of human B-domain deleted Factor VIII
MQIELSTCFFLCLLRFCFSATRRYYLGAVELSWDYMQSDLGELPVDARFPPRVPKSFPFNTSVVYKKTLFVEFTDHLFNIAKPRPPWMGLLGPTIQAEVYDTVVITLKNMASHPVSLHAVGVSYWKASEGAEYDDQTSQREKEDDKVFPGGSHTYVWQVLKENGPMASDPPCLTYSYLSHVDLVKDLNSGLIGALLVCREGSLAKEKTQTLHKFILLFAVFDEGKSWHSETKNSLMQDRDAASARAWPKMHTVNGYVNRTLPGLIGCHRKSVYWHVIGMGTTPEVHSIFLEGHTFLVRNHRQASLGISPITFLTAQTLLMDLGQFLLFCHIPSHQHDGMEAYVKVDSCPEEPQLRMKNNEEAEDYDDDLTDSEMDVVRFDDDNSPSIIQARSVAKKHPKTWVHYIAAEEEDWDYAPLVLAPDDRSYKSQYLNNGPQRIGRKYKKVRFMAYTDETFKTREAIQHESGILGPLLYGEVGDTLLIIFKNQASRPYNIYPHGITDVRPLYSRRLPKGVKHLKDFPILPGEIFKYKWVVTVEDGPTKSDPRCLTRYYSSFVNMERDLASGLIGPLLICYKESVDQRGNQIMSDKRNVILFSVFDENRSWYLTENIQRFLPNPAGVQLEDPEFQASNIMHSINGYVFDSLQLSVCLHEVAYWYILSIGAQTDFLSVFFSGYTFKHKMVYEDTLTLFPFSGETVFMSMENPGLWILGCHNSDFRNRGMTALLKVSSCDKNTGDYYEDSYEDISAYFDSKNNAIEPRSFSQNPPVLKRHQREITRTTLQSDQEEIDYDDTISVEMKKEDFDIYDEDENQSPRSFQKKTRHYFIAAVERLWDYGMSSSPHVLRNRAQSGSVPQFKKVVFQEFTDGSFTQPLYRGELNEHLGLLGPYIRAEVEDNIMVTFRNQASRPYSFYSSLISYEEDQRQGAEPRKNFVKPNETKTYFWKVQHHMAPTKDEFDCKAWAYFSDVDLEKDVHSGLIGPLLVCHTNTLNPAHGRQVTVQEFALFFTIFDETKSWYFTENMERNCRAPCNIQMEDPTFKENYRFHAINGYIMDTLPGLVMAQDQRIRWYLLSMGSNENIHSIHFSGHVFTVRKKEEYKMALYNLYPGVFETVEMLPSKAGIWRVECLIGEHLHAGMSTLFLVYSNKCQTPLGMASGHIRDFQITASGQYGQWAPKLARLHYSGSINAWSTKEPFSWIKVDLLAPMIIHGIKTQGARQKFSSLYISQFIIMYSLDGKKWQTYRGNSTGTDMVFFGNVDSSGIKHNIFNPPIIARYIRLHPTHYSIRSTLRMELMGCDLNSCSMPLGMESKAISDAQITASSYFTNMFATWSPSKARLHLQGRSNAWRPQVNNPKEWLQVDFQKTMKVTGVTTQGVKSLDTSMYVKEFLISSSQDGHQWTLFFQNGKVKVFQGNQDSFTPVVNSLDPPLLTRYLRIHPQSWEHQIALRMEVLGCEAQDLY

SEQ ID NO: 1007 - DNA, 4371 bp, synthetic construct
  misc_feature 1..4371: note = Variant of human B-domain deleted Factor VIII
  source 1..4371: mol_type = other DNA
atgcagattgaactgtctacctgcttcttcctctgtttgctgaggttctgctttggggccactagacggtactaccttggcgctgtggagctgtcctgggactatatgcagagtgatttgggagagcttcccgtcgacgcacgatttcctcctcgcgttccaaagtcatttccctttaacacaagcgtggtgtacaagaagacgctcttcgtcgaattcaccgatcacctgttcaatatcgccaaacccagaccaccatggatgggtcttttggggcctaccatacaagcggaggtgtatgacacagttgttatcactctcaagaacatggcttctcatccggtaagtcttcacgcagtgggcgtgtcctactggaaagcttcagaaggagccgagtatgatgatcagacatcccagagggagaaagaagacgacaaggtatttccaggtgggtctcatacctatgtgtggcaagtgctcaaagagaatggccctatggcaagcgatccgccgtgtttgacttacagctacctttcacacgttgacctcgtcaaggacctcaactccgggttgattggagccttgttggtatgcagggaaggatctcttgccaaagagaagacacagaccctccacaagtttatccttctctttgctgtgttcgatgagggcaaaagttggcatagcgaaacgaagaattccctcatgcaggatcgcgacgcagccagcgccagagcttggcccaagatgcacactgtgaacggatatgtcaataggacgcttcctggcttgattgggtgtcatcggaaaagtgtctactggcacgtgatcggaatggggacaacaccagaggtccactccatatttctcgaaggccataccttccttgttcgaaaccacagacaggcatccttggggatctctcccattacctttctcactgcccaaacgctccttatggacttgggtcagttccttctcttttgccatatcccgtcacaccagcatgatggtatggaagcttatgtgaaagtcgacagttgtcctgaggagccacagttgcgcatgaagaataatgaagaagccgaggattacgacgacgatctcaccgattctgagatggacgtggtgaggtttgatgacgacaactctccctccatcattcaagctcggagcgtggcgaagaaacaccccaagacttgggtccactatatagcggcggaagaggaggattgggattacgctcctcttgtattggcaccagatgaccgctcatacaaaagccagtacctcaacaacggaccgcagagaattggccggaagtataagaaagtgcgatttatggcctatacagacgaaacctttaagacaagggaggccatccagcatgagagtgggattttgggacctcttctttacggcgaagttggtgataccctcctcatcatcttcaagaatcaagcttctcgcccctataacatttacccacacgggatcactgacgttaggcctttgtatagcagaagacttcccaaaggcgtgaagcatctcaaagacttccccattttgccaggcgagatctttaagtacaaatggaccgtcacagtggaagatggaccgactaaatcagaccctcgatgccttacgcggtactattcctccttcgtgaatatggagagagatttggcaagcggactcataggaccactcctcatctgttacaaggaatctgtagaccagaggggtaaccagattatgagtgataaacgcaatgtgatcctttttagcgtcttcgacgagaaccggtcctggtacttgaccgagaatatacaaaggttccttcccaaccccgcaggcgttcagttggaagaccctgagtttcaggccagcaatattatgcactcaatcaacggctatgtgtttgatagtctccagctttctgtttgcctccatgaagtagcctattggtacatcttgtcaattggtgctcaaacagacttcctctccgtcttcttctccggctacacctttaagcacaagatggtgtatgaggacactctcacactctttccattttctggagaaaccgtgttcatgagcatggagaatccaggcctttggatcttgggttgccacaacagtgattttcgcaatcggggaatgactgctctcctcaaagtcagcagctgtgataagaacacaggcgactattacgaagattcttacgaggacataagtgcctactttgactccaagaataacgccattgagcccagatcattctcccagaatcctcccgtgcttaaaaggcatcagcgcgaaatcaccagaactactcttcagtctgatcaagaggagattgactatgacgacaccataagcgtggaaatgaagaaggaggatttcgatatctatgacgaagatgagaaccagtctccgcggagctttcagaagaagacgcgacactacttcattgcagcagtcgaaaggctttgggactacggtatgtcatcatcccctcatgtgttgcgcaatagagctcagagtggaagtgttccacagttcaagaaagtcgtctttcaagagtttacagatggcagcttcacacagcctctctatcggggcgagcttaacgaacatttgggactccttggtccctatatccgagccgaagtggaggacaacattatggttacctttaggaatcaagcctctcgcccctacagcttctactcctccctcatcagttatgaggaggatcagagacaaggcgctgaaccacggaagaactttgtgaaaccgaatgagacgaagacctacttctggaaagtacagcaccacatggcccccacaaaagacgaattcgattgcaaagcatgggcgtatttttcagacgttgacttggagaaagatgtacattcaggacttattggtcctttgttggtgtgtcacactaacactctcaatccagcccatggcaggcaggtgacagtccaggaattcgctcttttctttaccatctttgatgagaccaagtcctggtacttcacggaaaacatggagcgcaattgcagagccccctgtaacatacagatggaggaccctacctttaaggaaaattatcggttccacgcaatcaacggatacattatggatacactccctggccttgtgatggctcaggaccaacgaatcaggtggtacctcctcagcatgggttctaatgagaacatacactccattcacttttcaggacatgtgttcactgtccggaagaaagaagagtataagatggccctctacaatttgtatccaggcgtgtttgagaccgttgaaatgcttccctctaaagctggcatctggagagtagagtgcttgatcggagaacatcttcacgcaggtatgagcaccttgttcctcgtgtacagcaacaaatgtcagaccccacttggcatggccagtggacacattcgcgactttcagatcacagcatctggccagtatggacaatgggccccaaagttggctcgcctccattactccggtagcataaatgcgtggtccactaaagaacctttcagctggattaaggtcgatcttcttgcccccatgatcatccacggcattaagacacagggagcgaggcagaaattctcctccctctacatctcacagttcattattatgtatagtttggacggcaagaagtggcaaacttatagaggtaacagtactggaacagacatggtgttcttcggcaacgttgatagctctggcatcaaacacaacatctttaatcctcccataatagctcggtacatcagattgcatccgacccactacagcattaggagtacactccgaatggagcttatgggttgcgacttgaattcctgttcaatgccactcggaatggagtctaaagccatctctgatgcacagataaccgccagtagctactttacgaacatgtttgctacgtggtcaccctctaaggcaaggcttcatttgcaaggccggtctaatgcctggagacctcaggtgaacaacccgaaagaatggctccaggtggactttcagaagaccatgaaagtaacaggtgtcactactcagggagttaagtccttggatactagcatgtatgtgaaggagttccttatttcctcatcacaagatggccaccagtggaccctcttctttcagaatggtaaggtcaaagtgtttcagggcaatcaagacagcttcacacccgtggtgaacagtcttgatcctccactcttgacacgataccttcgaatccatccacagtcttgggagcaccagattgcattgcgcatggaagtacttggatgcgaggctcaggacctctac

SEQ ID NO: 1008 - protein, 1457 aa, synthetic construct
  REGION 1..1457: note = Variant of human B-domain deleted Factor VIII
MQIELSTCFFLCLLRFCFGATRRYYLGAVELSWDYMQSDLGELPVDARFPPRVPKSFPFNTSVVYKKTLFVEFTDHLFNIAKPRPPWMGLLGPTIQAEVYDTVVITLKNMASHPVSLHAVGVSYWKASEGAEYDDQTSQREKEDDKVFPGGSHTYVWQVLKENGPMASDPPCLTYSYLSHVDLVKDLNSGLIGALLVCREGSLAKEKTQTLHKFILLFAVFDEGKSWHSETKNSLMQDRDAASARAWPKMHTVNGYVNRTLPGLIGCHRKSVYWHVIGMGTTPEVHSIFLEGHTFLVRNHRQASLGISPITFLTAQTLLMDLGQFLLFCHIPSHQHDGMEAYVKVDSCPEEPQLRMKNNEEAEDYDDDLTDSEMDVVRFDDDNSPSIIQARSVAKKHPKTWVHYIAAEEEDWDYAPLVLAPDDRSYKSQYLNNGPQRIGRKYKKVRFMAYTDETFKTREAIQHESGILGPLLYGEVGDTLLIIFKNQASRPYNIYPHGITDVRPLYSRRLPKGVKHLKDFPILPGEIFKYKWTVTVEDGPTKSDPRCLTRYYSSFVNMERDLASGLIGPLLICYKESVDQRGNQIMSDKRNVILFSVFDENRSWYLTENIQRFLPNPAGVQLEDPEFQASNIMHSINGYVFDSLQLSVCLHEVAYWYILSIGAQTDFLSVFFSGYTFKHKMVYEDTLTLFPFSGETVFMSMENPGLWILGCHNSDFRNRGMTALLKVSSCDKNTGDYYEDSYEDISAYFDSKNNAIEPRSFSQNPPVLKRHQREITRTTLQSDQEEIDYDDTISVEMKKEDFDIYDEDENQSPRSFQKKTRHYFIAAVERLWDYGMSSSPHVLRNRAQSGSVPQFKKVVFQEFTDGSFTQPLYRGELNEHLGLLGPYIRAEVEDNIMVTFRNQASRPYSFYSSLISYEEDQRQGAEPRKNFVKPNETKTYFWKVQHHMAPTKDEFDCKAWAYFSDVDLEKDVHSGLIGPLLVCHTNTLNPAHGRQVTVQEFALFFTIFDETKSWYFTENMERNCRAPCNIQMEDPTFKENYRFHAINGYIMDTLPGLVMAQDQRIRWYLLSMGSNENIHSIHFSGHVFTVRKKEEYKMALYNLYPGVFETVEMLPSKAGIWRVECLIGEHLHAGMSTLFLVYSNKCQTPLGMASGHIRDFQITASGQYGQWAPKLARLHYSGSINAWSTKEPFSWIKVDLLAPMIIHGIKTQGARQKFSSLYISQFIIMYSLDGKKWQTYRGNSTGTDMVFFGNVDSSGIKHNIFNPPIIARYIRLHPTHYSIRSTLRMELMGCDLNSCSMPLGMESKAISDAQITASSYFTNMFATWSPSKARLHLQGRSNAWRPQVNNPKEWLQVDFQKTMKVTGVTTQGVKSLDTSMYVKEFLISSSQDGHQWTLFFQNGKVKVFQGNQDSFTPVVNSLDPPLLTRYLRIHPQSWEHQIALRMEVLGCEAQDLY

SEQ ID NO: 1009 - DNA, 4371 bp, synthetic construct
  misc_feature 1..4371: note = Variant of human B-domain deleted Factor VIII
  source 1..4371: mol_type = other DNA
atgcagattgaactgtctacctgcttcttcctctgtttggtgaggttctgctttagcgccactagacggtactaccttggcgctgtggagctgtcctgggactatatgcagagtgatttgggagagcttcccgtcgacgcacgatttcctcctcgcgttccaaagtcatttccctttaacacaagcgtggtgtacaagaagacgctcttcgtcgaattcaccgatcacctgttcaatatcgccaaacccagaccaccatggatgggtcttttggggcctaccatacaagcggaggtgtatgacacagttgttatcactctcaagaacatggcttctcatccggtaagtcttcacgcagtgggcgtgtcctactggaaagcttcagaaggagccgagtatgatgatcagacatcccagagggagaaagaagacgacaaggtatttccaggtgggtctcatacctatgtgtggcaagtgctcaaagagaatggccctatggcaagcgatccgccgtgtttgacttacagctacctttcacacgttgacctcgtcaaggacctcaactccgggttgattggagccttgttggtatgcagggaaggatctcttgccaaagagaagacacagaccctccacaagtttatccttctctttgctgtgttcgatgagggcaaaagttggcatagcgaaacgaagaattccctcatgcaggatcgcgacgcagccagcgccagagcttggcccaagatgcacactgtgaacggatatgtcaataggacgcttcctggcttgattgggtgtcatcggaaaagtgtctactggcacgtgatcggaatggggacaacaccagaggtccactccatatttctcgaaggccataccttccttgttcgaaaccacagacaggcatccttggggatctctcccattacctttctcactgcccaaacgctccttatggacttgggtcagttccttctcttttgccatatcccgtcacaccagcatgatggtatggaagcttatgtgaaagtcgacagttgtcctgaggagccacagttgcgcatgaagaataatgaagaagccgaggattacgacgacgatctcaccgattctgagatggacgtggtgaggtttgatgacgacaactctccctccatcattcaagctcggagcgtggcgaagaaacaccccaagacttgggtccactatatagcggcggaagaggaggattgggattacgctcctcttgtattggcaccagatgaccgctcatacaaaagccagtacctcaacaacggaccgcagagaattggccggaagtataagaaagtgcgatttatggcctatacagacgaaacctttaagacaagggaggccatccagcatgagagtgggattttgggacctcttctttacggcgaagttggtgataccctcctcatcatcttcaagaatcaagcttctcgcccctataacatttacccacacgggatcactgacgttaggcctttgtatagcagaagacttcccaaaggcgtgaagcatctcaaagacttccccattttgccaggcgagatctttaagtacaaatggaccgtcacagtggaagatggaccgactaaatcagaccctcgatgccttacgcggtactattcctccttcgtgaatatggagagagatttggcaagcggactcataggaccactcctcatctgttacaaggaatctgtagaccagaggggtaaccagattatgagtgataaacgcaatgtgatcctttttagcgtcttcgacgagaaccggtcctggtacttgaccgagaatatacaaaggttccttcccaaccccgcaggcgttcagttggaagaccctgagtttcaggccagcaatattatgcactcaatcaacggctatgtgtttgatagtctccagctttctgtttgcctccatgaagtagcctattggtacatcttgtcaattggtgctcaaacagacttcctctccgtcttcttctccggctacacctttaagcacaagatggtgtatgaggacactctcacactctttccattttctggagaaaccgtgttcatgagcatggagaatccaggcctttggatcttgggttgccacaacagtgattttcgcaatcggggaatgactgctctcctcaaagtcagcagctgtgataagaacacaggcgactattacgaagattcttacgaggacataagtgcctactttgactccaagaataacgccattgagcccagatcattctcccagaatcctcccgtgcttaaaaggcatcagcgcgaaatcaccagaactactcttcagtctgatcaagaggagattgactatgacgacaccataagcgtggaaatgaagaaggaggatttcgatatctatgacgaagatgagaaccagtctccgcggagctttcagaagaagacgcgacactacttcattgcagcagtcgaaaggctttgggactacggtatgtcatcatcccctcatgtgttgcgcaatagagctcagagtggaagtgttccacagttcaagaaagtcgtctttcaagagtttacagatggcagcttcacacagcctctctatcggggcgagcttaacgaacatttgggactccttggtccctatatccgagccgaagtggaggacaacattatggttacctttaggaatcaagcctctcgcccctacagcttctactcctccctcatcagttatgaggaggatcagagacaaggcgctgaaccacggaagaactttgtgaaaccgaatgagacgaagacctacttctggaaagtacagcaccacatggcccccacaaaagacgaattcgattgcaaagcatgggcgtatttttcagacgttgacttggagaaagatgtacattcaggacttattggtcctttgttggtgtgtcacactaacactctcaatccagcccatggcaggcaggtgacagtccaggaattcgctcttttctttaccatctttgatgagaccaagtcctggtacttcacggaaaacatggagcgcaattgcagagccccctgtaacatacagatggaggaccctacctttaaggaaaattatcggttccacgcaatcaacggatacattatggatacactccctggccttgtgatggctcaggaccaacgaatcaggtggtacctcctcagcatgggttctaatgagaacatacactccattcacttttcaggacatgtgttcactgtccggaagaaagaagagtataagatggccctctacaatttgtatccaggcgtgtttgagaccgttgaaatgcttccctctaaagctggcatctggagagtagagtgcttgatcggagaacatcttcacgcaggtatgagcaccttgttcctcgtgtacagcaacaaatgtcagaccccacttggcatggccagtggacacattcgcgactttcagatcacagcatctggccagtatggacaatgggccccaaagttggctcgcctccattactccggtagcataaatgcgtggtccactaaagaacctttcagctggattaaggtcgatcttcttgcccccatgatcatccacggcattaagacacagggagcgaggcagaaattctcctccctctacatctcacagttcattattatgtatagtttggacggcaagaagtggcaaacttatagaggtaacagtactggaacagacatggtgttcttcggcaacgttgatagctctggcatcaaacacaacatctttaatcctcccataatagctcggtacatcagattgcatccgacccactacagcattaggagtacactccgaatggagcttatgggttgcgacttgaattcctgttcaatgccactcggaatggagtctaaagccatctctgatgcacagataaccgccagtagctactttacgaacatgtttgctacgtggtcaccctctaaggcaaggcttcatttgcaaggccggtctaatgcctggagacctcaggtgaacaacccgaaagaatggctccaggtggactttcagaagaccatgaaagtaacaggtgtcactactcagggagttaagtccttggatactagcatgtatgtgaaggagttccttatttcctcatcacaagatggccaccagtggaccctcttctttcagaatggtaaggtcaaagtgtttcagggcaatcaagacagcttcacacccgtggtgaacagtcttgatcctccactcttgacacgataccttcgaatccatccacagtcttgggagcaccagattgcattgcgcatggaagtacttggatgcgaggctcaggacctctac

SEQ ID NO: 1010 - protein, 1457 aa, synthetic construct
  REGION 1..1457: note = Variant of human B-domain deleted Factor VIII
MQIELSTCFFLCLVRFCFSATRRYYLGAVELSWDYMQSDLGELPVDARFPPRVPKSFPFNTSVVYKKTLFVEFTDHLFNIAKPRPPWMGLLGPTIQAEVYDTVVITLKNMASHPVSLHAVGVSYWKASEGAEYDDQTSQREKEDDKVFPGGSHTYVWQVLKENGPMASDPPCLTYSYLSHVDLVKDLNSGLIGALLVCREGSLAKEKTQTLHKFILLFAVFDEGKSWHSETKNSLMQDRDAASARAWPKMHTVNGYVNRTLPGLIGCHRKSVYWHVIGMGTTPEVHSIFLEGHTFLVRNHRQASLGISPITFLTAQTLLMDLGQFLLFCHIPSHQHDGMEAYVKVDSCPEEPQLRMKNNEEAEDYDDDLTDSEMDVVRFDDDNSPSIIQARSVAKKHPKTWVHYIAAEEEDWDYAPLVLAPDDRSYKSQYLNNGPQRIGRKYKKVRFMAYTDETFKTREAIQHESGILGPLLYGEVGDTLLIIFKNQASRPYNIYPHGITDVRPLYSRRLPKGVKHLKDFPILPGEIFKYKWTVTVEDGPTKSDPRCLTRYYSSFVNMERDLASGLIGPLLICYKESVDQRGNQIMSDKRNVILFSVFDENRSWYLTENIQRFLPNPAGVQLEDPEFQASNIMHSINGYVFDSLQLSVCLHEVAYWYILSIGAQTDFLSVFFSGYTFKHKMVYEDTLTLFPFSGETVFMSMENPGLWILGCHNSDFRNRGMTALLKVSSCDKNTGDYYEDSYEDISAYFDSKNNAIEPRSFSQNPPVLKRHQREITRTTLQSDQEEIDYDDTISVEMKKEDFDIYDEDENQSPRSFQKKTRHYFIAAVERLWDYGMSSSPHVLRNRAQSGSVPQFKKVVFQEFTDGSFTQPLYRGELNEHLGLLGPYIRAEVEDNIMVTFRNQASRPYSFYSSLISYEEDQRQGAEPRKNFVKPNETKTYFWKVQHHMAPTKDEFDCKAWAYFSDVDLEKDVHSGLIGPLLVCHTNTLNPAHGRQVTVQEFALFFTIFDETKSWYFTENMERNCRAPCNIQMEDPTFKENYRFHAINGYIMDTLPGLVMAQDQRIRWYLLSMGSNENIHSIHFSGHVFTVRKKEEYKMALYNLYPGVFETVEMLPSKAGIWRVECLIGEHLHAGMSTLFLVYSNKCQTPLGMASGHIRDFQITASGQYGQWAPKLARLHYSGSINAWSTKEPFSWIKVDLLAPMIIHGIKTQGARQKFSSLYISQFIIMYSLDGKKWQTYRGNSTGTDMVFFGNVDSSGIKHNIFNPPIIARYIRLHPTHYSIRSTLRMELMGCDLNSCSMPLGMESKAISDAQITASSYFTNMFATWSPSKARLHLQGRSNAWRPQVNNPKEWLQVDFQKTMKVTGVTTQGVKSLDTSMYVKEFLISSSQDGHQWTLFFQNGKVKVFQGNQDSFTPVVNSLDPPLLTRYLRIHPQSWEHQIALRMEVLGCEAQDLY

SEQ ID NO: 1011 - DNA, 4371 bp, synthetic construct
  misc_feature 1..4371: note = Variant of human B-domain deleted Factor VIII
  source 1..4371: mol_type = other DNA
atgcagattgaactgtctacctgcttcttcctctgtttgctgaggttctgctttagcgccactagacggtactaccttggcgctgtggagctgtcctgggactatatgcagagtgatttgggagagcttcccgtcgacgcacgatttcctcctcgcgttccaaagtcatttccctttaacacaagcgtggtgtacaagaagacgctcttcgtcgaattcaccgatcacctgttcaatatcgccaaacccagaccaccatggatgggtcttttggggcctaccatacaagcggaggtgtatgacacagttgttatcactctcaagaacatggcttctcatccggtaagtcttcacgcagtgggcgtgtcctactggaaagcttcagaaggagccgagtatgatgatcagacatcccagagggagaaagaagacgacaaggtatttccaggtgggtctcatacctatgtgtggcaagtgctcaaagagaatggccctatggcaagcgatccgccgtgtttgacttacagctacctttcacacgttgacctcgtcaaggacctcaactccgggttgattggagccttgttggtatgcagggaaggatctcttgccaaagagaagacacagaccctccacaagtttatccttctctttgctgtgttcgatgagggcaaaagttggcatagcgaaacgaagaattccctcatgcaggatcgcgacgcagccagcgccagagcttggcccaagatgcacactgtgaacggatatgtcaataggacgcttcctggcttgattgggtgtcatcggaaaagtgtctactggcacgtgatcggaatggggacaacaccagaggtccactccatatttctcgaaggccataccttccttgttcgaaaccacagacaggcatccttggggatctctcccattacctttctcactgcccaaacgctccttatggacttgggtcagttccttctcttttgccatatcccgtcacaccagcatgatggtatggaagcttatgtgaaagtcgacagttgtcctgaggagccacagttgcgcatgaagaataatgaagaagccgaggattacgacgacgatctcaccgattctgagatggacgtggtgaggtttgatgacgacaactctccctccatcattcaagctcggagcgtggcgaagaaacaccccaagacttgggtccactatatagcggcggaagaggaggattgggattacgctcctcttgtattggcaccagatgaccgctcatacaaaagccagtacctcaacaacggaccgcagagaattggccggaagtataagaaagtgcgatttatggcctatacagacgaaacctttaagacaagggaggccatccagcatgagagtgggattttgggacctcttctttacggcgaagttggtgataccctcctcatcatcttcaagaatcaagcttctcgcccctataacatttacccacacgggatcactgacgttaggcctttgtatagcagaagacttcccaaaggcgtgaagcatctcaaagacttccccattttgccaggcgagatctttaagtacaaatggaccgtcacagtggaagatggaccgactaaatcagaccctcgatgccttacgcggtactattcctccttcgtgaatatggagagagatttggcaagcggactcataggaccactcctcatctgttacaaggaatctgtagaccagaggggtaaccagattatgagtgataaacgcaatgtgatcctttttagcgtcttcgacgagaaccggtcctggtacttgaccgagaatatacaaaggttccttcccaaccccgcaggcgttcagttggaagaccctgagtttcaggccagcaatattatgcactcaatcaacggctatgtgtttgatagtctccagctttctgtttgcctccatgaagtagcctattggtacatcttgtcaattggtgctcaaacagacttcctctccgtcttcttctccggctacacctttaagcacaagatggtgtatgaggacactctcacactctttccattttctggagaaaccgtgttcatgagcatggagaatccaggcctttggatcttgggttgccacaacagtgattttcgcaatcggggaatgactgctctcctcaaagtcagcagctgtgataagaacacaggcgactattacgaagattcttacgaggacataagtgcctactttgactccaagaataacgccattgagcccagatcattctcccagaatcctcccgtgcttaaaaggcatcagcgcgaaatcaccagaactactcttcagtctgatcaagaggagattgactatgacgacaccataagcgtggaaatgaagaaggaggatttcgatatctatgacgaagatgagaaccagtctccgcggagctttgataagaagacgcgacactacttcattgcagcagtcgaaaggctttgggactacggtatgtcatcatcccctcatgtgttgcgcaatagagctcagagtggaagtgttccacagttcaagaaagtcgtctttcaagagtttacagatggcagcttcacacagcctctctatcggggcgagcttaacgaacatttgggactccttggtccctatatccgagccgaagtggaggacaacattatggttacctttaggaatcaagcctctcgcccctacagcttctactcctccctcatcagttatgaggaggatcagagacaaggcgctgaaccacggaagaactttgtgaaaccgaatgagacgaagacctacttctggaaagtacagcaccacatggcccccacaaaagacgaattcgattgcaaagcatgggcgtatttttcagacgttgacttggagaaagatgtacattcaggacttattggtcctttgttggtgtgtcacactaacactctcaatccagcccatggcaggcaggtgacagtccaggaattcgctcttttctttaccatctttgatgagaccaagtcctggtacttcacggaaaacatggagcgcaattgcagagccccctgtaacatacagatggaggaccctacctttaaggaaaattatcggttccacgcaatcaacggatacattatggatacactccctggccttgtgatggctcaggaccaacgaatcaggtggtacctcctcagcatgggttctaatgagaacatacactccattcacttttcaggacatgtgttcactgtccggaagaaagaagagtataagatggccctctacaatttgtatccaggcgtgtttgagaccgttgaaatgcttccctctaaagctggcatctggagagtagagtgcttgatcggagaacatcttcacgcaggtatgagcaccttgttcctcgtgtacagcaacaaatgtcagaccccacttggcatggccagtggacacattcgcgactttcagatcacagcatctggccagtatggacaatgggccccaaagttggctcgcctccattactccggtagcataaatgcgtggtccactaaagaacctttcagctggattaaggtcgatcttcttgcccccatgatcatccacggcattaagacacagggagcgaggcagaaattctcctccctctacatctcacagttcattattatgtatagtttggacggcaagaagtggcaaacttatagaggtaacagtactggaacagacatggtgttcttcggcaacgttgatagctctggcatcaaacacaacatctttaatcctcccataatagctcggtacatcagattgcatccgacccactacagcattaggagtacactccgaatggagcttatgggttgcgacttgaattcctgttcaatgccactcggaatggagtctaaagccatctctgatgcacagataaccgccagtagctactttacgaacatgtttgctacgtggtcaccctctaaggcaaggcttcatttgcaaggccggtctaatgcctggagacctcaggtgaacaacccgaaagaatggctccaggtggactttcagaagaccatgaaagtaacaggtgtcactactcagggagttaagtccttggatactagcatgtatgtgaaggagttccttatttcctcatcacaagatggccaccagtggaccctcttctttcagaatggtaaggtcaaagtgtttcagggcaatcaagacagcttcacacccgtggtgaacagtcttgatcctccactcttgacacgataccttcgaatccatccacagtcttgggagcaccagattgcattgcgcatggaagtacttggatgcgaggctcaggacctctac

SEQ ID NO: 1012 - protein, 1457 aa, synthetic construct
  REGION 1..1457: note = Variant of human B-domain deleted Factor VIII
MQIELSTCFFLCLLRFCFSATRRYYLGAVELSWDYMQSDLGELPVDARFPPRVPKSFPFNTSVVYKKTLFVEFTDHLFNIAKPRPPWMGLLGPTIQAEVYDTVVITLKNMASHPVSLHAVGVSYWKASEGAEYDDQTSQREKEDDKVFPGGSHTYVWQVLKENGPMASDPPCLTYSYLSHVDLVKDLNSGLIGALLVCREGSLAKEKTQTLHKFILLFAVFDEGKSWHSETKNSLMQDRDAASARAWPKMHTVNGYVNRTLPGLIGCHRKSVYWHVIGMGTTPEVHSIFLEGHTFLVRNHRQASLGISPITFLTAQTLLMDLGQFLLFCHIPSHQHDGMEAYVKVDSCPEEPQLRMKNNEEAEDYDDDLTDSEMDVVRFDDDNSPSIIQARSVAKKHPKTWVHYIAAEEEDWDYAPLVLAPDDRSYKSQYLNNGPQRIGRKYKKVRFMAYTDETFKTREAIQHESGILGPLLYGEVGDTLLIIFKNQASRPYNIYPHGITDVRPLYSRRLPKGVKHLKDFPILPGEIFKYKWTVTVEDGPTKSDPRCLTRYYSSFVNMERDLASGLIGPLLICYKESVDQRGNQIMSDKRNVILFSVFDENRSWYLTENIQRFLPNPAGVQLEDPEFQASNIMHSINGYVFDSLQLSVCLHEVAYWYILSIGAQTDFLSVFFSGYTFKHKMVYEDTLTLFPFSGETVFMSMENPGLWILGCHNSDFRNRGMTALLKVSSCDKNTGDYYEDSYEDISAYFDSKNNAIEPRSFSQNPPVLKRHQREITRTTLQSDQEEIDYDDTISVEMKKEDFDIYDEDENQSPRSFDKKTRHYFIAAVERLWDYGMSSSPHVLRNRAQSGSVPQFKKVVFQEFTDGSFTQPLYRGELNEHLGLLGPYIRAEVEDNIMVTFRNQASRPYSFYSSLISYEEDQRQGAEPRKNFVKPNETKTYFWKVQHHMAPTKDEFDCKAWAYFSDVDLEKDVHSGLIGPLLVCHTNTLNPAHGRQVTVQEFALFFTIFDETKSWYFTENMERNCRAPCNIQMEDPTFKENYRFHAINGYIMDTLPGLVMAQDQRIRWYLLSMGSNENIHSIHFSGHVFTVRKKEEYKMALYNLYPGVFETVEMLPSKAGIWRVECLIGEHLHAGMSTLFLVYSNKCQTPLGMASGHIRDFQITASGQYGQWAPKLARLHYSGSINAWSTKEPFSWIKVDLLAPMIIHGIKTQGARQKFSSLYISQFIIMYSLDGKKWQTYRGNSTGTDMVFFGNVDSSGIKHNIFNPPIIARYIRLHPTHYSIRSTLRMELMGCDLNSCSMPLGMESKAISDAQITASSYFTNMFATWSPSKARLHLQGRSNAWRPQVNNPKEWLQVDFQKTMKVTGVTTQGVKSLDTSMYVKEFLISSSQDGHQWTLFFQNGKVKVFQGNQDSFTPVVNSLDPPLLTRYLRIHPQSWEHQIALRMEVLGCEAQDLY

SEQ ID NO: 1013 - DNA, 4371 bp, synthetic construct
  misc_feature 1..4371: note = Variant of human B-domain deleted Factor VIII
  source 1..4371: mol_type = other DNA
atgcagattgaactgtctacctgcttcttcctctgtttgctgaggttctgctttagcgccactagacggtactaccttggcgctgtggagctgtcctgggactatatgcagagtgatttgggagagcttcccgtcgacgcacgatttcctcctcgcgttccaaagtcatttccctttaacacaagcgtggtgtacaagaagacgctcttcgtcgaattcaccgatcacctgttcaatatcgccaaacccagaccaccatggatgggtcttttggggcctaccatacaagcggaggtgtatgacacagttgttatcactctcaagaacatggcttctcatccggtaagtcttcacgcagtgggcgtgtcctactggaaagcttcagaaggagccgagtatgatgatcagacatcccagagggagaaagaagacgacaaggtatttccaggtgggtctcatacctatgtgtggcaagtgctcaaagagaatggccctatggcaagcgatccgccgtgtttgacttacagctacctttcacacgttgacctcgtcaaggacctcaactccgggttgattggagccttgttggtatgcagggaaggatctcttgccaaagagaagacacagaccctccacaagtttatccttctctttgctgtgttcgatgagggcaaaagttggcatagcgaaacgaagaattccctcatgcaggatcgcgacgcagccagcgccagagcttggcccaagatgcacactgtgaacggatatgtcaataggacgcttcctggcttgattgggtgtcatcggaaaagtgtctactggcacgtgatcggaatggggacaacaccagaggtccactccatatttctcgaaggccataccttccttgttcgaaaccacagacaggcatccttggggatctctcccattacctttctcactgcccaaacgctccttatggacttgggtcagttccttctcttttgccatatcccgtcacaccagcatgatggtatggaagcttatgtgaaagtcgacagttgtcctgaggagccacagttgcgcatgaagaataatgaagaagccgaggattacgacgacgatctcaccgattctgagatggacgtggtgaggtttgatgacgacaactctccctccatcattcaagctcggagcgtggcgaagaaacaccccaagacttgggtccactatatagcggcggaagaggaggattgggattacgctcctcttgtattggcaccagatgaccgctcatacaaaagccagtacctcaacaacggaccgcagagaattggccggaagtataagaaagtgcgatttatggcctatacagacgaaacctttaagacaagggaggccatccagcatgagagtgggattttgggacctcttctttacggcgaagttggtgataccctcctcatcatcttcaagaatcaagcttctcgcccctataacatttacccacacgggatcactgacgttaggcctttgtatagcagaagacttcccaaaggcgtgaagcatctcaaagacttccccattttgccaggcgagatctttaagtacaaatggaccgtcacagtggaagatggaccgactaaatcagaccctcgatgccttacgcggtactattcctccttcgtgaatatggagagagatttggcaagcggactcataggaccactcctcatctgttacaaggaatctgtagaccagaggggtaaccagattatgagtgataaacgcaatgtgatcctttttagcgtcttcgacgagaaccggtcctggtacttgaccgagaatatacaaaggttccttcccaaccccgcaggcgttcagttggaagaccctgagtttcaggccagcaatattatgcactcaatcaacggctatgtgtttgatagtctccagctttctgtttgcctccatgaagtagcctattggtacatcttgtcaattggtgctcaaacagacttcctctccgtcttcttctccggctacacctttaagcacaagatggtgtatgaggacactctcacactctttccattttctggagaaaccgtgttcatgagcatggagaatccaggcctttggatcttgggttgccacaacagtgattttcgcaatcggggaatgactgctctcctcaaagtcagcagctgtgataagaacacaggcgactattacgaagattcttacgaggacataagtgcctactttgactccaagaataacgccattgagcccagatcattctcccagaatcctcccgtgcttaaaaggcatcagcgcgaaatcaccagaactactcttcagtctgatcaagaggagattgactatgacgacaccataagcgtggaaatgaagaaggaggatttcgatatctatgacgaagatgagaaccagtctccgcggagctttcagaagaagacgcgacactacttcattgcagcagtcgaaaggtggtgggactacggtatgtcatcatcccctcatgtgttgcgcaatagagctcagagtggaagtgttccacagttcaagaaagtcgtctttcaagagtttacagatggcagcttcacacagcctctctatcggggcgagcttaacgaacatttgggactccttggtccctatatccgagccgaagtggaggacaacattatggttacctttaggaatcaagcctctcgcccctacagcttctactcctccctcatcagttatgaggaggatcagagacaaggcgctgaaccacggaagaactttgtgaaaccgaatgagacgaagacctacttctggaaagtacagcaccacatggcccccacaaaagacgaattcgattgcaaagcatgggcgtatttttcagacgttgacttggagaaagatgtacattcaggacttattggtcctttgttggtgtgtcacactaacactctcaatccagcccatggcaggcaggtgacagtccaggaattcgctcttttctttaccatctttgatgagaccaagtcctggtacttcacggaaaacatggagcgcaattgcagagccccctgtaacatacagatggaggaccctacctttaaggaaaattatcggttccacgcaatcaacggatacattatggatacactccctggccttgtgatggctcaggaccaacgaatcaggtggtacctcctcagcatgggttctaatgagaacatacactccattcacttttcaggacatgtgttcactgtccggaagaaagaagagtataagatggccctctacaatttgtatccaggcgtgtttgagaccgttgaaatgcttccctctaaagctggcatctggagagtagagtgcttgatcggagaacatcttcacgcaggtatgagcaccttgttcctcgtgtacagcaacaaatgtcagaccccacttggcatggccagtggacacattcgcgactttcagatcacagcatctggccagtatggacaatgggccccaaagttggctcgcctccattactccggtagcataaatgcgtggtccactaaagaacctttcagctggattaaggtcgatcttcttgcccccatgatcatccacggcattaagacacagggagcgaggcagaaattctcctccctctacatctcacagttcattattatgtatagtttggacggcaagaagtggcaaacttatagaggtaacagtactggaacagacatggtgttcttcggcaacgttgatagctctggcatcaaacacaacatctttaatcctcccataatagctcggtacatcagattgcatccgacccactacagcattaggagtacactccgaatggagcttatgggttgcgacttgaattcctgttcaatgccactcggaatggagtctaaagccatctctgatgcacagataaccgccagtagctactttacgaacatgtttgctacgtggtcaccctctaaggcaaggcttcatttgcaaggccggtctaatgcctggagacctcaggtgaacaacccgaaagaatggctccaggtggactttcagaagaccatgaaagtaacaggtgtcactactcagggagttaagtccttggatactagcatgtatgtgaaggagttccttatttcctcatcacaagatggccaccagtggaccctcttctttcagaatggtaaggtcaaagtgtttcagggcaatcaagacagcttcacacccgtggtgaacagtcttgatcctccactcttgacacgataccttcgaatccatccacagtcttgggagcaccagattgcattgcgcatggaagtacttggatgcgaggctcaggacctctac

SEQ ID NO: 1014 - protein, 1457 aa, synthetic construct
  REGION 1..1457: note = Variant of human B-domain deleted Factor VIII
MQIELSTCFFLCLLRFCFSATRRYYLGAVELSWDYMQSDLGELPVDARFPPRVPKSFPFNTSVVYKKTLFVEFTDHLFNIAKPRPPWMGLLGPTIQAEVYDTVVITLKNMASHPVSLHAVGVSYWKASEGAEYDDQTSQREKEDDKVFPGGSHTYVWQVLKENGPMASDPPCLTYSYLSHVDLVKDLNSGLIGALLVCREGSLAKEKTQTLHKFILLFAVFDEGKSWHSETKNSLMQDRDAASARAWPKMHTVNGYVNRTLPGLIGCHRKSVYWHVIGMGTTPEVHSIFLEGHTFLVRNHRQASLGISPITFLTAQTLLMDLGQFLLFCHIPSHQHDGMEAYVKVDSCPEEPQLRMKNNEEAEDYDDDLTDSEMDVVRFDDDNSPSIIQARSVAKKHPKTWVHYIAAEEEDWDYAPLVLAPDDRSYKSQYLNNGPQRIGRKYKKVRFMAYTDETFKTREAIQHESGILGPLLYGEVGDTLLIIFKNQASRPYNIYPHGITDVRPLYSRRLPKGVKHLKDFPILPGEIFKYKWTVTVEDGPTKSDPRCLTRYYSSFVNMERDLASGLIGPLLICYKESVDQRGNQIMSDKRNVILFSVFDENRSWYLTENIQRFLPNPAGVQLEDPEFQASNIMHSINGYVFDSLQLSVCLHEVAYWYILSIGAQTDFLSVFFSGYTFKHKMVYEDTLTLFPFSGETVFMSMENPGLWILGCHNSDFRNRGMTALLKVSSCDKNTGDYYEDSYEDISAYFDSKNNAIEPRSFSQNPPVLKRHQREITRTTLQSDQEEIDYDDTISVEMKKEDFDIYDEDENQSPRSFQKKTRHYFIAAVERWWDYGMSSSPHVLRNRAQSGSVPQFKKVVFQEFTDGSFTQPLYRGELNEHLGLLGPYIRAEVEDNIMVTFRNQASRPYSFYSSLISYEEDQRQGAEPRKNFVKPNETKTYFWKVQHHMAPTKDEFDCKAWAYFSDVDLEKDVHSGLIGPLLVCHTNTLNPAHGRQVTVQEFALFFTIFDETKSWYFTENMERNCRAPCNIQMEDPTFKENYRFHAINGYIMDTLPGLVMAQDQRIRWYLLSMGSNENIHSIHFSGHVFTVRKKEEYKMALYNLYPGVFETVEMLPSKAGIWRVECLIGEHLHAGMSTLFLVYSNKCQTPLGMASGHIRDFQITASGQYGQWAPKLARLHYSGSINAWSTKEPFSWIKVDLLAPMIIHGIKTQGARQKFSSLYISQFIIMYSLDGKKWQTYRGNSTGTDMVFFGNVDSSGIKHNIFNPPIIARYIRLHPTHYSIRSTLRMELMGCDLNSCSMPLGMESKAISDAQITASSYFTNMFATWSPSKARLHLQGRSNAWRPQVNNPKEWLQVDFQKTMKVTGVTTQGVKSLDTSMYVKEFLISSSQDGHQWTLFFQNGKVKVFQGNQDSFTPVVNSLDPPLLTRYLRIHPQSWEHQIALRMEVLGCEAQDLY

SEQ ID NO: 1015 - DNA, 4371 bp, synthetic construct
  misc_feature 1..4371: note = Variant of human B-domain deleted Factor VIII
  source 1..4371: mol_type = other DNA
atgcagattgaactgtctacctgcttcttcctctgtttgctgaggttctgctttagcgccactagacggtactaccttggcgctgtggagctgtcctgggactatatgcagagtgatttgggagagcttcccgtcgacgcacgatttcctcctcgcgttccaaagtcatttccctttaacacaagcgtggtgtacaagaagacgctcttcgtcgaattcaccgatcacctgttcaatatcgccaaacccagaccaccatggatgggtcttttggggcctaccatacaagcggaggtgtatgacacagttgttatcactctcaagaacatggcttctcatccggtaagtcttcacgcagtgggcgtgtcctactggaaagcttcagaaggagccgagtatgatgatcagacatcccagagggagaaagaagacgacaaggtatttccaggtgggtctcatacctatgtgtggcaagtgctcaaagagaatggccctatggcaagcgatccgccgtgtttgacttacagctacctttcacacgttgacctcgtcaaggacctcaactccgggttgattggagccttgttggtatgcagggaaggatctcttgccaaagagaagacacagaccctccacaagtttatccttctctttgctgtgttcgatgagggccgtagttggcatagcgaaacgaagaattccctcatgcaggatcgcgacgcagccagcgccagagcttggcccaagatgcacactgtgaacggatatgtcaataggacgcttcctggcttgattgggtgtcatcggaaaagtgtctactggcacgtgatcggaatggggacaacaccagaggtccactccatatttctcgaaggccataccttccttgttcgaaaccacagacaggcatccttggggatctctcccattacctttctcactgcccaaacgctccttatggacttgggtcagttccttctcttttgccatatcccgtcacaccagcatgatggtatggaagcttatgtgaaagtcgacagttgtcctgaggagccacagttgcgcatgaagaataatgaagaagccgaggattacgacgacgatctcaccgattctgagatggacgtggtgaggtttgatgacgacaactctccctccatcattcaagctcggagcgtggcgaagaaacaccccaagacttgggtccactatatagcggcggaagaggaggattgggattacgctcctcttgtattggcaccagatgaccgctcatacaaaagccagtacctcaacaacggaccgcagagaattggccggaagtataagaaagtgcgatttatggcctatacagacgaaacctttaagacaagggaggccatccagcatgagagtgggattttgggacctcttctttacggcgaagttggtgataccctcctcatcatcttcaagaatcaagcttctcgcccctataacatttacccacacgggatcactgacgttaggcctttgtatagcagaagacttcccaaaggcgtgaagcatctcaaagacttccccattttgccaggcgagatctttaagtacaaatggaccgtcacagtggaagatggaccgactaaatcagaccctcgatgccttacgcggtactattcctccttcgtgaatatggagagagatttggcaagcggactcataggaccactcctcatctgttacaaggaatctgtagaccagaggggtaaccagattatgagtgataaacgcaatgtgatcctttttagcgtcttcgacgagaaccggtcctggtacttgaccgagaatatacaaaggttccttcccaaccccgcaggcgttcagttggaagaccctgagtttcaggccagcaatattatgcactcaatcaacggctatgtgtttgatagtctccagctttctgtttgcctccatgaagtagcctattggtacatcttgtcaattggtgctcaaacagacttcctctccgtcttcttctccggctacacctttaagcacaagatggtgtatgaggacactctcacactctttccattttctggagaaaccgtgttcatgagcatggagaatccaggcctttggatcttgggttgccacaacagtgattttcgcaatcggggaatgactgctctcctcaaagtcagcagctgtgataagaacacaggcgactattacgaagattcttacgaggacataagtgcctactttgactccaagaataacgccattgagcccagatcattctcccagaatcctcccgtgcttaaaaggcatcagcgcgaaatcaccagaactactcttcagtctgatcaagaggagattgactatgacgacaccataagcgtggaaatgaagaaggaggatttcgatatctatgacgaagatgagaaccagtctccgcggagctttcagaagaagacgcgacactacttcattgcagcagtcgaaaggctttgggactacggtatgtcatcatcccctcatgtgttgcgcaatagagctcagagtggaagtgttccacagttcaagaaagtcgtctttcaagagtttacagatggcagcttcacacagcctctctatcggggcgagcttaacgaacatttgggactccttggtccctatatccgagccgaagtggaggacaacattatggttacctttaggaatcaagcctctcgcccctacagcttctactcctccctcatcagttatgaggaggatcagagacaaggcgctgaaccacggaagaactttgtgaaaccgaatgagacgaagacctacttctggaaagtacagcaccacatggcccccacaaaagacgaattcgattgcaaagcatgggcgtatttttcagacgttgacttggagaaagatgtacattcaggacttattggtcctttgttggtgtgtcacactaacactctcaatccagcccatggcaggcaggtgacagtccaggaattcgctcttttctttaccatctttgatgagaccaagtcctggtacttcacggaaaacatggagcgcaattgcagagccccctgtaacatacagatggaggaccctacctttaaggaaaattatcggttccacgcaatcaacggatacattatggatacactccctggccttgtgatggctcaggaccaacgaatcaggtggtacctcctcagcatgggttctaatgagaacatacactccattcacttttcaggacatgtgttcactgtccggaagaaagaagagtataagatggccctctacaatttgtatccaggcgtgtttgagaccgttgaaatgcttccctctaaagctggcatctggagagtagagtgcttgatcggagaacatcttcacgcaggtatgagcaccttgttcctcgtgtacagcaacaaatgtcagaccccacttggcatggccagtggacacattcgcgactttcagatcacagcatctggccagtatggacaatgggccccaaagttggctcgcctccattactccggtagcataaatgcgtggtccactaaagaacctttcagctggattaaggtcgatcttcttgcccccatgatcatccacggcattaagacacagggagcgaggcagaaattctcctccctctacatctcacagttcattattatgtatagtttggacggcaagaagtggcaaacttatagaggtaacagtactggaacagacatggtgttcttcggcaacgttgatagctctggcatcaaacacaacatctttaatcctcccataatagctcggtacatcagattgcatccgacccactacagcattaggagtacactccgaatggagcttatgggttgcgacttgaattcctgttcaatgccactcggaatggagtctaaagccatctctgatgcacagataaccgccagtagctactttacgaacatgtttgctacgtggtcaccctctaaggcaaggcttcatttgcaaggccggtctaatgcctggagacctcaggtgaacaacccgaaagaatggctccaggtggactttcagaagaccatgaaagtaacaggtgtcactactcagggagttaagtccttggatactagcatgtatgtgaaggagttccttatttcctcatcacaagatggccaccagtggaccctcttctttcagaatggtaaggtcaaagtgtttcagggcaatcaagacagcttcacacccgtggtgaacagtcttgatcctccactcttgacacgataccttcgaatccatccacagtcttgggagcaccagattgcattgcgcatggaagtacttggatgcgaggctcaggacctctac

SEQ ID NO: 1016 - protein, 1457 aa, synthetic construct
  REGION 1..1457: note = Variant of human B-domain deleted Factor VIII
MQIELSTCFFLCLLRFCFSATRRYYLGAVELSWDYMQSDLGELPVDARFPPRVPKSFPFNTSVVYKKTLFVEFTDHLFNIAKPRPPWMGLLGPTIQAEVYDTVVITLKNMASHPVSLHAVGVSYWKASEGAEYDDQTSQREKEDDKVFPGGSHTYVWQVLKENGPMASDPPCLTYSYLSHVDLVKDLNSGLIGALLVCREGSLAKEKTQTLHKFILLFAVFDEGRSWHSETKNSLMQDRDAASARAWPKMHTVNGYVNRTLPGLIGCHRKSVYWHVIGMGTTPEVHSIFLEGHTFLVRNHRQASLGISPITFLTAQTLLMDLGQFLLFCHIPSHQHDGMEAYVKVDSCPEEPQLRMKNNEEAEDYDDDLTDSEMDVVRFDDDNSPSIIQARSVAKKHPKTWVHYIAAEEEDWDYAPLVLAPDDRSYKSQYLNNGPQRIGRKYKKVRFMAYTDETFKTREAIQHESGILGPLLYGEVGDTLLIIFKNQASRPYNIYPHGITDVRPLYSRRLPKGVKHLKDFPILPGEIFKYKWTVTVEDGPTKSDPRCLTRYYSSFVNMERDLASGLIGPLLICYKESVDQRGNQIMSDKRNVILFSVFDENRSWYLTENIQRFLPNPAGVQLEDPEFQASNIMHSINGYVFDSLQLSVCLHEVAYWYILSIGAQTDFLSVFFSGYTFKHKMVYEDTLTLFPFSGETVFMSMENPGLWILGCHNSDFRNRGMTALLKVSSCDKNTGDYYEDSYEDISAYFDSKNNAIEPRSFSQNPPVLKRHQREITRTTLQSDQEEIDYDDTISVEMKKEDFDIYDEDENQSPRSFQKKTRHYFIAAVERLWDYGMSSSPHVLRNRAQSGSVPQFKKVVFQEFTDGSFTQPLYRGELNEHLGLLGPYIRAEVEDNIMVTFRNQASRPYSFYSSLISYEEDQRQGAEPRKNFVKPNETKTYFWKVQHHMAPTKDEFDCKAWAYFSDVDLEKDVHSGLIGPLLVCHTNTLNPAHGRQVTVQEFALFFTIFDETKSWYFTENMERNCRAPCNIQMEDPTFKENYRFHAINGYIMDTLPGLVMAQDQRIRWYLLSMGSNENIHSIHFSGHVFTVRKKEEYKMALYNLYPGVFETVEMLPSKAGIWRVECLIGEHLHAGMSTLFLVYSNKCQTPLGMASGHIRDFQITASGQYGQWAPKLARLHYSGSINAWSTKEPFSWIKVDLLAPMIIHGIKTQGARQKFSSLYISQFIIMYSLDGKKWQTYRGNSTGTDMVFFGNVDSSGIKHNIFNPPIIARYIRLHPTHYSIRSTLRMELMGCDLNSCSMPLGMESKAISDAQITASSYFTNMFATWSPSKARLHLQGRSNAWRPQVNNPKEWLQVDFQKTMKVTGVTTQGVKSLDTSMYVKEFLISSSQDGHQWTLFFQNGKVKVFQGNQDSFTPVVNSLDPPLLTRYLRIHPQSWEHQIALRMEVLGCEAQDLY

SEQ ID NO: 1017 - DNA, 4371 bp, synthetic construct
  misc_feature 1..4371: note = Variant of human B-domain deleted Factor VIII
  source 1..4371: mol_type = other DNA
atgcagattgaactgtctacctgcttcttcctctgtttgctgaggttctgctttagcgccactagacggtactaccttggcgctgtggagctgtcctgggactatatgcagagtgatttgggagagcttcccgtcgacgcacgatttcctcctcgcgttccaaagtcatttccctttaacacaagcgtggtgtacaagaagacgctcttcgtcgaattcaccgatcacctgttcaatatcgccaaacccagaccaccatggatgggtcttttggggcctaccatacaagcggaggtgtatgacacagttgttatcactctcaagaacatggcttctcatccggtaagtcttcacgcagtgggcgtgtcctactggaaagcttcagaaggagccgagtatgatgatcagacatcccagagggagaaagaagacgacaaggtatttccaggtgggtctcatacctatgtgtggcaagtgctcaaagagaatggccctatggcaagcgatccgccgtgtttgacttacagctacctttcacacgttgacctcgtcaaggacctcaactccgggttgattggagccttgttggtatgcagggaaggatctcttgccaaagagaagacacagaccctccacaagtttatccttctctttgctgtgttcgatgagggcaaaagttggcatagcgaaacgaagaattccctcatgcaggatcgcgacgcagccagcgccagagcttggcccaagatgcacactgtgaacggatatgtcaataggacgcttcctggcttgattgggtgtcatcggaaaagtgtctactggcacgtgatcggaatggggacaacaccagaggtccactccatatttctcgaaggccataccttccttgttcgaaaccacagacaggcatccttggggatctctcccattacctttctcactgcccaaacgctccttatggacttgggtcagttccttctcttttgccatatcccgtcacaccagcatgatggtatggaagcttatgtgaaagtcgacagttgtcctgaggagccacagttgcgcatgaagaataatgaagaagccgaggattacgacgacgatctcaccgattctgagatggacgtggtgaggtttgatgacgacaactctccctccatcattcaagctcggagcgtggcgaagaaacaccccaagacttgggtccactatatagcggcggaagaggaggattgggattacgctcctcttgtattggcaccagatgaccgctcatacaaaagccagtacctcaacaacggaccgcagagaattggccggaagtataagaaagtgcgatttatggcctatacagacgaaacctttaagacaagggaggccatccagcatgagagtgggattttgggacctcttctttacggcgaagttggtgataccctcctcatcatcttcaagaatcaagcttctcgcccctataacatttacccacacgggatcactgacgttaggcctttgtatagcagaagacttcccaaaggcgtgaagcatctcaaagacttccccattttgccaggcgagatctttaagtacaaatggaccgtcacagtggaagatggaccgactaaatcagaccctcgatgccttacgcggtactattcctccttcgtgaatatggagagagatttggcaagcggactcataggaccactcctcatctgttacaaggaatctgtagaccagaggggtaaccagattatgagtgataaacgcaatgtgatcctttttagcgtcttcgacgagaaccggtcctggtacttgaccgagaatatacaaaggttccttcccaaccccgcaggcgttcagttggaagaccctgagtttcaggccagcaatattatgcactcaatcaacggctatgtgtttgatagtctccagctttctgtttgcctccatgaagtagcctattggtacatcttgtcaattggtgctcaaacagacttcctctccgtcttcttctccggctacacctttaagcacaagatggtgtatgaggacactctcacactctttccattttctggagaaaccgtgttcatgagcatggagaatccaggcctttggatcttgggttgccacaacagtgattttcgcaatcggggaatgactgctctcctcaaagtcagcagctgtgataagaacacaggcgactattacgaagattcttacgaggacataagtgcctactttgactccaagaataacgccattgagcccagatcattctcccagaatcctcccgtgcttaaaaggcatcagcgcgaaatcaccagaactactcttcagtctgatcaagaggagattgactatgacgacaccataagcgtggaaatgaagaaggaggatttcgatatctatgacgaagatgagaaccagtctccgcggagctttcagaagaagacgcgacactacttcattgcagcagtcgaaaggctttgggactacggtatgtcatcatcccctcatgtgttgcgcaatagagctcagagtggaagtgttccacagttcaagaaagtcgtctttcaagagtttacagatggcagcttcacacagcctctctatcggggcgagcttaacgaacatttgggactccttggtccctatatccgagccgaagtggaggacaacattatggttacctttaggaatcaagcctctcgcccctacagcttctactcctccctcatcagttatgaggaggatcagagacaaggcgctgaaccacggaagaactttgtgaaaccgaatgagacgaagacctacttctggaaagtacagcaccacatggcccccacaaaagacgaattcgattgcaaagcatgggcgtatttttcagacgttgacttggagaaagatgtacattcaggacttattggtcctttgttggtgtgtcacactaacactctcaatccagcccatggcaggcaggtgacagtccaggaattcgctcttttctttaccatctttgatgagaccaagtcctggtacttcacggaaaacatggagcgcaattgcagagccccctgtaacatacagatggaggaccctacctttaaggaaaattatcggttccacgcaatcaacggatacattatggatacactccctggccttgtgatggctcaggaccaacgaatcaggtggtacctcctcagcatgggttctaatgagaacatacactccattcacttttcaggacatgtgttcactgtccggaagaaagaagagtataagatggccctctacaatttgtatccaggcgtgtttgagaccgttgaaatgcttccctctaaagctggcatctggagagtagagtgcttgatcggagaacatcttcacgcaggtatgagcaccttgttcctcgtgtacagcaacaaatgtcagaccccacttggcatggccagtggaaggattcgcgactttcagatcacagcatctggccagtatggacaatgggccccaaagttggctcgcctccattactccggtagcataaatgcgtggtccactaaagaacctttcagctggattaaggtcgatcttcttgcccccatgatcatccacggcattaagacacagggagcgaggcagaaattctcctccctctacatctcacagttcattattatgtatagtttggacggcaagaagtggcaaacttatagaggtaacagtactggaacagacatggtgttcttcggcaacgttgatagctctggcatcaaacacaacatctttaatcctcccataatagctcggtacatcagattgcatccgacccactacagcattaggagtacactccgaatggagcttatgggttgcgacttgaattcctgttcaatgccactcggaatggagtctaaagccatctctgatgcacagataaccgccagtagctactttacgaacatgtttgctacgtggtcaccctctaaggcaaggcttcatttgcaaggccggtctaatgcctggagacctcaggtgaacaacccgaaagaatggctccaggtggactttcagaagaccatgaaagtaacaggtgtcactactcagggagttaagtccttggatactagcatgtatgtgaaggagttccttatttcctcatcacaagatggccaccagtggaccctcttctttcagaatggtaaggtcaaagtgtttcagggcaatcaagacagcttcacacccgtggtgaacagtcttgatcctccactcttgacacgataccttcgaatccatccacagtcttgggagcaccagattgcattgcgcatggaagtacttggatgcgaggctcaggacctctac

SEQ ID NO: 1018 - protein, 1457 aa, synthetic construct
  REGION 1..1457: note = Variant of human B-domain deleted Factor VIII
MQIELSTCFFLCLLRFCFSATRRYYLGAVELSWDYMQSDLGELPVDARFPPRVPKSFPFNTSVVYKKTLFVEFTDHLFNIAKPRPPWMGLLGPTIQAEVYDTVVITLKNMASHPVSLHAVGVSYWKASEGAEYDDQTSQREKEDDKVFPGGSHTYVWQVLKENGPMASDPPCLTYSYLSHVDLVKDLNSGLIGALLVCREGSLAKEKTQTLHKFILLFAVFDEGKSWHSETKNSLMQDRDAASARAWPKMHTVNGYVNRTLPGLIGCHRKSVYWHVIGMGTTPEVHSIFLEGHTFLVRNHRQASLGISPITFLTAQTLLMDLGQFLLFCHIPSHQHDGMEAYVKVDSCPEEPQLRMKNNEEAEDYDDDLTDSEMDVVRFDDDNSPSIIQARSVAKKHPKTWVHYIAAEEEDWDYAPLVLAPDDRSYKSQYLNNGPQRIGRKYKKVRFMAYTDETFKTREAIQHESGILGPLLYGEVGDTLLIIFKNQASRPYNIYPHGITDVRPLYSRRLPKGVKHLKDFPILPGEIFKYKWTVTVEDGPTKSDPRCLTRYYSSFVNMERDLASGLIGPLLICYKESVDQRGNQIMSDKRNVILFSVFDENRSWYLTENIQRFLPNPAGVQLEDPEFQASNIMHSINGYVFDSLQLSVCLHEVAYWYILSIGAQTDFLSVFFSGYTFKHKMVYEDTLTLFPFSGETVFMSMENPGLWILGCHNSDFRNRGMTALLKVSSCDKNTGDYYEDSYEDISAYFDSKNNAIEPRSFSQNPPVLKRHQREITRTTLQSDQEEIDYDDTISVEMKKEDFDIYDEDENQSPRSFQKKTRHYFIAAVERLWDYGMSSSPHVLRNRAQSGSVPQFKKVVFQEFTDGSFTQPLYRGELNEHLGLLGPYIRAEVEDNIMVTFRNQASRPYSFYSSLISYEEDQRQGAEPRKNFVKPNETKTYFWKVQHHMAPTKDEFDCKAWAYFSDVDLEKDVHSGLIGPLLVCHTNTLNPAHGRQVTVQEFALFFTIFDETKSWYFTENMERNCRAPCNIQMEDPTFKENYRFHAINGYIMDTLPGLVMAQDQRIRWYLLSMGSNENIHSIHFSGHVFTVRKKEEYKMALYNLYPGVFETVEMLPSKAGIWRVECLIGEHLHAGMSTLFLVYSNKCQTPLGMASGRIRDFQITASGQYGQWAPKLARLHYSGSINAWSTKEPFSWIKVDLLAPMIIHGIKTQGARQKFSSLYISQFIIMYSLDGKKWQTYRGNSTGTDMVFFGNVDSSGIKHNIFNPPIIARYIRLHPTHYSIRSTLRMELMGCDLNSCSMPLGMESKAISDAQITASSYFTNMFATWSPSKARLHLQGRSNAWRPQVNNPKEWLQVDFQKTMKVTGVTTQGVKSLDTSMYVKEFLISSSQDGHQWTLFFQNGKVKVFQGNQDSFTPVVNSLDPPLLTRYLRIHPQSWEHQIALRMEVLGCEAQDLY

SEQ ID NO: 1019 - DNA, 4371 bp, synthetic construct
  misc_feature 1..4371: note = Variant of human B-domain deleted Factor VIII
  source 1..4371: mol_type = other DNA
atgcagattgaactgtctacctgcttcttcctctgtttgctgaggttctgctttagcgccactagacggtactaccttggcgctgtggagctgtcctgggactatatgcagagtgatttgggagagcttcccgtcgacgcacgatttcctcctcgcgttccaaagtcatttccctttaacacaagcgtggtgtacaagaagacgctcttcgtcgaattcaccgatcacctgttcaatatcgccaaacccagaccaccatggatgggtcttttggggcctaccatacaagcggaggtgtatgacacagttgttatcactctcaagaacatggcttctcatccggtaagtcttcacgcagtgggcgtgtcctactggaaagcttcagaaggagccgagtatgatgatcagacatcccagagggagaaagaagacgacaaggtatttccaggtgggtctcatacctatgtgtggcaagtgctcaaagagaatggccctatggcaagcgatccgccgtgtttgacttacagctacctttcacacgttgacctcgtcaaggacctcaactccgggttgattggagccttgttggtatgcagggaaggatctcttgccaaagagaagacacagaccctccacaagtttatccttctctttgctgtgttcgatgagggcaaaagttggcatagcgaaacgaagaattccctcatgcaggatcgcgacgcagccagcgccagagcttggcccaagatgcacactgtgaacggatatgtcaataggacgcttcctggcttgattgggtgtcatcggaaaagtgtctactggcacgtgatcggaatggggacaacaccagaggtccactccatatttctcgaaggccataccttccttgttcgaaaccacagacaggcatccttggggatctctcccattacctttctcactgcccaaacgctccttatggacttgggtcagttccttctcttttgccatatcccgtcacaccagcatgatggtatggaagcttatgtgaaagtcgacagttgtcctgaggagccacagttgcgcatgaagaataatgaagaagccgaggattacgacgacgatctcaccgattctgagatggacgtggtgaggtttgatgacgacaactctccctccatcattcaagctcggagcgtggcgaagaaacaccccaagacttgggtccactatatagcggcggaagaggaggattgggattacgctcctcttgtattggcaccagatgaccgctcatacaaaagccagtacctcaacaacggaccgcagagaattggccggaagtataagaaagtgcgatttatggcctatacagacgaaacctttaagacaagggaggccatccagcatgagagtgggattttgggacctcttctttacggcgaagttggtgataccctcctcatcatcttcaagaatcaagcttctcgcccctataacatttacccacacgggatcactgacgttaggcctttgtatagcagaagacttcccaaaggcgtgaagcatctcaaagacttccccattttgccaggcgagatctttaagtacaaatggaccgtcacagtggaagatggaccgactaaatcagaccctcgatgccttacgcggtactattcctccttcgtgaatatggagagagatttggcaagcggactcataggaccactcctcatctgttacaaggaatctgtagaccagaggggtaaccagattatgagtgataaacgcaatgtgatcctttttagcgtcttcgacgagaaccggtcctggtacttgaccgagaatatacaaaggttccttcccaaccccgcaggcgttcagttggaagaccctgagtttcaggccagcaatattatgcactcaatcaacggctatgtgtttgatagtctccagctttctgtttgcctccatgaagtagcctattggtacatcttgtcaattggtgctcaaacagacttcctctccgtcttcttctccggctacacctttaagcacaagatggtgtatgaggacactctcacactctttccattttctggagaaaccgtgttcatgagcatggagaatccaggcctttggatcttgggttgccacaacagtgattttcgcaatcggggaatgactgctctcctcaaagtcagcagctgtgataagaacacaggcgactattacgaagattcttacgaggacataagtgcctactttgactccaagaataacgccattgagcccagatcattctcccagaatcctcccgtgcttaaaaggcatcagcgcgaaatcaccagaactactcttcagtctgatcaagaggagattgactatgacgacaccataagcgtggaaatgaagaaggaggatttcgatatctatgacgaagatgagaaccagtctccgcggagctttcagaagaagacgcgacactacttcattgcagcagtcgaagtgctttgggactacggtatgtcatcatcccctcatgtgttgcgcaatagagctcagagtggaagtgttccacagttcaagaaagtcgtctttcaagagtttacagatggcagcttcacacagcctctctatcggggcgagcttaacgaacatttgggactccttggtccctatatccgagccgaagtggaggacaacattatggttacctttaggaatcaagcctctcgcccctacagcttctactcctccctcatcagttatgaggaggatcagagacaaggcgctgaaccacggaagaactttgtgaaaccgaatgagacgaagacctacttctggaaagtacagcaccacatggcccccacaaaagacgaattcgattgcaaagcatgggcgtatttttcagacgttgacttggagaaagatgtacattcaggacttattggtcctttgttggtgtgtcacactaacactctcaatccagcccatggcaggcaggtgacagtccaggaattcgctcttttctttaccatctttgatgagaccaagtcctggtacttcacggaaaacatggagcgcaattgcagagccccctgtaacatacagatggaggaccctacctttaaggaaaattatcggttccacgcaatcaacggatacattatggatacactccctggccttgtgatggctcaggaccaacgaatcaggtggtacctcctcagcatgggttctaatgagaacatacactccattcacttttcaggacatgtgttcactgtccggaagaaagaagagtataagatggccctctacaatttgtatccaggcgtgtttgagaccgttgaaatgcttccctctaaagctggcatctggagagtagagtgcttgatcggagaacatcttcacgcaggtatgagcaccttgttcctcgtgtacagcaacaaatgtcagaccccacttggcatggccagtggacacattcgcgactttcagatcacagcatctggccagtatggacaatgggccccaaagttggctcgcctccattactccggtagcataaatgcgtggtccactaaagaacctttcagctggattaaggtcgatcttcttgcccccatgatcatccacggcattaagacacagggagcgaggcagaaattctcctccctctacatctcacagttcattattatgtatagtttggacggcaagaagtggcaaacttatagaggtaacagtactggaacagacatggtgttcttcggcaacgttgatagctctggcatcaaacacaacatctttaatcctcccataatagctcggtacatcagattgcatccgacccactacagcattaggagtacactccgaatggagcttatgggttgcgacttgaattcctgttcaatgccactcggaatggagtctaaagccatctctgatgcacagataaccgccagtagctactttacgaacatgtttgctacgtggtcaccctctaaggcaaggcttcatttgcaaggccggtctaatgcctggagacctcaggtgaacaacccgaaagaatggctccaggtggactttcagaagaccatgaaagtaacaggtgtcactactcagggagttaagtccttggatactagcatgtatgtgaaggagttccttatttcctcatcacaagatggccaccagtggaccctcttctttcagaatggtaaggtcaaagtgtttcagggcaatcaagacagcttcacacccgtggtgaacagtcttgatcctccactcttgacacgataccttcgaatccatccacagtcttgggagcaccagattgcattgcgcatggaagtacttggatgcgaggctcaggacctctac

SEQ ID NO: 1020 - protein, 1457 aa, synthetic construct
  REGION 1..1457: note = Variant of human B-domain deleted Factor VIII
MQIELSTCFFLCLLRFCFSATRRYYLGAVELSWDYMQSDLGELPVDARFPPRVPKSFPFNTSVVYKKTLFVEFTDHLFNIAKPRPPWMGLLGPTIQAEVYDTVVITLKNMASHPVSLHAVGVSYWKASEGAEYDDQTSQREKEDDKVFPGGSHTYVWQVLKENGPMASDPPCLTYSYLSHVDLVKDLNSGLIGALLVCREGSLAKEKTQTLHKFILLFAVFDEGKSWHSETKNSLMQDRDAASARAWPKMHTVNGYVNRTLPGLIGCHRKSVYWHVIGMGTTPEVHSIFLEGHTFLVRNHRQASLGISPITFLTAQTLLMDLGQFLLFCHIPSHQHDGMEAYVKVDSCPEEPQLRMKNNEEAEDYDDDLTDSEMDVVRFDDDNSPSIIQARSVAKKHPKTWVHYIAAEEEDWDYAPLVLAPDDRSYKSQYLNNGPQRIGRKYKKVRFMAYTDETFKTREAIQHESGILGPLLYGEVGDTLLIIFKNQASRPYNIYPHGITDVRPLYSRRLPKGVKHLKDFPILPGEIFKYKWTVTVEDGPTKSDPRCLTRYYSSFVNMERDLASGLIGPLLICYKESVDQRGNQIMSDKRNVILFSVFDENRSWYLTENIQRFLPNPAGVQLEDPEFQASNIMHSINGYVFDSLQLSVCLHEVAYWYILSIGAQTDFLSVFFSGYTFKHKMVYEDTLTLFPFSGETVFMSMENPGLWILGCHNSDFRNRGMTALLKVSSCDKNTGDYYEDSYEDISAYFDSKNNAIEPRSFSQNPPVLKRHQREITRTTLQSDQEEIDYDDTISVEMKKEDFDIYDEDENQSPRSFQKKTRHYFIAAVEVLWDYGMSSSPHVLRNRAQSGSVPQFKKVVFQEFTDGSFTQPLYRGELNEHLGLLGPYIRAEVEDNIMVTFRNQASRPYSFYSSLISYEEDQRQGAEPRKNFVKPNETKTYFWKVQHHMAPTKDEFDCKAWAYFSDVDLEKDVHSGLIGPLLVCHTNTLNPAHGRQVTVQEFALFFTIFDETKSWYFTENMERNCRAPCNIQMEDPTFKENYRFHAINGYIMDTLPGLVMAQDQRIRWYLLSMGSNENIHSIHFSGHVFTVRKKEEYKMALYNLYPGVFETVEMLPSKAGIWRVECLIGEHLHAGMSTLFLVYSNKCQTPLGMASGHIRDFQITASGQYGQWAPKLARLHYSGSINAWSTKEPFSWIKVDLLAPMIIHGIKTQGARQKFSSLYISQFIIMYSLDGKKWQTYRGNSTGTDMVFFGNVDSSGIKHNIFNPPIIARYIRLHPTHYSIRSTLRMELMGCDLNSCSMPLGMESKAISDAQITASSYFTNMFATWSPSKARLHLQGRSNAWRPQVNNPKEWLQVDFQKTMKVTGVTTQGVKSLDTSMYVKEFLISSSQDGHQWTLFFQNGKVKVFQGNQDSFTPVVNSLDPPLLTRYLRIHPQSWEHQIALRMEVLGCEAQDLY

SEQ ID NO: 1021 - DNA, 4371 bp, synthetic construct
  misc_feature 1..4371: note = Variant of human B-domain deleted Factor VIII
  source 1..4371: mol_type = other DNA
atgcagattgaactgtctacctgcttcttcctctgtttgctgaggttctgctttagcgccactagacggtactaccttggcgctgtggagctgtcctgggactatatgcagagtgatttgggagagcttcccgtcgacgcacgatttcctcctcgcgttccaaagtcatttccctttaacacaagcgtcgtgtacaagaagacgctcttcgtcgaattcaccgatcacctgttcaatatcgccaaacccagaccaccatggatgggtcttttggggcctaccatacaagcggaggtgtatgacacagttgttatcactctcaagaacatggcttctcatccggtaagtcttcacgcagtgggcgtgtcctactggaaagcttcagaaggagccgagtatgatgatcagacatcccagagggagaaagaagacgacaaggtatttccaggtgggtctcatacctatgtgtggcaagtgctcaaagagaatggccctatggcaagcgatccgccgtgtttgacttacagctacctttcacacgttgacctcgtcaaggacctcaactccgggttgattggagccttgttggtatgcagggaaggatctcttgccaaagagaagacacagaccctccacaagtttatccttctctttgctgtgttcgatgagggcaaaagttggcatagcgaaacgaagaattccctcatgcaggatcgcgacgcagccagcgccagagcttggcccaagatgcacactgtgaacggatatgtcaataggacgcttcctggcttgattgggtgtcatcggaaaagtgtctactggcacgtgatcggaatggggacaacaccagaggtccactccatatttctcgaaggccataccttccttgttcgaaaccacagacaggcatccttggggatctctcccattacctttctcactgcccaaacgctccttatggacttgggtcagttccttctcttttgccatatcccgtcacaccagcatgatggtatggaagcttatgtgaaagtcgacagttgtcctgaggagccacagttgcgcatgaagaataatgaagaagccgaggattacgacgacgatctcaccgattctgagatggacgtggtgaggtttgatgacgacaactctccctccatcattcaagctcggagcggggcgaagaaacaccccaagacttgggtccactatatagcggcggaagaggaggattgggattacgctcctcttgtattggcaccagatgaccgctcatacaaaagccagtacctcaacaacggaccgcagagaattggccggaagtataagaaagtgcgatttatggcctatacagacgaaacctttaagacaagggaggccatccagcatgagagtgggattttgggacctcttctttacggcgaagttggtgataccctcctcatcatcttcaagaatcaagcttctcgcccctataacatttacccacacgggatcactgacgttaggcctttgtatagcagaagacttcccaaaggcgtgaagcatctcaaagacttccccattttgccaggcgagatctttaagtacaaatggaccgtcacagtggaagatggaccgactaaatcagaccctcgatgccttacgcggtactattcctccttcgtgaatatggagagagatttggcaagcggactcataggaccactcctcatctgttacaaggaatctgtagaccagaggggtaaccagattatgagtgataaacgcaatgtgatcctttttagcgtcttcgacgagaaccggtcctggtacttgaccgagaatatacaaaggttccttcccaaccccgcaggcgttcagttggaagaccctgagtttcaggccagcaatattatgcactcaatcaacggctatgtgtttgatagtctccagctttctgtttgcctccatgaagtagcctattggtacatcttgtcaattggtgctcaaacagacttcctctccgtcttcttctccggctacacctttaagcacaagatggtgtatgaggacactctcacactctttccattttctggagaaaccgtgttcatgagcatggagaatccaggcctttggatcttgggttgccacaacagtgattttcgcaatcggggaatgactgctctcctcaaagtcagcagctgtgataagaacacaggcgactattacgaagattcttacgaggacataagtgactactttgactcgaaaaataacgccattgagcccagatcattctcccagaatcctcccgtgcttaaaaggcatcagcgcgaaatcaccagaactactcttcagtctgatcaagaggagattgactatgacgacaccataagcgtggaaatgaagaaggaggatttcgatatctatgacgaagatgagaaccagtctccgcggagctttcagaagaagacgcgacactacttcattgcagcagtcgaaaggctttgggactacggtatgtcatcatcccctcatgtgttgcgcaatagagctcagagtggaagtgttccacagttcaagaaagtcgtctttcaagagtttacagatggcagcttcacacagcctctctatcggggcgagcttaacgaacatttgggactccttggtccctatatccgagccgaagtggaggacaacattatggttacctttaggaatcaagcctctcgcccctacagcttctactcctccctcatcagttatgaggaggatcagagacaaggcgctgaaccacggaagaactttgtgaaaccgaatgagacgaagacctacttctggaaagtacagcaccacatggcccccacaaaagacgaattcgattgcaaagcatgggcgtatttttcagacgttgacttggagaaagatgtacattcaggacttattggtcctttgttggtgtgtcacactaacactctcaatccagcccatggcaggcaggtgacagtccaggaattcgctcttttctttaccatctttgatgagaccaagtcctggtacttcacggaaaacatggagcgcaattgcagagccccctgtaacatacagatggaggaccctacctttaaggaaaattatcggttccacgcaatcaacggatacattatggatacactccctggccttgtgatggctcaggaccaacgaatcaggtggtacctcctcagcatgggttctaatgagaacatacactccattcacttttcaggacatgtgttcactgtccggaagaaagaagagtataagatggccctctacaatttgtatccaggcgtgtttgagaccgttgaaatgcttccctctaaagctggcatctggagagtagagtgcttgatcggagaacatcttcacgcaggtatgagcaccttgttcctcgtgtacagcaacaaatgtcagaccccacttggcatggccagtggacacattcgcgactttcagatcacagcatctggccagtatggacaatgggccccaaagttggctcgcctccattactccggtagcataaatgcgtggtccactaaagaacctttcagctggattaaggtcgatcttcttgcccccatgatcatccacggcattaagacacagggagcgaggcagaaattctcctccctctacatctcacagttcattattatgtatagtttggacggcaagaagtggcaaacttatagaggtaacagtactggaacagacatggtgttcttcggcaacgttgatagctctggcatcaaacacaacatctttaatcctcccataatagctcggtacatcagattgcatccgacccactacagcattaggagtacactccgaatggagcttatgggttgcgacttgaattcctgttcaatgccactcggaatggagtctaaagccatctctgatgcacagataaccgccagtagctactttacgaacatgtttgctacgtggtcaccctctaaggcaaggcttcatttgcaaggccggtctaatgcctggagacctcaggtgaacaacccgaaagaatggctccaggtggactttcagaagaccatgaaagtaacaggtgtcactactcagggagttaagtccttggatactagcatgtatgtgaaggagttccttatttcctcatcacaagatggccaccagtggaccctcttctttcagaatggtaaggtcaaagtgtttcagggcaatcaagacagcttcacacccgtggtgaacagtcttgatcctccactcttgacacgataccttcgaatccatccacagtcttgggagcaccagattgcattgcgcatggaagtacttggatgcgaggctcaggacctctac

SEQ ID NO: 1022 - protein, 1457 aa, synthetic construct
  REGION 1..1457: note = Variant of human B-domain deleted Factor VIII
MQIELSTCFFLCLLRFCFSATRRYYLGAVELSWDYMQSDLGELPVDARFPPRVPKSFPFNTSVVYKKTLFVEFTDHLFNIAKPRPPWMGLLGPTIQAEVYDTVVITLKNMASHPVSLHAVGVSYWKASEGAEYDDQTSQREKEDDKVFPGGSHTYVWQVLKENGPMASDPPCLTYSYLSHVDLVKDLNSGLIGALLVCREGSLAKEKTQTLHKFILLFAVFDEGKSWHSETKNSLMQDRDAASARAWPKMHTVNGYVNRTLPGLIGCHRKSVYWHVIGMGTTPEVHSIFLEGHTFLVRNHRQASLGISPITFLTAQTLLMDLGQFLLFCHIPSHQHDGMEAYVKVDSCPEEPQLRMKNNEEAEDYDDDLTDSEMDVVRFDDDNSPSIIQARSGAKKHPKTWVHYIAAEEEDWDYAPLVLAPDDRSYKSQYLNNGPQRIGRKYKKVRFMAYTDETFKTREAIQHESGILGPLLYGEVGDTLLIIFKNQASRPYNIYPHGITDVRPLYSRRLPKGVKHLKDFPILPGEIFKYKWTVTVEDGPTKSDPRCLTRYYSSFVNMERDLASGLIGPLLICYKESVDQRGNQIMSDKRNVILFSVFDENRSWYLTENIQRFLPNPAGVQLEDPEFQASNIMHSINGYVFDSLQLSVCLHEVAYWYILSIGAQTDFLSVFFSGYTFKHKMVYEDTLTLFPFSGETVFMSMENPGLWILGCHNSDFRNRGMTALLKVSSCDKNTGDYYEDSYEDISDYFDSKNNAIEPRSFSQNPPVLKRHQREITRTTLQSDQEEIDYDDTISVEMKKEDFDIYDEDENQSPRSFQKKTRHYFIAAVERLWDYGMSSSPHVLRNRAQSGSVPQFKKVVFQEFTDGSFTQPLYRGELNEHLGLLGPYIRAEVEDNIMVTFRNQASRPYSFYSSLISYEEDQRQGAEPRKNFVKPNETKTYFWKVQHHMAPTKDEFDCKAWAYFSDVDLEKDVHSGLIGPLLVCHTNTLNPAHGRQVTVQEFALFFTIFDETKSWYFTENMERNCRAPCNIQMEDPTFKENYRFHAINGYIMDTLPGLVMAQDQRIRWYLLSMGSNENIHSIHFSGHVFTVRKKEEYKMALYNLYPGVFETVEMLPSKAGIWRVECLIGEHLHAGMSTLFLVYSNKCQTPLGMASGHIRDFQITASGQYGQWAPKLARLHYSGSINAWSTKEPFSWIKVDLLAPMIIHGIKTQGARQKFSSLYISQFIIMYSLDGKKWQTYRGNSTGTDMVFFGNVDSSGIKHNIFNPPIIARYIRLHPTHYSIRSTLRMELMGCDLNSCSMPLGMESKAISDAQITASSYFTNMFATWSPSKARLHLQGRSNAWRPQVNNPKEWLQVDFQKTMKVTGVTTQGVKSLDTSMYVKEFLISSSQDGHQWTLFFQNGKVKVFQGNQDSFTPVVNSLDPPLLTRYLRIHPQSWEHQIALRMEVLGCEAQDLY

SEQ ID NO: 1023 - DNA, 4371 bp, synthetic construct
  misc_feature 1..4371: note = Variant of human B-domain deleted Factor VIII
  source 1..4371: mol_type = other DNA
atgcagattgaactgtctacctgcttcttcctctgtttgctgaggttctgctttagcgccactagacggtactaccttggcgctgtggagctgtcctgggactatatgcagagtgatttgggagagcttcccgtcgacgcacgatttcctcctcgcgttccaaagtcatttccctttaacacaagcgtcgtgtacaagaagacgctcttcgtcgaattcaccgatcacctgttcaatatcgccaaacccagaccaccatggatgggtcttttggggcctaccatacaagcggaggtgtatgacacagttgttatcactctcaagaacatggcttctcatccggtaagtcttcacgcagtgggcgtgtcctactggaaagcttcagaaggagccgagtatgatgatcagacatcccagagggagaaagaagacgacaaggtatttccaggtgggtctcatacctatgtgtggcaagtgctcaaagagaatggccctatggcaagcgatccgccgtgtttgacttacagctacctttcacacgttgacctcgtcaaggacctcaactccgggttgattggagccttgttggtatgcagggaaggatctcttgccaaagagaagacacagaccctccacaagtttatccttctctttgctgtgttcgatgagggcaaaagttggcatagcgaaacgaagaattccctcatgcaggatcgcgacgcagccagcgccagagcttggcccaagatgcacactgtgaacggatatgtcaataggacgcttcctggcttgattgggtgtcatcggaaaagtgtctactggcacgtgatcggaatggggacaacaccagaggtccactccatatttctcgaaggccataccttccttgttcgaaaccacagacaggcatccttggggatctctcccattacctttctcactgcccaaacgctccttatggacttgggtcagttccttctcttttgccatatcccgtcacaccagcatgatggtatggaagcttatgtgaaagtcgacagttgtcctgaggagccacagttgcgcatgaagaataatgaagaagccgaggattacgacgacgatctcaccgattctgagatggacgtggtgaggtttgatgacgacaactctccctccatcattcaagctcggagcgtggcgaagaaacaccccaagacttgggtccactatatagcggcggaagaggaggattgggattacgctcctcttgtattggcaccagatgaccgctcatacaaaagccagtacctcaacaacggaccgcagagaattggccggaagtataagaaagtgcgatttatggcctatacagacgaaacctttaagacaagggaggccatccagcatgagagtgggattttgggacctcttctttacggcgaagttggtgataccctcctcatcatcttcaagaatcaagcttctcgcccctataacatttacccacacgggatcactgacgttaggcctttgtatagcagaagacttcccaaaggcgtgaagcatctcaaagacttccccattttgccaggcgagatctttaagtacaaatggaccgtcacagtggaagatggaccgactaaatcagaccctcgatgccttacgcggtactattcctccttcgtgaatatggagagagatttggcaagcggactcataggaccactcctcatctgttacaaggaatctgtagaccagaggggtaaccagattatgagtgataaacgcaatgtgatcctttttagcgtcttcgacgagaaccggtcctggtacttgaccgagaatatacaaaggttccttcccaaccccgcaggcgttcagttggaagaccctgagtttcaggccagcaatattatgcactcaatcaacggctatgtgtttgatagtctccagctttctgtttgcctccatgaagtagcctattggtacatcttgtcaattggtgctcaaacagacttcctctccgtcttcttctccggctacacctttaagcacaagatggtgtatgaggacactctcacactctttccattttctggagaaaccgtgttcatgagcatggagaatccaggcctttggatcttgggttgccacaacagtgattttcgcaatcggggaatgactgctctcctcaaagtcagcagctgtgataagaacacaggcgactattacgaagattcttacgaggacataagtgcctactttgactcgaaagataacgccattgagcccagatcattctcccagaatcctcccgtgcttaaaaggcatcagcgcgaaatcaccagaactactcttcagtctgatcaagaggagattgactatgacgacaccataagcgtggaaatgaagaaggaggatttcgatatctatgacgaagatgagaaccagtctccgcggagctttcagaagaagacgcgacactacttcattgcagcagtcgaaaggctttgggactacggtatgtcatcatcccctcatgtgttgcgcaatagagctcagagtggaagtgttccacagttcaagaaagtcgtctttcaagagtttacagatggcagcttcacacagcctctctatcggggcgagcttaacgaacatttgggactccttggtccctatatccgagccgaagtggaggacaacattatggttacctttaggaatcaagcctctcgcccctacagcttctactcctccctcatcagttatgaggaggatcagagacaaggcgctgaaccacggaagaactttgtgaaaccgaatgagacgaagacctacttctggaaagtacagcaccacatggcccccacaaaagacgaattcgattgcaaagcatgggcgtatttttcagacgttgacttggagaaagatgtacattcaggacttattggtcctttgttggtgtgtcacactaacactctcaatccagcccatggcaggcaggtgacagtccaggaattcgctcttttctttaccatctttgatgagaccaagtcctggtacttcacggaaaacatggagcgcaattgcagagccccctgtaacatacagatggaggaccctacctttaaggaaaattatcggttccacgcaatcaacggatacattatggatacactccctggccttgtgatggctcaggaccaacgaatcaggtggtacctcctcagcatgggttctaatgagaacatacactccattcacttttcaggacatgtgttcactgtccggaagaaagaagagtataagatggccctctacaatttgtatccaggcgtgtttgagaccgttgaaatgcttccctctaaagctggcatctggagagtagagtgcttgatcggagaacatcttcacgcaggtatgagcaccttgttcctcgtgtacagcaacaaatgtcagaccccacttggcatggccagtggacacattcgcgactttcagatcacagcatctggccagtatggacaatgggccccaaagttggctcgcctccattactccggtagcataaatgcgtggtccactaaagaacctttcagctggattaaggtcgatcttcttgcccccatgatcatccacggcattaagacacagggagcgaggcagaaattctcctccctctacatctcacagttcattattatgtatagtttggacggcaagaagtggcaaacttatagaggtaacagtactggaacagacatggtgttcttcggcaacgttgatagctctggcatcaaacacaacatctttaatcctcccataatagctcggtacatcagattgcatccgacccactacagcattaggagtacactccgaatggagcttatgggttgcgacttgaattcctgttcaatgccactcggaatggagtctaaagccatctctgatgcacagataaccgccagtagctactttacgaacatgtttgctacgtggtcaccctctaaggcaaggcttcatttgcaaggccggtctaatgcctggagacctcaggtgaacaacccgaaagaatggctccaggtggactttcagaagaccatgaaagtaacaggtgtcactactcagggagttaagtccttggatactagcatgtatgtgaaggagttccttatttcctcatcacaagatggccaccagtggaccctcttctttcagaatggtaaggtcaaagtgtttcagggcaatcaagacagcttcacacccgtggtgaacagtcttgatcctccactcttgacacgataccttcgaatccatccacagtcttgggagcaccagattgcattgcgcatggaagtacttggatgcgaggctcaggacctctac

SEQ ID NO: 1024 - protein, 1457 aa, synthetic construct
  REGION 1..1457: note = Variant of human B-domain deleted Factor VIII
MQIELSTCFFLCLLRFCFSATRRYYLGAVELSWDYMQSDLGELPVDARFPPRVPKSFPFNTSVVYKKTLFVEFTDHLFNIAKPRPPWMGLLGPTIQAEVYDTVVITLKNMASHPVSLHAVGVSYWKASEGAEYDDQTSQREKEDDKVFPGGSHTYVWQVLKENGPMASDPPCLTYSYLSHVDLVKDLNSGLIGALLVCREGSLAKEKTQTLHKFILLFAVFDEGKSWHSETKNSLMQDRDAASARAWPKMHTVNGYVNRTLPGLIGCHRKSVYWHVIGMGTTPEVHSIFLEGHTFLVRNHRQASLGISPITFLTAQTLLMDLGQFLLFCHIPSHQHDGMEAYVKVDSCPEEPQLRMKNNEEAEDYDDDLTDSEMDVVRFDDDNSPSIIQARSVAKKHPKTWVHYIAAEEEDWDYAPLVLAPDDRSYKSQYLNNGPQRIGRKYKKVRFMAYTDETFKTREAIQHESGILGPLLYGEVGDTLLIIFKNQASRPYNIYPHGITDVRPLYSRRLPKGVKHLKDFPILPGEIFKYKWTVTVEDGPTKSDPRCLTRYYSSFVNMERDLASGLIGPLLICYKESVDQRGNQIMSDKRNVILFSVFDENRSWYLTENIQRFLPNPAGVQLEDPEFQASNIMHSINGYVFDSLQLSVCLHEVAYWYILSIGAQTDFLSVFFSGYTFKHKMVYEDTLTLFPFSGETVFMSMENPGLWILGCHNSDFRNRGMTALLKVSSCDKNTGDYYEDSYEDISAYFDSKDNAIEPRSFSQNPPVLKRHQREITRTTLQSDQEEIDYDDTISVEMKKEDFDIYDEDENQSPRSFQKKTRHYFIAAVERLWDYGMSSSPHVLRNRAQSGSVPQFKKVVFQEFTDGSFTQPLYRGELNEHLGLLGPYIRAEVEDNIMVTFRNQASRPYSFYSSLISYEEDQRQGAEPRKNFVKPNETKTYFWKVQHHMAPTKDEFDCKAWAYFSDVDLEKDVHSGLIGPLLVCHTNTLNPAHGRQVTVQEFALFFTIFDETKSWYFTENMERNCRAPCNIQMEDPTFKENYRFHAINGYIMDTLPGLVMAQDQRIRWYLLSMGSNENIHSIHFSGHVFTVRKKEEYKMALYNLYPGVFETVEMLPSKAGIWRVECLIGEHLHAGMSTLFLVYSNKCQTPLGMASGHIRDFQITASGQYGQWAPKLARLHYSGSINAWSTKEPFSWIKVDLLAPMIIHGIKTQGARQKFSSLYISQFIIMYSLDGKKWQTYRGNSTGTDMVFFGNVDSSGIKHNIFNPPIIARYIRLHPTHYSIRSTLRMELMGCDLNSCSMPLGMESKAISDAQITASSYFTNMFATWSPSKARLHLQGRSNAWRPQVNNPKEWLQVDFQKTMKVTGVTTQGVKSLDTSMYVKEFLISSSQDGHQWTLFFQNGKVKVFQGNQDSFTPVVNSLDPPLLTRYLRIHPQSWEHQIALRMEVLGCEAQDLY

SEQ ID NO: 1025 - DNA, 4371 bp, synthetic construct
  misc_feature 1..4371: note = Variant of human B-domain deleted Factor VIII
  source 1..4371: mol_type = other DNA
atgcagattgaactgtctacctgcttcttcctctgtttgctgaggttctgctttagcgccactagacggtactaccttggcgctgtggagctgtcctgggactatatgcagagtgatttgggagagcttcccgtcgacgcacgatttcctcctcgcgttccaaagtcatttccctttaacacaagcgtggtgtacaagaagacgctcttcgtcgaattcaccgatcacctgttcaatatcgccaaacccagaccaccatggatgggtcttttggggcctaccatacaagcggaggtgtatgacacagttgttatcactctcaagaacatggcttctcatccggtaagtcttcacgcagtgggcgtgtcctactggaaagcttcagaaggagccgagtatgatgatcagacatcccagagggagaaagaagacgacaaggtatttccaggtgggtctcatacctatgtgtggcaagtgctcaaagagaatggccctatggcaagcgatccgccgtgtttgacttacagctacctttcacacgttgacctcgtcaaggacctcaactccgggttgattggagccttgttggtatgcagggaaggatctcttgccaaagagaagacacagaccctccacaagtttatccttctctttgctgtgttcgatgagggcaaaagttggcatagcgaaacgaagaattccctcatgcaggatcgcgacgcagccagcgccagagcttggcccaagatgcacactgtgaacggatatgtcaataggacgcttcctggcttgattgggtgtcatcggaaaagtgtctactggcacgtgatcggaatggggacaacaccagaggtccactccatatttctcgaaggccataccttccttgttcgaaaccacagacaggcatccttggggatctctcccattacctttctcactgcccaaacgctccttatggacttgggtcagttccttctcttttgccatatcccgtcacaccagcatgatggtatggaagcttatgtgaaagtcgacagttgtcctgaggagccacagttgcgcatgaagaataatgaagaagccgaggattacgacgacgatctcaccgattctgagatggacgtggtgaggtttgatgacgacaactctccctccatcattcaagctcggagcggggcgaagaaacaccccaagacttgggtccactatatagcggcggaagaggaggattgggattacgctcctcttgtattggcaccagatgaccgctcatacaaaagccagtacctcaacaacggaccgcagagaattggccggaagtataagaaagtgcgatttatggcctatacagacgaaacctttaagacaagggaggccatccagcatgagagtgggattttgggacctcttctttacggcgaagttggtgataccctcctcatcatcttcaagaatcaagcttctcgcccctataacatttacccacacgggatcactgacgttaggcctttgtatagcagaagacttcccaaaggcgtgaagcatctcaaagacttccccattttgccaggcgagatctttaagtacaaatggaccgtcacagtggaagatggaccgactaaatcagaccctcgatgccttacgcggtactattcctccttcgtgaatatggagagagatttggcaagcggactcataggaccactcctcatctgttacaaggaatctgtagaccagaggggtaaccagattatgagtgataaacgcaatgtgatcctttttagcgtcttcgacgagaaccggtcctggtacttgaccgagaatatacaaaggttccttcccaaccccgcaggcgttcagttggaagaccctgagtttcaggccagcaatattatgcactcaatcaacggctatgtgtttgatagtctccagctttctgtttgcctccatgaagtagcctattggtacatcttgtcaattggtgctcaaacagacttcctctccgtcttcttctccggctacacctttaagcacaagatggtgtatgaggacactctcacactctttccattttctggagaaaccgtgttcatgagcatggagaatccaggcctttggatcttgggttgccacaacagtgattttcgcaatcggggaatgactgctctcctcaaagtcagcagctgtgattggaacacaggcgactattacgaagattcttacgaggacataagtgcctactttgactacaaaaataacgccattgagcccagatcattctcccagaatcctcccgtgcttaaaaggcatcagcgcgaaatcaccagaactactcttcagtctgatcaagaggagattgactatgacgacaccataagcgtggaaatgaagaaggaggatttcgatatctatgacgaagatgagaaccagtctccgcggagctttcagaagaagacgcgacactacttcattgcagcagtcgaaaggctttgggactacggtatgtcatcatcccctcatgtgttgcgcaatagagctcagagtggaagtgttccacagttcaagaaagtcgtctttcaagagtttacagatggcagcttcacacagcctctctatcggggcgagcttaacgaacatttgggactccttggtccctatatccgagccgaagtggaggacaacattatggttacctttaggaatcaagcctctcgcccctacagcttctactcctccctcatcagttatgaggaggatcagagacaaggcgctgaaccacggaagaactttgtgaaaccgaatgagacgaagacctacttctggaaagtacagcaccacatggcccccacaaaagacgaattcgattgcaaagcatgggcgtatttttcagacgttgacttggagaaagatgtacattcaggacttattggtcctttgttggtgtgtcacactaacactctcaatccagcccatggcaggcaggtgacagtccaggaattcgctcttttctttaccatctttgatgagaccaagtcctggtacttcacggaaaacatggagcgcaattgcagagccccctgtaacatacagatggaggaccctacctttaaggaaaattatcggttccacgcaatcaacggatacattatggatacactccctggccttgtgatggctcaggaccaacgaatcaggtggtacctcctcagcatgggttctaatgagaacatacactccattcacttttcaggacatgtgttcactgtccggaagaaagaagagtataagatggccctctacaatttgtatccaggcgtgtttgagaccgttgaaatgcttccctctaaagctggcatctggagagtagagtgcttgatcggagaacatcttcacgcaggtatgagcaccttgttcctcgtgtacagcaacaaatgtcagaccccacttggcatggccagtggacacattcgcgactttcagatcacagcatctggccagtatggacaatgggccccaaagttggctcgcctccattactccggtagcataaatgcgtggtccactaaagaacctttcagctggattaaggtcgatcttcttgcccccatgatcatccacggcattaagacacagggagcgaggcagaaattctcctccctctacatctcacagttcattattatgtatagtttggacggcaagaagtggcaaacttatagaggtaacagtactggaacagacatggtgttcttcggcaacgttgatagctctggcatcaaacacaacatctttaatcctcccataatagctcggtacatcagattgcatccgacccactacagcattaggagtacactccgaatggagcttatgggttgcgacttgaattcctgttcaatgccactcggaatggagtctaaagccatctctgatgcacagataaccgccagtagctactttacgaacatgtttgctacgtggtcaccctctaaggcaaggcttcatttgcaaggccggtctaatgcctggagacctcaggtgaacaacccgaaagaatggctccaggtggactttcagaagaccatgaaagtaacaggtgtcactactcagggagttaagtccttggatactagcatgtatgtgaaggagttccttatttcctcatcacaagatggccaccagtggaccctcttctttcagaatggtaaggtcaaagtgtttcagggcaatcaagacagcttcacacccgtggtgaacagtcttgatcctccactcttgacacgataccttcgaatccatccacagtcttgggagcaccagattgcattgcgcatggaagtacttggatgcgaggctcaggacctctac

SEQ ID NO: 1026 - protein, 1457 aa, synthetic construct
  REGION 1..1457: note = Variant of human B-domain deleted Factor VIII
MQIELSTCFFLCLLRFCFSATRRYYLGAVELSWDYMQSDLGELPVDARFPPRVPKSFPFNTSVVYKKTLFVEFTDHLFNIAKPRPPWMGLLGPTIQAEVYDTVVITLKNMASHPVSLHAVGVSYWKASEGAEYDDQTSQREKEDDKVFPGGSHTYVWQVLKENGPMASDPPCLTYSYLSHVDLVKDLNSGLIGALLVCREGSLAKEKTQTLHKFILLFAVFDEGKSWHSETKNSLMQDRDAASARAWPKMHTVNGYVNRTLPGLIGCHRKSVYWHVIGMGTTPEVHSIFLEGHTFLVRNHRQASLGISPITFLTAQTLLMDLGQFLLFCHIPSHQHDGMEAYVKVDSCPEEPQLRMKNNEEAEDYDDDLTDSEMDVVRFDDDNSPSIIQARSGAKKHPKTWVHYIAAEEEDWDYAPLVLAPDDRSYKSQYLNNGPQRIGRKYKKVRFMAYTDETFKTREAIQHESGILGPLLYGEVGDTLLIIFKNQASRPYNIYPHGITDVRPLYSRRLPKGVKHLKDFPILPGEIFKYKWTVTVEDGPTKSDPRCLTRYYSSFVNMERDLASGLIGPLLICYKESVDQRGNQIMSDKRNVILFSVFDENRSWYLTENIQRFLPNPAGVQLEDPEFQASNIMHSINGYVFDSLQLSVCLHEVAYWYILSIGAQTDFLSVFFSGYTFKHKMVYEDTLTLFPFSGETVFMSMENPGLWILGCHNSDFRNRGMTALLKVSSCDWNTGDYYEDSYEDISAYFDYKNNAIEPRSFSQNPPVLKRHQREITRTTLQSDQEEIDYDDTISVEMKKEDFDIYDEDENQSPRSFQKKTRHYFIAAVERLWDYGMSSSPHVLRNRAQSGSVPQFKKVVFQEFTDGSFTQPLYRGELNEHLGLLGPYIRAEVEDNIMVTFRNQASRPYSFYSSLISYEEDQRQGAEPRKNFVKPNETKTYFWKVQHHMAPTKDEFDCKAWAYFSDVDLEKDVHSGLIGPLLVCHTNTLNPAHGRQVTVQEFALFFTIFDETKSWYFTENMERNCRAPCNIQMEDPTFKENYRFHAINGYIMDTLPGLVMAQDQRIRWYLLSMGSNENIHSIHFSGHVFTVRKKEEYKMALYNLYPGVFETVEMLPSKAGIWRVECLIGEHLHAGMSTLFLVYSNKCQTPLGMASGHIRDFQITASGQYGQWAPKLARLHYSGSINAWSTKEPFSWIKVDLLAPMIIHGIKTQGARQKFSSLYISQFIIMYSLDGKKWQTYRGNSTGTDMVFFGNVDSSGIKHNIFNPPIIARYIRLHPTHYSIRSTLRMELMGCDLNSCSMPLGMESKAISDAQITASSYFTNMFATWSPSKARLHLQGRSNAWRPQVNNPKEWLQVDFQKTMKVTGVTTQGVKSLDTSMYVKEFLISSSQDGHQWTLFFQNGKVKVFQGNQDSFTPVVNSLDPPLLTRYLRIHPQSWEHQIALRMEVLGCEAQDLY

SEQ ID NO: 1027 - DNA, 4371 bp, synthetic construct
  misc_feature 1..4371: note = Variant of human B-domain deleted Factor VIII
  source 1..4371: mol_type = other DNA
atgcagattgaactgtctacctgcttcttcctctgtttgctgaggttctgctttagcgccactagacggtactaccttggcgctgtggagctgtcctgggactatatgcagagtgatttgggagagcttcccgtcgacgcacgatttcctcctcgcgttccaaagtcatttccctttaacacaagccaggtgtacaagaagacgctcttcgtcgaattcaccgatcacctgttcaatatcgccaaacccagaccaccatggatgggtcttttggggcctaccatacaagcggaggtgtatgacacagttgttatcactctcaagaacatggcttctcatccggtaagtcttcacgcagtgggcgtgtcctactggaaagcttcagaaggagccgagtatgatgatcagacatcccagagggagaaagaagacgacaaggtatttccaggtgggtctcatacctatgtgtggcaagtgctcaaagagaatggccctatggcaagcgatccgccgtgtttgacttacagctacctttcacacgttgacctcgtcaaggacctcaactccgggttgattggagccttgttggtatgcagggaaggatctcttgccaaagagaagacacagaccctccacaagtttatccttctctttgctgtgttcgatgagggcaaaagttggcatagcgaaacgaagaattccctcatgcaggatcgcgacgcagccagcgccagagcttggcccaagatgcacactgtgaacggatatgtcaataggacgcttcctggcttgattgggtgtcatcggaaaagtgtctactggcacgtgatcggaatggggacaacaccagaggtccactccatatttctcgaaggccataccttccttgttcgaaaccacagacaggcatccttggggatctctcccattacctttctcactgcccaaacgctccttatggacttgggtcagttccttctcttttgccatatcccgtcacaccagcatgatggtatggaagcttatgtgaaagtcgacagttgtcctgaggagccacagttgcgcatgaagaataatgaagaagccgaggattacgacgacgatctcaccgattctgagatggacgtggtgaggtttgatgacgacaactctccctccatcattcaagctcggagcgtggcgaagaaacaccccaagacttgggtccactatatagcggcggaagaggaggattgggattacgctcctcttgtattggcaccagatgaccgctcatacaaaagccagtacctcaacaacggaccgcagagaattggccggaagtataagaaagtgcgatttatggcctatacagacgaaacctttaagacaagggaggccatccagcatgagagtgggattttgggacctcttctttacggcgaagttggtgataccctcctcatcatcttcaagaatcaagcttctcgcccctataacatttacccacacgggatcactgacgttaggcctttgtatagcagaagacttcccaaaggcgtgaagcatctcaaagacttccccattttgccaggcgagatctttaagtacaaatggaccgtcacagtggaagatggaccgactaaatcagaccctcgatgccttacgcggtactattcctccttcgtgaatatggagagagatttggcaagcggactcataggaccactcctcatctgttacaaggaatctgtagaccagaggggtaaccagattatgagtgataaacgcaatgtgatcctttttagcgtcttcgacgagaaccggtcctggtacttgaccgagaatatacaaaggttccttcccaaccccgcaggcgttcagttggaagaccctgagtttcaggccagcaatattatgcactcaatcaacggctatgtgtttgatagtctccagctttctgtttgcctccatgaagtagcctattggtacatcttgtcaattggtgctcaaacagacttcctctccgtcttcttctccggctacacctttaagcacaagatggtgtatgaggacactctcacactctttccattttctggagaaaccgtgttcatgagcatggagaatccaggcctttggatcttgggttgccacaacagtgattttcgcaatcggggaatgactgctctcctcaaagtcagcagctgtgataagaacacaggcgactattacgaagattcttacgaggacataagtgcctactttgactccaagaataacgccattgagcccagatcattctcccagaatcctcccgtgcttaaaaggcatcagcgcgaaatcaccagaactactcttcagtctgatcaagaggagattgactatgacgacaccataagcgtggaatggaagaaggaggatttcgatatctatgacgaagatgagaaccagtctccgcggagctttcagaagaagacgcgacactacttcattgcagcagtcgaaaggctttgggactacggtatgtcatcatcccctcatgtgttgcgcaatagagctcagagtggaagtgttccacagttcaagaaagtcgtctttcaagagtttacagatggcagcttcacacagcctctctatcggggcgagcttaacgaacatttgggactccttggtccctatatccgagccgaagtggaggacaacattatggttacctttaggaatcaagcctctcgcccctacagcttctactcctccctcatcagttatgaggaggatcagagacaaggcgctgaaccacggaagaactttgtgaaaccgaatgagacgaagacctacttctggaaagtacagcaccacatggcccccacaaaagacgaattcgattgcaaagcatgggcgtatttttcagacgttgacttggagaaagatgtacattcaggacttattggtcctttgttggtgtgtcacactaacactctcaatccagcccatggcaggcaggtgacagtccaggaattcgctcttttctttaccatctttgatgagaccaagtcctggtacttcacggaaaacatggagcgcaattgcagagccccctgtaacatacagatggaggaccctacctttaaggaaaattatcggttccacgcaatcaacggatacattatggatacactccctggccttgtgatggctcaggaccaacgaatcaggtggtacctcctcagcatgggttctaatgagaacatacactccattcacttttcaggacatgtgttcactgtccggaagaaagaagagtataagatggccctctacaatttgtatccaggcgtgtttgagaccgttgaaatgcttccctctaaagctggcatctggagagtagagtgcttgatcggagaacatcttcacgcaggtatgagcaccttgttcctcgtgtacagcaacaaatgtcagaccccacttggcatggccagtggacacattcgcgactttcagatcacagcatctggccagtatggacaatgggccccaaagttggctcgcctccattactccggtagcataaatgcgtggtccactaaagaacctttcagctggattaaggtcgatcttcttgcccccatgatcatccacggcattaagacacagggagcgaggcagaaattctcctccctctacatctcacagttcattattatgtatagtttggacggcaagaagtggcaaacttatagaggtaacagtactggaacagacatggtgttcttcggcaacgttgatagctctggcatcaaacacaacatctttaatcctcccataatagctcggtacatcagattgcatccgacccactacagcattaggagtacactccgaatggagcttatgggttgcgacttgaattcctgttcaatgccactcggaatggagtctaaagccatctctgatgcacagataaccgccagtagctactttacgaacatgtttgctacgtggtcaccctctaaggcaaggcttcatttgcaaggccggtctaatgcctggagacctcaggtgaacaacccgaaagaatggctccaggtggactttcagaagaccatgaaagtaacaggtgtcactactcagggagttaagtccttggatactagcatgtatgtgaaggagttccttatttcctcatcacaagatggccaccagtggaccctcttctttcagaatggtaaggtcaaagtgtttcagggcaatcaagacagcttcacacccgtggtgaacagtcttgatcctccactcttgacacgataccttcgaatccatccacagtcttgggagcaccagattgcattgcgcatggaagtacttggatgcgaggctcaggacctctac

SEQ ID NO: 1028 - protein, 1457 aa, synthetic construct
  REGION 1..1457: note = Variant of human B-domain deleted Factor VIII
MQIELSTCFFLCLLRFCFSATRRYYLGAVELSWDYMQSDLGELPVDARFPPRVPKSFPFNTSQVYKKTLFVEFTDHLFNIAKPRPPWMGLLGPTIQAEVYDTVVITLKNMASHPVSLHAVGVSYWKASEGAEYDDQTSQREKEDDKVFPGGSHTYVWQVLKENGPMASDPPCLTYSYLSHVDLVKDLNSGLIGALLVCREGSLAKEKTQTLHKFILLFAVFDEGKSWHSETKNSLMQDRDAASARAWPKMHTVNGYVNRTLPGLIGCHRKSVYWHVIGMGTTPEVHSIFLEGHTFLVRNHRQASLGISPITFLTAQTLLMDLGQFLLFCHIPSHQHDGMEAYVKVDSCPEEPQLRMKNNEEAEDYDDDLTDSEMDVVRFDDDNSPSIIQARSVAKKHPKTWVHYIAAEEEDWDYAPLVLAPDDRSYKSQYLNNGPQRIGRKYKKVRFMAYTDETFKTREAIQHESGILGPLLYGEVGDTLLIIFKNQASRPYNIYPHGITDVRPLYSRRLPKGVKHLKDFPILPGEIFKYKWTVTVEDGPTKSDPRCLTRYYSSFVNMERDLASGLIGPLLICYKESVDQRGNQIMSDKRNVILFSVFDENRSWYLTENIQRFLPNPAGVQLEDPEFQASNIMHSINGYVFDSLQLSVCLHEVAYWYILSIGAQTDFLSVFFSGYTFKHKMVYEDTLTLFPFSGETVFMSMENPGLWILGCHNSDFRNRGMTALLKVSSCDKNTGDYYEDSYEDISAYFDSKNNAIEPRSFSQNPPVLKRHQREITRTTLQSDQEEIDYDDTISVEWKKEDFDIYDEDENQSPRSFQKKTRHYFIAAVERLWDYGMSSSPHVLRNRAQSGSVPQFKKVVFQEFTDGSFTQPLYRGELNEHLGLLGPYIRAEVEDNIMVTFRNQASRPYSFYSSLISYEEDQRQGAEPRKNFVKPNETKTYFWKVQHHMAPTKDEFDCKAWAYFSDVDLEKDVHSGLIGPLLVCHTNTLNPAHGRQVTVQEFALFFTIFDETKSWYFTENMERNCRAPCNIQMEDPTFKENYRFHAINGYIMDTLPGLVMAQDQRIRWYLLSMGSNENIHSIHFSGHVFTVRKKEEYKMALYNLYPGVFETVEMLPSKAGIWRVECLIGEHLHAGMSTLFLVYSNKCQTPLGMASGHIRDFQITASGQYGQWAPKLARLHYSGSINAWSTKEPFSWIKVDLLAPMIIHGIKTQGARQKFSSLYISQFIIMYSLDGKKWQTYRGNSTGTDMVFFGNVDSSGIKHNIFNPPIIARYIRLHPTHYSIRSTLRMELMGCDLNSCSMPLGMESKAISDAQITASSYFTNMFATWSPSKARLHLQGRSNAWRPQVNNPKEWLQVDFQKTMKVTGVTTQGVKSLDTSMYVKEFLISSSQDGHQWTLFFQNGKVKVFQGNQDSFTPVVNSLDPPLLTRYLRIHPQSWEHQIALRMEVLGCEAQDLY

SEQ ID NO: 1029 - DNA, 4371 bp, synthetic construct
  misc_feature 1..4371: note = Variant of human B-domain deleted Factor VIII
  source 1..4371: mol_type = other DNA
atgcagattgaactgtctacctgcttcttcctctgtttgctgaggttctgctttagcgccactagacggtactaccttggcgctgtggagctgtcctgggactatatgcagagtgatttgggagagcttcccgtcgacgcacgatttcctcctcgcgttccaaagtcatttccctttaacacaagcgtggtgtacaagaagacgctcttcgtcgaattcaccgatcacctgttcaatatcgccaaacccagaccaccatggatgggtcttttggggcctaccatacaagcggaggtgtatgacacagttgttatcactctcaagaacatggcttctcatccggtaagtcttcacgcagtgggcgtgtcctactggaaagcttcagaaggagccgagtatgatgatcagacatcccagagggagaaagaagacgacaaggtatttccaggtgggtctcatacctatgtgtggcaagtgctcaaagagaatggccctatggcaagcgatccgccgtgtttgacttacagctacctttcacacgttgacctcgtcaaggacctcaactccgggttgattggagccttgttggtatgcagggaaggatctcttgccaaagagaagacacagaccctccacaagtttatccttctctttgctgtgttcgatgagggcaaaagttggcatagcgaaacgaagaattccctcatgcaggatcgcgacgcagccagcgccagagcttggcccaagatgcacactgtgaacggatatgtcaataggacgcttcctggcttgattgggtgtcatcggaaaagtgtctactggcacgtgatcggaatggggacaacaccagaggtccactccatatttctcgaaggccataccttccttgttcgaaaccacagacaggcatccttggggatctctcccattacctttctcactgcccaaacgctccttatggacttgggtcagttccttctcttttgccatatcccgtcacaccagcatgatggtatggaagcttatgtgaaagtcgacagttgtcctgaggagccacagttgcgcatgaagaataatgaagaagccgaggattacgacgacgatctcaccgattctgagatggacgtggtgaggtttgatgacgacaactctccctccatcattcaagctcggagcgtggcgaagaaacaccccaagacttgggtccactatatagcggcggaagaggaggattgggattacgctcctcttgtattggcaccagatgaccgctcatacaaaagccagtacctcaacaacggaccgcagagaattggccggaagtataagaaagtgcgatttatggcctatacagacgaaacctttaagacaagggaggccatccagcatgagagtgggattttgggacctcttctttacggcgaagttggtgataccctcctcatcatcttcaagaatcaagcttctcgcccctataacatttacccacacgggatcactgacgttaggcctttgtatagcagaagacttcccaaaggcgtgaagcatctcaaagacttccccattttgccaggcgagatctttaagtacaaatggaccgtcacagtggaagatggaccgactaaatcagaccctcgatgccttacgcggtactattcctccttcgtgaatatggagagagatttggcaagcggactcataggaccactcctcatctgttacaaggaatctgtagaccagaggggtaaccagattatgagtgataaacgcaatgtgatcctttttagcgtcttcgacgagaaccggtcctggtacttgaccgagaatatacaaaggttccttcccaaccccgcaggcgttcaggatgaagaccctgagtttcaggccagcaatattatgcactcaatcaacggctatgtgtttgatagtctccagctttctgtttgcctccatgaagtagcctattggtacatcttgtcaattggtgctcaaacagacttcctctccgtcttcttctccggctacacctttaagcacaagatggtgtatgaggacactctcacactctttccattttctggagaaaccgtgttcatgagcatggagaatccaggcctttggatcttgggttgccacaacagtgattttcgcaatcggggaatgactgctctcctcaaagtcagcagctgtgataagaacacaggcgactattacgaagattcttacgaggacataagtgcctactttgactccaagaataacgccattgagcccagatcattctcccagaatcctcccgtgcttaaaaggcatcagcgcgaaatcaccagaactactcttcagtctgatcaagaggagattgactatgacgacaccataagcgtggaaatgaagaaggaggatttcgatatctatgacgaagatgagaaccagtctccgcggagctttcagaagaagacgcgacactacttcattgcagcagtcgaaaggctttgggactacggtatgtcatcatcccctcatgtgttgcgcaatagagctcagagtggaagtgttccacagttcaagaaagtcgtctttcaagagtttacagatggcagcttcacacagcctctctatcggggcgagcttaacgaacatttgggactccttggtccctatatccgagccgaagtggaggacaacattatggttacctttaggaatcaagcctctcgcccctacagcttctactcctccctcatcagttatgaggaggatcagagacaaggcgctgaaccacggaagaactttgtgaaaccgaatgagacgaagacctacttctggaaagtacagcaccacatggcccccacaaaagacgaattcgattgcaaagcatgggcgtatttttcagacgttgacttggagaaagatgtacattcaggacttattggtcctttgttggtgtgtcacactaacactctcaatccagcccatggcaggcaggtgacagtccaggaattcgctcttttctttaccatctttgatgagaccaagtcctggtacttcacggaaaacatggagcgcaattgcagagccccctgtaacatacagatggaggaccctacctttaaggaaaattatcggttccacgcaatcaacggatacattatggatacactccctggccttgtgatggctcaggaccaacgaatcaggtggtacctcctcagcatgggttctaatgagaacatacactccattcacttttcaggacatgtgttcactgtccggaagaaagaagagtataagatggccctctacaatttgtatccaggcgtgtttgagaccgttgaaatgcttccctctaaagctggcatctggagagtagagtgcttgatcggagaacatcttcacgcaggtatgagcaccttgttcctcgtgtacagcaacaaatgtcagaccccacttggcatggccagtggacacattcgcgactttcagatcacagcatctggccagtatggacaatgggccccaaagttggctcgcctccattactccggtagcataaatgcgtggtccactaaagaacctttcagctggattaaggtcgatcttcttgcccccatgatcatccacggcattaagacacagggagcgaggcagaaattctcctccctctacatctcacagttcattattatgtatagtttggacggcaagaagtggcaaacttatagaggtaacagtactggaacagacatggtgttcttcggcaacgttgatagctctggcatcaaacacaacatctttaatcctcccataatagctcggtacatcagattgcatccgacccactacagcattaggagtacactccgaatggagcttatgggttgcgacttgaattcctgttcaatgccactcggaatggagtctaaagccatctctgatgcacagataaccgccagtagctactttacgaacatgtttgctacgtggtcaccctctaaggcaaggcttcatttgcaaggccggtctaatgcctggagacctcaggtgaacaacccgaaagaatggctccaggtggactttcagaagaccatgaaagtaacaggtgtcactactcagggagttaagtccttggatactagcatgtatgtgaaggagttccttatttcctcatcacaagatggccaccagtggaccctcttctttcagaatggtaaggtcaaagtgtttcagggcaatcaagacagcttcacacccgtggtgaacagtcttgatcctccactcttgacacgataccttcgaatccatccacagtcttgggagcaccagattgcattgcgcatggaagtacttggatgcgaggctcaggacctctac

SEQ ID NO: 1030 - protein, 1457 aa, synthetic construct
  REGION 1..1457: note = Variant of human B-domain deleted Factor VIII
MQIELSTCFFLCLLRFCFSATRRYYLGAVELSWDYMQSDLGELPVDARFPPRVPKSFPFNTSVVYKKTLFVEFTDHLFNIAKPRPPWMGLLGPTIQAEVYDTVVITLKNMASHPVSLHAVGVSYWKASEGAEYDDQTSQREKEDDKVFPGGSHTYVWQVLKENGPMASDPPCLTYSYLSHVDLVKDLNSGLIGALLVCREGSLAKEKTQTLHKFILLFAVFDEGKSWHSETKNSLMQDRDAASARAWPKMHTVNGYVNRTLPGLIGCHRKSVYWHVIGMGTTPEVHSIFLEGHTFLVRNHRQASLGISPITFLTAQTLLMDLGQFLLFCHIPSHQHDGMEAYVKVDSCPEEPQLRMKNNEEAEDYDDDLTDSEMDVVRFDDDNSPSIIQARSVAKKHPKTWVHYIAAEEEDWDYAPLVLAPDDRSYKSQYLNNGPQRIGRKYKKVRFMAYTDETFKTREAIQHESGILGPLLYGEVGDTLLIIFKNQASRPYNIYPHGITDVRPLYSRRLPKGVKHLKDFPILPGEIFKYKWTVTVEDGPTKSDPRCLTRYYSSFVNMERDLASGLIGPLLICYKESVDQRGNQIMSDKRNVILFSVFDENRSWYLTENIQRFLPNPAGVQDEDPEFQASNIMHSINGYVFDSLQLSVCLHEVAYWYILSIGAQTDFLSVFFSGYTFKHKMVYEDTLTLFPFSGETVFMSMENPGLWILGCHNSDFRNRGMTALLKVSSCDKNTGDYYEDSYEDISAYFDSKNNAIEPRSFSQNPPVLKRHQREITRTTLQSDQEEIDYDDTISVEMKKEDFDIYDEDENQSPRSFQKKTRHYFIAAVERLWDYGMSSSPHVLRNRAQSGSVPQFKKVVFQEFTDGSFTQPLYRGELNEHLGLLGPYIRAEVEDNIMVTFRNQASRPYSFYSSLISYEEDQRQGAEPRKNFVKPNETKTYFWKVQHHMAPTKDEFDCKAWAYFSDVDLEKDVHSGLIGPLLVCHTNTLNPAHGRQVTVQEFALFFTIFDETKSWYFTENMERNCRAPCNIQMEDPTFKENYRFHAINGYIMDTLPGLVMAQDQRIRWYLLSMGSNENIHSIHFSGHVFTVRKKEEYKMALYNLYPGVFETVEMLPSKAGIWRVECLIGEHLHAGMSTLFLVYSNKCQTPLGMASGHIRDFQITASGQYGQWAPKLARLHYSGSINAWSTKEPFSWIKVDLLAPMIIHGIKTQGARQKFSSLYISQFIIMYSLDGKKWQTYRGNSTGTDMVFFGNVDSSGIKHNIFNPPIIARYIRLHPTHYSIRSTLRMELMGCDLNSCSMPLGMESKAISDAQITASSYFTNMFATWSPSKARLHLQGRSNAWRPQVNNPKEWLQVDFQKTMKVTGVTTQGVKSLDTSMYVKEFLISSSQDGHQWTLFFQNGKVKVFQGNQDSFTPVVNSLDPPLLTRYLRIHPQSWEHQIALRMEVLGCEAQDLY

SEQ ID NO: 1031 - DNA, 4371 bp, synthetic construct
  misc_feature 1..4371: note = Variant of human B-domain deleted Factor VIII
  source 1..4371: mol_type = other DNA
atgcagattgaactgtctacctgcttcttcctctgtttgctgaggttctgctttagcgccactagacggtactaccttggcgctgtggagctgtcctgggactatatgcagagtgatttgggagagcttcccgtcgacgcacgatttcctcctcgcgttccaaagtcatttccctttaacacaagcgtggtgtacaagaagacgctcttcgtcgaattcaccgatcacctgttcaatatcgccaaacccagaccaccatggatgggtcttttggggcctaccatacaagcggaggtgtatgacacagttgttatcactctcaagaacatggcttctcatccggtaagtcttcacgcagtgggcgtgtcctactggaaagcttcagaaggagccgagtatgatgatcagacatcccagagggagaaagaagacgacaaggtatttccaggtgggtctcatacctatgtgtggcaagtgctcaaagagaatggccctatggcaagcgatccgccgtgtttgacttacagctacctttcacacgttgacctcgtcaaggacctcaactccgggttgattggagccttgttggtatgcagggaaggatctcttgccaaagagaagacacagaccctccacaagtttatccttctctttgctgtgttcgatgagggcaaaagttggcatagcgaaacgaagaattccctcatgcaggatcgcgacgcagccagcgccagagcttggcccaagatgcacactgtgaacggatatgtcaataggacgcttcctggcttgattgggtgtcatcggaaaagtgtctactggcacgtgatcggaatggggacaacaccagaggtccactccatatttctcgaaggccataccttccttgttcgaaaccacagacaggcatccttggggatctctcccattacctttctcactgcccaaacgctccttatggacttgggtcagttccttctcttttgccatatcccgtcacaccagcatgatggtatggaagcttatgtgaaagtcgacagttgtcctgaggagccacagttgcgcatgaagaataatgaagaagccgaggattacgacgacgatctcaccgattctgagatggacgtggtgaggtttgatgacgacaactctccctccatcattcaagctcggagcgtggcgaagaaacaccccaagacttgggtccactatatagcggcggaagaggaggattgggattacgctcctcttgtattggcaccagatgaccgctcatacaaaagccagtacctcaacaacggaccgcagagaattggccggaagtataagaaagtgcgatttatggcctatacagacgaaacctttaagacaagggaggccatccagcatgagagtgggattttgggacctcttctttacggcgaagttggtgataccctcctcatcatcttcaagaatcaagcttctcgcccctataacatttacccacacgggatcactgacgttaggcctttgtatagcagaagacttcccaaaggcgtgaagcatctcaaagacttccccattttgccaggcgagatctttaagtacaaatggaccgtcacagtggaagatggaccgactaaatcagaccctcgatgccttacgcggtactattcctccttcgtgaatatggagagagatttggcaagcggactcataggaccactcctcatctgttacaaggaatctgtagaccagaggggtaaccagattatgagtgataaacgcaatgtgatcctttttagcgtcttcgacgagaaccggtcctggtacttgaccgagaatatacaaaggttccttcccaacgaagcaggcgttcagttggaagaccctgagtttcaggccagcaatattatgcactcaatcaacggctatgtgtttgatagtctccagctttctgtttgcctccatgaagtagcctattggtacatcttgtcaattggtgctcaaacagacttcctctccgtcttcttctccggctacacctttaagcacaagatggtgtatgaggacactctcacactctttccattttctggagaaaccgtgttcatgagcatggagaatccaggcctttggatcttgggttgccacaacagtgattttcgcaatcggggaatgactgctctcctcaaagtcagcagctgtgataagaacacaggcgactattacgaagattcttacgaggacataagtgcctactttgactccaagaataacgccattgagcccagatcattctcccagaatcctcccgtgcttaaaaggcatcagcgcgaaatcaccagaactactcttcagtctgatcaagaggagattgactatgacgacaccataagcgtggaaatgaagaaggaggatttcgatatctatgacgaagatgagaaccagtctccgcggagctttcagaagaagacgcgacactacttcattgcagcagtcgaaaggctttgggactacggtatgtcatcatcccctcatgtgttgcgcaatagagctcagagtggaagtgttccacagttcaagaaagtcgtctttcaagagtttacagatggcagcttcacacagcctctctatcggggcgagcttaacgaacatttgggactccttggtccctatatccgagccgaagtggaggacaacattatggttacctttaggaatcaagcctctcgcccctacagcttctactcctccctcatcagttatgaggaggatcagagacaaggcgctgaaccacggaagaactttgtgaaaccgaatgagacgaagacctacttctggaaagtacagcaccacatggcccccacaaaagacgaattcgattgcaaagcatgggcgtatttttcagacgttgacttggagaaagatgtacattcaggacttattggtcctttgttggtgtgtcacactaacactctcaatccagcccatggcaggcaggtgacagtccaggaattcgctcttttctttaccatctttgatgagaccaagtcctggtacttcacggaaaacatggagcgcaattgcagagccccctgtaacatacagatggaggaccctacctttaaggaaaattatcggttccacgcaatcaacggatacattatggatacactccctggccttgtgatggctcaggaccaacgaatcaggtggtacctcctcagcatgggttctaatgagaacatacactccattcacttttcaggacatgtgttcactgtccggaagaaagaagagtataagatggccctctacaatttgtatccaggcgtgtttgagaccgttgaaatgcttccctctaaagctggcatctggagagtagagtgcttgatcggagaacatcttcacgcaggtatgagcaccttgttcctcgtgtacagcaacaaatgtcagaccccacttggcatggccagtggacacattcgcgactttcagatcacagcatctggccagtatggacaatgggccccaaagttggctcgcctccattactccggtagcataaatgcgtggtccactaaagaacctttcagctggattaaggtcgatcttcttgcccccatgatcatccacggcattaagacacagggagcgaggcagaaattctcctccctctacatctcacagttcattattatgtatagtttggacggcaagaagtggcaaacttatagaggtaacagtactggaacagacatggtgttcttcggcaacgttgatagctctggcatcaaacacaacatctttaatcctcccataatagctcggtacatcagattgcatccgacccactacagcattaggagtacactccgaatggagcttatgggttgcgacttgaattcctgttcaatgccactcggaatggagtctaaagccatctctgatgcacagataaccgccagtagctactttacgaacatgtttgctacgtggtcaccctctaaggcaaggcttcatttgcaaggccggtctaatgcctggagacctcaggtgaacaacccgaaagaatggctccaggtggactttcagaagaccatgaaagtaacaggtgtcactactcagggagttaagtccttggatactagcatgtatgtgaaggagttccttatttcctcatcacaagatggccaccagtggaccctcttctttcagaatggtaaggtcaaagtgtttcagggcaatcaagacagcttcacacccgtggtgaacagtcttgatcctccactcttgacacgataccttcgaatccatccacagtcttgggagcaccagattgcattgcgcatggaagtacttggatgcgaggctcaggacctctac

SEQ ID NO: 1032 - protein, 1457 aa, synthetic construct
  REGION 1..1457: note = Variant of human B-domain deleted Factor VIII
MQIELSTCFFLCLLRFCFSATRRYYLGAVELSWDYMQSDLGELPVDARFPPRVPKSFPFNTSVVYKKTLFVEFTDHLFNIAKPRPPWMGLLGPTIQAEVYDTVVITLKNMASHPVSLHAVGVSYWKASEGAEYDDQTSQREKEDDKVFPGGSHTYVWQVLKENGPMASDPPCLTYSYLSHVDLVKDLNSGLIGALLVCREGSLAKEKTQTLHKFILLFAVFDEGKSWHSETKNSLMQDRDAASARAWPKMHTVNGYVNRTLPGLIGCHRKSVYWHVIGMGTTPEVHSIFLEGHTFLVRNHRQASLGISPITFLTAQTLLMDLGQFLLFCHIPSHQHDGMEAYVKVDSCPEEPQLRMKNNEEAEDYDDDLTDSEMDVVRFDDDNSPSIIQARSVAKKHPKTWVHYIAAEEEDWDYAPLVLAPDDRSYKSQYLNNGPQRIGRKYKKVRFMAYTDETFKTREAIQHESGILGPLLYGEVGDTLLIIFKNQASRPYNIYPHGITDVRPLYSRRLPKGVKHLKDFPILPGEIFKYKWTVTVEDGPTKSDPRCLTRYYSSFVNMERDLASGLIGPLLICYKESVDQRGNQIMSDKRNVILFSVFDENRSWYLTENIQRFLPNEAGVQLEDPEFQASNIMHSINGYVFDSLQLSVCLHEVAYWYILSIGAQTDFLSVFFSGYTFKHKMVYEDTLTLFPFSGETVFMSMENPGLWILGCHNSDFRNRGMTALLKVSSCDKNTGDYYEDSYEDISAYFDSKNNAIEPRSFSQNPPVLKRHQREITRTTLQSDQEEIDYDDTISVEMKKEDFDIYDEDENQSPRSFQKKTRHYFIAAVERLWDYGMSSSPHVLRNRAQSGSVPQFKKVVFQEFTDGSFTQPLYRGELNEHLGLLGPYIRAEVEDNIMVTFRNQASRPYSFYSSLISYEEDQRQGAEPRKNFVKPNETKTYFWKVQHHMAPTKDEFDCKAWAYFSDVDLEKDVHSGLIGPLLVCHTNTLNPAHGRQVTVQEFALFFTIFDETKSWYFTENMERNCRAPCNIQMEDPTFKENYRFHAINGYIMDTLPGLVMAQDQRIRWYLLSMGSNENIHSIHFSGHVFTVRKKEEYKMALYNLYPGVFETVEMLPSKAGIWRVECLIGEHLHAGMSTLFLVYSNKCQTPLGMASGHIRDFQITASGQYGQWAPKLARLHYSGSINAWSTKEPFSWIKVDLLAPMIIHGIKTQGARQKFSSLYISQFIIMYSLDGKKWQTYRGNSTGTDMVFFGNVDSSGIKHNIFNPPIIARYIRLHPTHYSIRSTLRMELMGCDLNSCSMPLGMESKAISDAQITASSYFTNMFATWSPSKARLHLQGRSNAWRPQVNNPKEWLQVDFQKTMKVTGVTTQGVKSLDTSMYVKEFLISSSQDGHQWTLFFQNGKVKVFQGNQDSFTPVVNSLDPPLLTRYLRIHPQSWEHQIALRMEVLGCEAQDLY

SEQ ID NO: 1033 - DNA, 4371 bp, synthetic construct
  misc_feature 1..4371: note = Variant of human B-domain deleted Factor VIII
  source 1..4371: mol_type = other DNA
atgcagattgaactgtctacctgcttcttcctctgtttgctgaggttctgctttagcgccactagacggtactaccttggcgctgtggagctgtcctgggactatatgcagagtgatttgggagagcttcccgtcgacgcacgatttcctcctcgcgttccaaagtcatttccctttaacacaagcgtggtgtacaagaagacgctcttcgtcgaattcaccgatcacctgttcaatatcgccaaacccagaccaccatggatgggtcttttggggcctaccatacaagcggaggtgtatgacacagttgttatcactctcaagaacatggcttctcatccggtaagtcttcacgcagtgggcgtgtcctactggaaagcttcagaaggagccgagtatgatgatcagacatcccagagggagaaagaagacgacaaggtatttccaggtgggtctcatacctatgtgtggcaagtgctcaaagagaatggccctatggcaagcgatccgccgtgtttgacttacagctacctttcacacgttgacctcgtcaaggacctcaactccgggttgattggagccttgttggtatgcagggaaggatctcttgccaaagagaagacacagaccctccacaagtttatccttctctttgctgtgttcgatgagggcaaaagttggcatagcgaaacgaagaattccctcatgcaggatcgcgacgcagccagcgccagagcttggcccaagatgcacactgtgaacggatatgtcaataggacgcttcctggcttgattgggtgtcatcggaaaagtgtctactggcacgtgatcggaatggggacaacaccagaggtccactccatatttctcgaaggccataccttccttgttcgaaaccacagacaggcatccttggggatctctcccattacctttctcactgcccaaacgctccttatggacttgggtcagttccttctcttttgccatatcccgtcacaccagcatgatggtatggaagcttatgtgaaagtcgacagttgtcctgaggagccacagttgcgcatgaagaataatgaagaagccgaggattacgacgacgatctcaccgattctgagatggacgtggtgaggtttgatgacgacaactctccctccatcattcaagctcggagcgtggcgaagaaacaccccaagacttgggtccactatatagcggcggaagaggaggattgggattacgctcctcttgtattggcaccagatgaccgctcatacaaaagccagtacctcaacaacggaccgcagagaattggccggaagtataagaaagtgcgatttatggcctatacagacgaaacctttaagacaagggaggccatccagcatgagagtgggattttgggacctcttctttacggcgaagttggtgataccctcctcatcatcttcaagaatcaagcttctcgcccctataacatttacccacacgggatcactgacgttaggcctttgtatagcagaagacttcccaaaggcgtgaagcatctcaaagacttccccattttgccaggcgagatctttaagtacaaatggaccgtcacagtggaagatggaccgactaaatcagaccctcgatgccttacgcggtactattcctccttcgtgaatatggagagagatttggcaagcggactcataggaccactcctcatctgttacaaggaatctgtagaccagaggggtaaccagattatgagtgataaacgcaatgtgatcctttttagcgtcttcgacgagaaccggtcctggtacttgaccgagaatatacaaaggttccttcccaacaatgcaggcgttcagttggaagaccctgagtttcaggccagcaatattatgcactcaatcaacggctatgtgtttgatagtctccagctttctgtttgcctccatgaagtagcctattggtacatcttgtcaattggtgctcaaacagacttcctctccgtcttcttctccggctacacctttaagcacaagatggtgtatgaggacactctcacactctttccattttctggagaaaccgtgttcatgagcatggagaatccaggcctttggatcttgggttgccacaacagtgattttcgcaatcggggaatgactgctctcctcaaagtcagcagctgtgataagaacacaggcgactattacgaagattcttacgaggacataagtgcctactttgactccaagaataacgccattgagcccagatcattctcccagaatcctcccgtgcttaaaaggcatcagcgcgaaatcaccagaactactcttcagtctgatcaagaggagattgactatgacgacaccataagcgtggaaatgaagaaggaggatttcgatatctatgacgaagatgagaaccagtctccgcggagctttcagaagaagacgcgacactacttcattgcagcagtcgaaaggctttgggactacggtatgtcatcatcccctcatgtgttgcgcaatagagctcagagtggaagtgttccacagttcaagaaagtcgtctttcaagagtttacagatggcagcttcacacagcctctctatcggggcgagcttaacgaacatttgggactccttggtccctatatccgagccgaagtggaggacaacattatggttacctttaggaatcaagcctctcgcccctacagcttctactcctccctcatcagttatgaggaggatcagagacaaggcgctgaaccacggaagaactttgtgaaaccgaatgagacgaagacctacttctggaaagtacagcaccacatggcccccacaaaagacgaattcgattgcaaagcatgggcgtatttttcagacgttgacttggagaaagatgtacattcaggacttattggtcctttgttggtgtgtcacactaacactctcaatccagcccatggcaggcaggtgacagtccaggaattcgctcttttctttaccatctttgatgagaccaagtcctggtacttcacggaaaacatggagcgcaattgcagagccccctgtaacatacagatggaggaccctacctttaaggaaaattatcggttccacgcaatcaacggatacattatggatacactccctggccttgtgatggctcaggaccaacgaatcaggtggtacctcctcagcatgggttctaatgagaacatacactccattcacttttcaggacatgtgttcactgtccggaagaaagaagagtataagatggccctctacaatttgtatccaggcgtgtttgagaccgttgaaatgcttccctctaaagctggcatctggagagtagagtgcttgatcggagaacatcttcacgcaggtatgagcaccttgttcctcgtgtacagcaacaaatgtcagaccccacttggcatggccagtggacacattcgcgactttcagatcacagcatctggccagtatggacaatgggccccaaagttggctcgcctccattactccggtagcataaatgcgtggtccactaaagaacctttcagctggattaaggtcgatcttcttgcccccatgatcatccacggcattaagacacagggagcgaggcagaaattctcctccctctacatctcacagttcattattatgtatagtttggacggcaagaagtggcaaacttatagaggtaacagtactggaacagacatggtgttcttcggcaacgttgatagctctggcatcaaacacaacatctttaatcctcccataatagctcggtacatcagattgcatccgacccactacagcattaggagtacactccgaatggagcttatgggttgcgacttgaattcctgttcaatgccactcggaatggagtctaaagccatctctgatgcacagataaccgccagtagctactttacgaacatgtttgctacgtggtcaccctctaaggcaaggcttcatttgcaaggccggtctaatgcctggagacctcaggtgaacaacccgaaagaatggctccaggtggactttcagaagaccatgaaagtaacaggtgtcactactcagggagttaagtccttggatactagcatgtatgtgaaggagttccttatttcctcatcacaagatggccaccagtggaccctcttctttcagaatggtaaggtcaaagtgtttcagggcaatcaagacagcttcacacccgtggtgaacagtcttgatcctccactcttgacacgataccttcgaatccatccacagtcttgggagcaccagattgcattgcgcatggaagtacttggatgcgaggctcaggacctctac

SEQ ID NO: 1034 - protein, 1457 aa, synthetic construct
  REGION 1..1457: note = Variant of human B-domain deleted Factor VIII
MQIELSTCFFLCLLRFCFSATRRYYLGAVELSWDYMQSDLGELPVDARFPPRVPKSFPFNTSVVYKKTLFVEFTDHLFNIAKPRPPWMGLLGPTIQAEVYDTVVITLKNMASHPVSLHAVGVSYWKASEGAEYDDQTSQREKEDDKVFPGGSHTYVWQVLKENGPMASDPPCLTYSYLSHVDLVKDLNSGLIGALLVCREGSLAKEKTQTLHKFILLFAVFDEGKSWHSETKNSLMQDRDAASARAWPKMHTVNGYVNRTLPGLIGCHRKSVYWHVIGMGTTPEVHSIFLEGHTFLVRNHRQASLGISPITFLTAQTLLMDLGQFLLFCHIPSHQHDGMEAYVKVDSCPEEPQLRMKNNEEAEDYDDDLTDSEMDVVRFDDDNSPSIIQARSVAKKHPKTWVHYIAAEEEDWDYAPLVLAPDDRSYKSQYLNNGPQRIGRKYKKVRFMAYTDETFKTREAIQHESGILGPLLYGEVGDTLLIIFKNQASRPYNIYPHGITDVRPLYSRRLPKGVKHLKDFPILPGEIFKYKWTVTVEDGPTKSDPRCLTRYYSSFVNMERDLASGLIGPLLICYKESVDQRGNQIMSDKRNVILFSVFDENRSWYLTENIQRFLPNNAGVQLEDPEFQASNIMHSINGYVFDSLQLSVCLHEVAYWYILSIGAQTDFLSVFFSGYTFKHKMVYEDTLTLFPFSGETVFMSMENPGLWILGCHNSDFRNRGMTALLKVSSCDKNTGDYYEDSYEDISAYFDSKNNAIEPRSFSQNPPVLKRHQREITRTTLQSDQEEIDYDDTISVEMKKEDFDIYDEDENQSPRSFQKKTRHYFIAAVERLWDYGMSSSPHVLRNRAQSGSVPQFKKVVFQEFTDGSFTQPLYRGELNEHLGLLGPYIRAEVEDNIMVTFRNQASRPYSFYSSLISYEEDQRQGAEPRKNFVKPNETKTYFWKVQHHMAPTKDEFDCKAWAYFSDVDLEKDVHSGLIGPLLVCHTNTLNPAHGRQVTVQEFALFFTIFDETKSWYFTENMERNCRAPCNIQMEDPTFKENYRFHAINGYIMDTLPGLVMAQDQRIRWYLLSMGSNENIHSIHFSGHVFTVRKKEEYKMALYNLYPGVFETVEMLPSKAGIWRVECLIGEHLHAGMSTLFLVYSNKCQTPLGMASGHIRDFQITASGQYGQWAPKLARLHYSGSINAWSTKEPFSWIKVDLLAPMIIHGIKTQGARQKFSSLYISQFIIMYSLDGKKWQTYRGNSTGTDMVFFGNVDSSGIKHNIFNPPIIARYIRLHPTHYSIRSTLRMELMGCDLNSCSMPLGMESKAISDAQITASSYFTNMFATWSPSKARLHLQGRSNAWRPQVNNPKEWLQVDFQKTMKVTGVTTQGVKSLDTSMYVKEFLISSSQDGHQWTLFFQNGKVKVFQGNQDSFTPVVNSLDPPLLTRYLRIHPQSWEHQIALRMEVLGCEAQDLY

SEQ ID NO: 1035 - DNA, 4371 bp, synthetic construct
  misc_feature 1..4371: note = Variant of human B-domain deleted Factor VIII
  source 1..4371: mol_type = other DNA
atgcagattgaactgtctacctgcttcttcctctgtttgctgaggttctgctttagcgccactagacggtactaccttggcgctgtggagctgtcctgggactatatgcagagtgatttgggagagcttcccgtcgacgcacgatttcctcctcgcgttccaaagtcatttccctttaacacaagcgtggtgtacaagaagacgctcttcgtcgaattcaccgatcacctgttcaatatcgccaaacccagaccaccatggatgggtcttttggggcctaccatacaagcggaggtgtatgacacagttgttatcactctcaagaacatggcttctcatccggtaagtcttcacgcagtgggcgtgtcctactggaaagcttcagaaggagccgagtatgatgatcagacatcccagagggagaaagaagacgacaaggtatttccaggtgggtctcatacctatgtgtggcaagtgctcaaagagaatggccctatggcaagcgatccgccgtgtttgacttacagctacctttcacacgttgacctcgtcaaggacctcaactccgggttgattggagccttgttggtatgcagggaaggatctcttgccaaagagaagacacagaccctccacaagtttatccttctctttgctgtgttcgatgagggcaaaagttggcatagcgaaacgaagaattccctcatgcaggatcgcgacgcagccagcgccagagcttggcccaagatgcacactgtgaacggatatgtcaataggacgcttcctggcttgattgggtgtcatcggaaaagtgtctactggcacgtgatcggaatggggacaacaccagaggtccactccatatttctcgaaggccataccttccttgttcgaaaccacagacaggcatccttggggatctctcccattacctttctcactgcccaaacgctccttatggacttgggtcagttccttctcttttgccatatcccgtcacaccagcatgatggtatggaagcttatgtgaaagtcgacagttgtcctgaggagccacagttgcgcatgaagaataatgaagaagccgaggattacgacgacgatctcaccgattctgagatggacgtggtgaggtttgatgacgacaactctccctccatcattcaagctcggagcgtggcgaagaaacaccccaagacttgggtccactatatagcggcggaagaggaggattgggattacgctcctcttgtattggcaccagatgaccgctcatacaaaagccagtacctcaacaacggaccgcagagaattggccggaagtataagaaagtgcgatttatggcctatacagacgaaacctttaagacaagggaggccatccagcatgagagtgggattttgggacctcttctttacggcgaagttggtgataccctcctcatcatcttcaagaatcaagcttctcgcccctataacatttacccacacgggatcactgacgttaggcctttgtatagcagaagacttcccaaaggcgtgaagcatctcaaagacttccccattttgccaggcgagatctttaagtacaaatggaccgtcacagtggaagatggaccgactaaatcagaccctcgatgccttacgcggtactattcctccttcgtgaatatggagagagatttggcaagcggactcataggaccactcctcatctgttacaaggaatctgtagaccagaggggtaaccagattatgagtgataaacgcaatgtgatcctttttagcgtcttcgacgagaaccggtcctggtacttgaccgagaatatacaaaggttccttcccaaccccgcaggcgttcagttggaagaccctgagtttcaggccagcaatattatgcactcaatcaacggctatgtgtttgatagtctccagctttctgtttgcctccatgaagtagcctattggtacatcttgtcaattggtgctcaaacagacttcctctccgtcttcttctccggctacacctttaagcacaagatggtgtatgaggacactctcacactctttccattttctggagaaaccgtgttcatgagcatggagaatccaggcctttggatcttgggttgccacaacagtgattttcgcaatcggggaatgactgctctcctcaaagtcagcagctgtgataagaacacaggcgactattacgaagattcttacgaggacataagtgcctactttgactccaagaataacgccattgagcccagatcattctcccagaatcctcccgtgcttaaaaggcatcagcgcgaaatcaccagaactactcttcagtctgatcaagaggagattgactatgacgacaccataagcgtggaaatgaagaaggaggatttcgatatctatgacgaagatgagaaccagtctccgcggagctttcagaagaagacgcgacactacttcattgcagcagtcgaaaggctttgggactacggtatgtcatcatcccctcatgtgttgcgcaatagagctcagagtggaagtgttccacagttcaagaaagtcgtctttcaagagtttacagatggcagcttcacacagcctctctatcggggcgagcttaacgaacatttgggactccttggtccctatatccgagccgaagtggaggacaacattatggttacctttaggaatcaagcctctcgcgactacagcttctactcctccctcatcagttatgaggaggatcagagacaaggcgctgaaccacggaagaactttgtgaaaccgaatgagacgaagacctacttctggaaagtacagcaccacatggcccccacaaaagacgaattcgattgcaaagcatgggcgtatttttcagacgttgacttggagaaagatgtacattcaggacttattggtcctttgttggtgtgtcacactaacactctcaatccagcccatggcaggcaggtgacagtccaggaattcgctcttttctttaccatctttgatgagaccaagtcctggtacttcacggaaaacatggagcgcaattgcagagccccctgtaacatacagatggaggaccctacctttaaggaaaattatcggttccacgcaatcaacggatacattatggatacactccctggccttgtgatggctcaggaccaacgaatcaggtggtacctcctcagcatgggttctaatgagaacatacactccattcacttttcaggacatgtgttcactgtccggaagaaagaagagtataagatggccctctacaatttgtatccaggcgtgtttgagaccgttgaaatgcttccctctaaagctggcatctggagagtagagtgcttgatcggagaacatcttcacgcaggtatgagcaccttgttcctcgtgtacagcaacaaatgtcagaccccacttggcatggccagtggacacattcgcgactttcagatcacagcatctggccagtatggacaatgggccccaaagttggctcgcctccattactccggtagcataaatgcgtggtccactaaagaacctttcagctggattaaggtcgatcttcttgcccccatgatcatccacggcattaagacacagggagcgaggcagaaattctcctccctctacatctcacagttcattattatgtatagtttggacggcaagaagtggcaaacttatagaggtaacagtactggaacagacatggtgttcttcggcaacgttgatagctctggcatcaaacacaacatctttaatcctcccataatagctcggtacatcagattgcatccgacccactacagcattaggagtacactccgaatggagcttatgggttgcgacttgaattcctgttcaatgccactcggaatggagtctaaagccatctctgatgcacagataaccgccagtagctactttacgaacatgtttgctacgtggtcaccctctaaggcaaggcttcatttgcaaggccggtctaatgcctggagacctcaggtgaacaacccgaaagaatggctccaggtggactttcagaagaccatgaaagtaacaggtgtcactactcagggagttaagtccttggatactagcatgtatgtgaaggagttccttatttcctcatcacaagatggccaccagtggaccctcttctttcagaatggtaaggtcaaagtgtttcagggcaatcaagacagcttcacacccgtggtgaacagtcttgatcctccactcttgacacgataccttcgaatccatccacagtcttgggagcaccagattgcattgcgcatggaagtacttggatgcgaggctcaggacctctac

SEQ ID NO: 1036 - protein, 1457 aa, synthetic construct
  REGION 1..1457: note = Variant of human B-domain deleted Factor VIII
MQIELSTCFFLCLLRFCFSATRRYYLGAVELSWDYMQSDLGELPVDARFPPRVPKSFPFNTSVVYKKTLFVEFTDHLFNIAKPRPPWMGLLGPTIQAEVYDTVVITLKNMASHPVSLHAVGVSYWKASEGAEYDDQTSQREKEDDKVFPGGSHTYVWQVLKENGPMASDPPCLTYSYLSHVDLVKDLNSGLIGALLVCREGSLAKEKTQTLHKFILLFAVFDEGKSWHSETKNSLMQDRDAASARAWPKMHTVNGYVNRTLPGLIGCHRKSVYWHVIGMGTTPEVHSIFLEGHTFLVRNHRQASLGISPITFLTAQTLLMDLGQFLLFCHIPSHQHDGMEAYVKVDSCPEEPQLRMKNNEEAEDYDDDLTDSEMDVVRFDDDNSPSIIQARSVAKKHPKTWVHYIAAEEEDWDYAPLVLAPDDRSYKSQYLNNGPQRIGRKYKKVRFMAYTDETFKTREAIQHESGILGPLLYGEVGDTLLIIFKNQASRPYNIYPHGITDVRPLYSRRLPKGVKHLKDFPILPGEIFKYKWTVTVEDGPTKSDPRCLTRYYSSFVNMERDLASGLIGPLLICYKESVDQRGNQIMSDKRNVILFSVFDENRSWYLTENIQRFLPNPAGVQLEDPEFQASNIMHSINGYVFDSLQLSVCLHEVAYWYILSIGAQTDFLSVFFSGYTFKHKMVYEDTLTLFPFSGETVFMSMENPGLWILGCHNSDFRNRGMTALLKVSSCDKNTGDYYEDSYEDISAYFDSKNNAIEPRSFSQNPPVLKRHQREITRTTLQSDQEEIDYDDTISVEMKKEDFDIYDEDENQSPRSFQKKTRHYFIAAVERLWDYGMSSSPHVLRNRAQSGSVPQFKKVVFQEFTDGSFTQPLYRGELNEHLGLLGPYIRAEVEDNIMVTFRNQASRDYSFYSSLISYEEDQRQGAEPRKNFVKPNETKTYFWKVQHHMAPTKDEFDCKAWAYFSDVDLEKDVHSGLIGPLLVCHTNTLNPAHGRQVTVQEFALFFTIFDETKSWYFTENMERNCRAPCNIQMEDPTFKENYRFHAINGYIMDTLPGLVMAQDQRIRWYLLSMGSNENIHSIHFSGHVFTVRKKEEYKMALYNLYPGVFETVEMLPSKAGIWRVECLIGEHLHAGMSTLFLVYSNKCQTPLGMASGHIRDFQITASGQYGQWAPKLARLHYSGSINAWSTKEPFSWIKVDLLAPMIIHGIKTQGARQKFSSLYISQFIIMYSLDGKKWQTYRGNSTGTDMVFFGNVDSSGIKHNIFNPPIIARYIRLHPTHYSIRSTLRMELMGCDLNSCSMPLGMESKAISDAQITASSYFTNMFATWSPSKARLHLQGRSNAWRPQVNNPKEWLQVDFQKTMKVTGVTTQGVKSLDTSMYVKEFLISSSQDGHQWTLFFQNGKVKVFQGNQDSFTPVVNSLDPPLLTRYLRIHPQSWEHQIALRMEVLGCEAQDLY

SEQ ID NO: 1037 - DNA, 4371 bp, synthetic construct
  misc_feature 1..4371: note = Variant of human B-domain deleted Factor VIII
  source 1..4371: mol_type = other DNA
atgcagattgaactgtctacctgcttcttcctctgtttgctgaggttctgctttagcgccactagacggtactaccttggcgctgtggagctgtcctgggactatatgcagagtgatttgggagagcttcccgtcgacgcacgatttcctcctcgcgttccaaagtcatttccctttaacacaagcgtggtgtacaagaagacgctcttcgtcgaattcaccgatcacctgttcaatatcgccaaacccagaccaccatggatgggtcttttggggcctaccatacaagcggaggtgtatgacacagttgttatcactctcaagaacatggcttctcatccggtaagtcttcacgcagtgggcgtgtcctactggaaagcttcagaaggagccgagtatgatgatcagacatcccagagggagaaagaagacgacaaggtatttccaggtgggtctcatacctatgtgtggcaagtgctcaaagagaatggccctatggcaagcgatccgccgtgtttgacttacagctacctttcacacgttgacctcgtcaaggacctcaactccgggttgattggagccttgttggtatgcagggaaggatctcttgccaaagagaagacacagaccctccacaagtttatccttctctttgctgtgttcgatgagggcaaaagttggcatagcgaaacgaagaattccctcatgcaggatcgcgacgcagccagcgccagagcttggcccaagatgcacactgtgaacggatatgtcaataggacgcttcctggcttgattgggtgtcatcggaaaagtgtctactggcacgtgatcggaatggggacaacaccagaggtccactccatatttctcgaaggccataccttccttgttcgaaaccacagacaggcatccttggggatctctcccattacctttctcactgcccaaacgctccttatggacttgggtcagttccttctcttttgccatatcccgtcacaccagcatgatggtatggaagcttatgtgaaagtcgacagttgtcctgaggagccacagttgcgcatgaagaataatgaagaagccgaggattacgacgacgatctcaccgattctgagatggacgtggtgaggtttgatgacgacaactctccctccatcattcaagctcggagcgtggcgaagaaacaccccaagacttgggtccactatatagcggcggaagaggaggattgggattacgctcctcttgtattggcaccagatgaccgctcatacaaaagccagtacctcaacaacggaccgcagagaattggccggaagtataagaaagtgcgatttatggcctatacagacgaaacctttaagacaagggaggccatccagcatgagagtgggattttgggacctcttctttacggcgaagttggtgataccctcctcatcatcttcaagaatcaagcttctcgcccctataacatttacccacacgggatcactgacgttaggcctttgtatagcagaagacttcccaaaggcgtgaagcatctcaaagacttccccattttgccaggcgagatctttaagtacaaatggaccgtcacagtggaagatggaccgactaaatcagaccctcgatgccttacgcggtactattcctccttcgtgaatatggagagagatttggcaagcggactcataggaccactcctcatctgttacaaggaatctgtagaccagaggggtaaccagattatgagtgataaacgcaatgtgatcctttttagcgtcttcgacgagaaccggtcctggtacttgaccgagaatatacaaaggttccttcccaaccccgcaggcgttcagttggaagaccctgagtttcaggccagcaatattatgcactcaatcaacggctatgtgtttgatagtctccagctttctgtttgcctccatgaagtagcctattggtacatcttgtcaattggtgctcaaacagacttcctctccgtcttcttctccggctacacctttaagcacaagatggtgtatgaggacactctcacactctttccattttctggagaaaccgtgttcatgagcatggagaatccaggcctttggatcttgggttgccacaacagtgattttcgcaatcggggaatgactgctctcctcaaagtcagcagctgtgataagaacacaggcgactattacgaagattcttacgaggacataagtgcctactttgactccaagaataacgccattgagcccagatcattctcccagaatcctcccgtgcttaaaaggcatcagcgcgaaatcaccagaactactcttcagtctgatcaagaggagattgactatgacgacaccataagcgtggaaatgaagaaggaggatttcgatatctatgacgaagatgagaaccagtctccgcggagctttcagaagaagacgcgacactacttcattgcagcagtcgaaaggctttgggactacggtatgtcatcatcccctcatgtgttgcgcaatagagctcagagtggaagtgttccacagttcaagaaagtcgtctttcaagagtttacagatggcagcttcacacagcctctctatcggggcgagcttaacgaacatttgggactccttggtccctatatccgagccgaagtggaggacaacattatggttacctttaggaatcaagcctctcgcccctacagcttctactcctccctcatcagttatgaggaggatcagagacaaggcgctgaaccacggaagaactttgtgaaaccgaatgagacgaagacctacttctggaaagtacagcaccacatggcccccacaaaagacgaattcgattgcaaagcatgggcgtatttttcagacgttgacttggagaaagatgtacattcaggacttattggtcctttgttggtgtgtcacactaacactctcaatccagcccatggcaggcaggtgacagtccaggaattcgctcttttctttaccatctttgatgagaccaagtcctggtacttcacggaaaacatggagcgcaattgcagagccccctgtaacatacagatggaggaccctacctttaaggaagagtatcggttccacgcaatcaacggatacattatggatacactccctggccttgtgatggctcaggaccaacgaatcaggtggtacctcctcagcatgggttctaatgagaacatacactccattcacttttcaggacatgtgttcactgtccggaagaaagaagagtataagatggccctctacaatttgtatccaggcgtgtttgagaccgttgaaatgcttccctctaaagctggcatctggagagtagagtgcttgatcggagaacatcttcacgcaggtatgagcaccttgttcctcgtgtacagcaacaaatgtcagaccccacttggcatggccagtggacacattcgcgactttcagatcacagcatctggccagtatggacaatgggccccaaagttggctcgcctccattactccggtagcataaatgcgtggtccactaaagaacctttcagctggattaaggtcgatcttcttgcccccatgatcatccacggcattaagacacagggagcgaggcagaaattctcctccctctacatctcacagttcattattatgtatagtttggacggcaagaagtggcaaacttatagaggtaacagtactggaacagacatggtgttcttcggcaacgttgatagctctggcatcaaacacaacatctttaatcctcccataatagctcggtacatcagattgcatccgacccactacagcattaggagtacactccgaatggagcttatgggttgcgacttgaattcctgttcaatgccactcggaatggagtctaaagccatctctgatgcacagataaccgccagtagctactttacgaacatgtttgctacgtggtcaccctctaaggcaaggcttcatttgcaaggccggtctaatgcctggagacctcaggtgaacaacccgaaagaatggctccaggtggactttcagaagaccatgaaagtaacaggtgtcactactcagggagttaagtccttggatactagcatgtatgtgaaggagttccttatttcctcatcacaagatggccaccagtggaccctcttctttcagaatggtaaggtcaaagtgtttcagggcaatcaagacagcttcacacccgtggtgaacagtcttgatcctccactcttgacacgataccttcgaatccatccacagtcttgggagcaccagattgcattgcgcatggaagtacttggatgcgaggctcaggacctctac

SEQ ID NO: 1038 - protein, 1457 aa, synthetic construct
  REGION 1..1457: note = Variant of human B-domain deleted Factor VIII
MQIELSTCFFLCLLRFCFSATRRYYLGAVELSWDYMQSDLGELPVDARFPPRVPKSFPFNTSVVYKKTLFVEFTDHLFNIAKPRPPWMGLLGPTIQAEVYDTVVITLKNMASHPVSLHAVGVSYWKASEGAEYDDQTSQREKEDDKVFPGGSHTYVWQVLKENGPMASDPPCLTYSYLSHVDLVKDLNSGLIGALLVCREGSLAKEKTQTLHKFILLFAVFDEGKSWHSETKNSLMQDRDAASARAWPKMHTVNGYVNRTLPGLIGCHRKSVYWHVIGMGTTPEVHSIFLEGHTFLVRNHRQASLGISPITFLTAQTLLMDLGQFLLFCHIPSHQHDGMEAYVKVDSCPEEPQLRMKNNEEAEDYDDDLTDSEMDVVRFDDDNSPSIIQARSVAKKHPKTWVHYIAAEEEDWDYAPLVLAPDDRSYKSQYLNNGPQRIGRKYKKVRFMAYTDETFKTREAIQHESGILGPLLYGEVGDTLLIIFKNQASRPYNIYPHGITDVRPLYSRRLPKGVKHLKDFPILPGEIFKYKWTVTVEDGPTKSDPRCLTRYYSSFVNMERDLASGLIGPLLICYKESVDQRGNQIMSDKRNVILFSVFDENRSWYLTENIQRFLPNPAGVQLEDPEFQASNIMHSINGYVFDSLQLSVCLHEVAYWYILSIGAQTDFLSVFFSGYTFKHKMVYEDTLTLFPFSGETVFMSMENPGLWILGCHNSDFRNRGMTALLKVSSCDKNTGDYYEDSYEDISAYFDSKNNAIEPRSFSQNPPVLKRHQREITRTTLQSDQEEIDYDDTISVEMKKEDFDIYDEDENQSPRSFQKKTRHYFIAAVERLWDYGMSSSPHVLRNRAQSGSVPQFKKVVFQEFTDGSFTQPLYRGELNEHLGLLGPYIRAEVEDNIMVTFRNQASRPYSFYSSLISYEEDQRQGAEPRKNFVKPNETKTYFWKVQHHMAPTKDEFDCKAWAYFSDVDLEKDVHSGLIGPLLVCHTNTLNPAHGRQVTVQEFALFFTIFDETKSWYFTENMERNCRAPCNIQMEDPTFKEEYRFHAINGYIMDTLPGLVMAQDQRIRWYLLSMGSNENIHSIHFSGHVFTVRKKEEYKMALYNLYPGVFETVEMLPSKAGIWRVECLIGEHLHAGMSTLFLVYSNKCQTPLGMASGHIRDFQITASGQYGQWAPKLARLHYSGSINAWSTKEPFSWIKVDLLAPMIIHGIKTQGARQKFSSLYISQFIIMYSLDGKKWQTYRGNSTGTDMVFFGNVDSSGIKHNIFNPPIIARYIRLHPTHYSIRSTLRMELMGCDLNSCSMPLGMESKAISDAQITASSYFTNMFATWSPSKARLHLQGRSNAWRPQVNNPKEWLQVDFQKTMKVTGVTTQGVKSLDTSMYVKEFLISSSQDGHQWTLFFQNGKVKVFQGNQDSFTPVVNSLDPPLLTRYLRIHPQSWEHQIALRMEVLGCEAQDLY

SEQ ID NO: 1039 - DNA, 4371 bp, synthetic construct
  misc_feature 1..4371: note = Variant of human B-domain deleted Factor VIII
  source 1..4371: mol_type = other DNA
atgcagattgaactgtctacctgcttcttcctctgtttgctgaggttctgctttagcgccactagacggtactaccttggcgctgtggagctgtcctgggactatatgcagagtgatttgggagagcttcccgtcgacgcacgatttcctcctcgcgttccaaagtcatttccctttaacacaagcgtggtgtacaagaagacgctcttcgtcgaattcaccgatcacctgttcaatatcgccaaacccagaccaccatggatgggtcttttggggcctaccatacaagcggaggtgtatgacacagttgttatcactctcaagaacatggcttctcatccggtaagtcttcacgcagtgggcgtgtcctactggaaagcttcagaaggagccgagtatgatgatcagacatcccagagggagaaagaagacgacaaggtatttccaggtgggtctcatacctatgtgtggcaagtgctcaaagagaatggccctatggcaagcgatccgccgtgtttgacttacagctacctttcacacgttgacctcgtcaaggacctcaactccgggttgattggagccttgttggtatgcagggaaggatctcttgccaaagagaagacacagaccctccacaagtttatccttctctttgctgtgttcgatgagggcaaaagttggcatagcgaaacgaagaattccctcatgcaggatcgcgacgcagccagcgccagagcttggcccaagatgcacactgtgaacggatatgtcaataggacgcttcctggcttgattgggtgtcatcggaaaagtgtctactggcacgtgatcggaatggggacaacaccagaggtccactccatatttctcgaaggccataccttccttgttcgaaaccacagacaggcatccttggggatctctcccattacctttctcactgcccaaacgctccttatggacttgggtcagttccttctcttttgccatatcccgtcacaccagcatgatggtatggaagcttatgtgaaagtcgacagttgtcctgaggagccacagttgcgcatgaagaataatgaagaagccgaggattacgacgacgatctcaccgattctgagatggacgtggtgaggtttgatgacgacaactctccctccatcattcaagctcggagcgtggcgaagaaacaccccaagacttgggtccactatatagcggcggaagaggaggattgggattacgctcctcttgtattggcaccagatgaccgctcatacaaaagccagtacctcaacaacggaccgcagagaattggccggaagtataagaaagtgcgatttatggcctatacagacgaaacctttaagacaagggaggccatccagcatgagagtgggattttgggacctcttctttacggcgaagttggtgataccctcctcatcatcttcaagaatcaagcttctcgcccctataacatttacccacacgggatcactgacgttaggcctttgtatagcagaagacttcccaaaggcgtgaagcatctcaaagacttccccattttgccaggcgagatctttaagtacaaatggaccgtcacagtggaagatggaccgactaaatcagaccctcgatgccttacgcggtactattcctccttcgtgaatatggagagagatttggcaagcggactcataggaccactcctcatctgttacaaggaatctgtagaccagaggggtaaccagattatgagtgataaacgcaatgtgatcctttttagcgtcttcgacgagaaccggtcctggtacttgaccgagaatatacaaaggttccttcccaacgacgcaggcgttcagttggaagaccctgagtttcaggccagcaatattatgcactcaatcaacggctatgtgtttgatagtctccagctttctgtttgcctccatgaagtagcctattggtacatcttgtcaattggtgctcaaacagacttcctctccgtcttcttctccggctacacctttaagcacaagatggtgtatgaggacactctcacactctttccattttctggagaaaccgtgttcatgagcatggagaatccaggcctttggatcttgggttgccacaacagtgattttcgcaatcggggaatgactgctctcctcaaagtcagcagctgtgataagaacacaggcgactattacgaagattcttacgaggacataagtgcctactttgactccaagaataacgccattgagcccagatcattctcccagaatcctcccgtgcttaaaaggcatcagcgcgaaatcaccagaactactcttcagtctgatcaagaggagattgactatgacgacaccataagcgtggaaatgaagaaggaggatttcgatatctatgacgaagatgagaaccagtctccgcggagctttcagaagaagacgcgacactacttcattgcagcagtcgaaaggctttgggactacggtatgtcatcatcccctcatgtgttgcgcaatagagctcagagtggaagtgttccacagttcaagaaagtcgtctttcaagagtttacagatggcagcttcacacagcctctctatcggggcgagcttaacgaacatttgggactccttggtccctatatccgagccgaagtggaggacaacattatggttacctttaggaatcaagcctctcgcccctacagcttctactcctccctcatcagttatgaggaggatcagagacaaggcgctgaaccacggaagaactttgtgaaaccgaatgagacgaagacctacttctggaaagtacagcaccacatggcccccacaaaagacgaattcgattgcaaagcatgggcgtatttttcagacgttgacttggagaaagatgtacattcaggacttattggtcctttgttggtgtgtcacactaacactctcaatccagcccatggcaggcaggtgacagtccaggaattcgctcttttctttaccatctttgatgagaccaagtcctggtacttcacggaaaacatggagcgcaattgcagagccccctgtaacatacagatggaggaccctacctttaaggaaaattatcggttccacgcaatcaacggatacattatggatacactccctggccttgtgatggctcaggaccaacgaatcaggtggtacctcctcagcatgggttctaatgagaacatacactccattcacttttcaggacatgtgttcactgtccggaagaaagaagagtataagatggccctctacaatttgtatccaggcgtgtttgagaccgttgaaatgcttccctctaaagctggcatctggagagtagagtgcttgatcggagaacatcttcacgcaggtatgagcaccttgttcctcgtgtacagcaacaaatgtcagaccccacttggcatggccagtggacacattcgcgactttcagatcacagcatctggccagtatggacaatgggccccaaagttggctcgcctccattactccggtagcataaatgcgtggtccactaaagaacctttcagctggattaaggtcgatcttcttgcccccatgatcatccacggcattaagacacagggagcgaggcagaaattctcctccctctacatctcacagttcattattatgtatagtttggacggcaagaagtggcaaacttatagaggtaacagtactggaacagacatggtgttcttcggcaacgttgatagctctggcatcaaacacaacatctttaatcctcccataatagctcggtacatcagattgcatccgacccactacagcattaggagtacactccgaatggagcttatgggttgcgacttgaattcctgttcaatgccactcggaatggagtctaaagccatctctgatgcacagataaccgccagtagctactttacgaacatgtttgctacgtggtcaccctctaaggcaaggcttcatttgcaaggccggtctaatgcctggagacctcaggtgaacaacccgaaagaatggctccaggtggactttcagaagaccatgaaagtaacaggtgtcactactcagggagttaagtccttggatactagcatgtatgtgaaggagttccttatttcctcatcacaagatggccaccagtggaccctcttctttcagaatggtaaggtcaaagtgtttcagggcaatcaagacagcttcacacccgtggtgaacagtcttgatcctccactcttgacacgataccttcgaatccatccacagtcttgggagcaccagattgcattgcgcatggaagtacttggatgcgaggctcaggacctctac

SEQ ID NO: 1040 - protein, 1457 aa, synthetic construct
  REGION 1..1457: note = Variant of human B-domain deleted Factor VIII
MQIELSTCFFLCLLRFCFSATRRYYLGAVELSWDYMQSDLGELPVDARFPPRVPKSFPFNTSVVYKKTLFVEFTDHLFNIAKPRPPWMGLLGPTIQAEVYDTVVITLKNMASHPVSLHAVGVSYWKASEGAEYDDQTSQREKEDDKVFPGGSHTYVWQVLKENGPMASDPPCLTYSYLSHVDLVKDLNSGLIGALLVCREGSLAKEKTQTLHKFILLFAVFDEGKSWHSETKNSLMQDRDAASARAWPKMHTVNGYVNRTLPGLIGCHRKSVYWHVIGMGTTPEVHSIFLEGHTFLVRNHRQASLGISPITFLTAQTLLMDLGQFLLFCHIPSHQHDGMEAYVKVDSCPEEPQLRMKNNEEAEDYDDDLTDSEMDVVRFDDDNSPSIIQARSVAKKHPKTWVHYIAAEEEDWDYAPLVLAPDDRSYKSQYLNNGPQRIGRKYKKVRFMAYTDETFKTREAIQHESGILGPLLYGEVGDTLLIIFKNQASRPYNIYPHGITDVRPLYSRRLPKGVKHLKDFPILPGEIFKYKWTVTVEDGPTKSDPRCLTRYYSSFVNMERDLASGLIGPLLICYKESVDQRGNQIMSDKRNVILFSVFDENRSWYLTENIQRFLPNDAGVQLEDPEFQASNIMHSINGYVFDSLQLSVCLHEVAYWYILSIGAQTDFLSVFFSGYTFKHKMVYEDTLTLFPFSGETVFMSMENPGLWILGCHNSDFRNRGMTALLKVSSCDKNTGDYYEDSYEDISAYFDSKNNAIEPRSFSQNPPVLKRHQREITRTTLQSDQEEIDYDDTISVEMKKEDFDIYDEDENQSPRSFQKKTRHYFIAAVERLWDYGMSSSPHVLRNRAQSGSVPQFKKVVFQEFTDGSFTQPLYRGELNEHLGLLGPYIRAEVEDNIMVTFRNQASRPYSFYSSLISYEEDQRQGAEPRKNFVKPNETKTYFWKVQHHMAPTKDEFDCKAWAYFSDVDLEKDVHSGLIGPLLVCHTNTLNPAHGRQVTVQEFALFFTIFDETKSWYFTENMERNCRAPCNIQMEDPTFKENYRFHAINGYIMDTLPGLVMAQDQRIRWYLLSMGSNENIHSIHFSGHVFTVRKKEEYKMALYNLYPGVFETVEMLPSKAGIWRVECLIGEHLHAGMSTLFLVYSNKCQTPLGMASGHIRDFQITASGQYGQWAPKLARLHYSGSINAWSTKEPFSWIKVDLLAPMIIHGIKTQGARQKFSSLYISQFIIMYSLDGKKWQTYRGNSTGTDMVFFGNVDSSGIKHNIFNPPIIARYIRLHPTHYSIRSTLRMELMGCDLNSCSMPLGMESKAISDAQITASSYFTNMFATWSPSKARLHLQGRSNAWRPQVNNPKEWLQVDFQKTMKVTGVTTQGVKSLDTSMYVKEFLISSSQDGHQWTLFFQNGKVKVFQGNQDSFTPVVNSLDPPLLTRYLRIHPQSWEHQIALRMEVLGCEAQDLY

SEQ ID NO: 1041 - DNA, 4371 bp, synthetic construct
  misc_feature 1..4371: note = Variant of human B-domain deleted Factor VIII
  source 1..4371: mol_type = other DNA
atgcagattgaactgtctacctgcttcttcctctgtttgctgaggttctgctttagcgccactagacggtactaccttggcgctgtggagctgtcctgggactatatgcagagtgatttgggagagcttcccgtcgacgcacgatttcctcctcgcgttccaaagtcatttccctttaacacaagcgtggtgtacaagaagacgctcttcgtcgaattcaccgatcacctgttcaatatcgccaaacccagaccaccatggatgggtcttttggggcctaccatacaagcggaggtgtatgacacagttgttatcactctcaagaacatggcttctcatccggtaagtcttcacgcagtgggcgtgtcctactggaaagcttcagaaggagccgagtatgatgatcagacatcccagagggagaaagaagacgacaaggtatttccaggtgggtctcatacctatgtgtggcaagtgctcaaagagaatggccctatggcaagcgatccgccgtgtttgacttacagctacctttcacacgttgacctcgtcaaggacctcaactccgggttgattggagccttgttggtatgcagggaaggatctcttgccaaagagaagacacagaccctccacaagtttatccttctctttgctgtgttcgatgagggcaaaagttggcatagcgaaacgaagaattccctcatgcaggatcgcgacgcagccagcgccagagcttggcccaagatgcacactgtgaacggatatgtcaataggacgcttcctggcttgattgggtgtcatcggaaaagtgtctactggcacgtgatcggaatggggacaacaccagaggtccactccatatttctcgaaggccataccttccttgttcgaaaccacagacaggcatccttggggatctctcccattacctttctcactgcccaaacgctccttatggacttgggtcagttccttctcttttgccatatcccgtcacaccagcatgatggtatggaagcttatgtgaaagtcgacagttgtcctgaggagccacagttgcgcatgaagaataatgaagaagccgaggattacgacgacgatctcaccgattctgagatggacgtggtgaggtttgatgacgacaactctccctccatcattcaagctcggagcgtggcgaagaaacaccccaagacttgggtccactatatagcggcggaagaggaggattgggattacgctcctcttgtattggcaccagatgaccgctcatacaaaagccagtacctcaacaacggaccgcagagaattggccggaagtataagaaagtgcgatttatggcctatacagacgaaacctttaagacaagggaggccatccagcatgagagtgggattttgggacctcttctttacggcgaagttggtgataccctcctcatcatcttcaagaatcaagcttctcgcccctataacatttacccacacgggatcactgacgttaggcctttgtatagcagaagacttcccaaaggcgtgaagcatctcaaagacttccccattttgccaggcgagatctttaagtacaaatggaccgtcacagtggaagatggaccgactaaatcagaccctcgatgccttacgcggtactattcctccttcgtgaatatggagagagatttggcaagcggactcataggaccactcctcatctgttacaaggaatctgtagaccagaggggtaaccagattatgagtgataaacgcaatgtgatcctttttagcgtcttcgacgagaaccggtcctggtacttgaccgagaatatagagaggttccttcccaaccccgcaggcgttcagttggaagaccctgagtttcaggccagcaatattatgcactcaatcaacggctatgtgtttgatagtctccagctttctgtttgcctccatgaagtagcctattggtacatcttgtcaattggtgctcaaacagacttcctctccgtcttcttctccggctacacctttaagcacaagatggtgtatgaggacactctcacactctttccattttctggagaaaccgtgttcatgagcatggagaatccaggcctttggatcttgggttgccacaacagtgattttcgcaatcggggaatgactgctctcctcaaagtcagcagctgtgataagaacacaggcgactattacgaagattcttacgaggacataagtgcctactttgactccaagaataacgccattgagcccagatcattctcccagaatcctcccgtgcttaaaaggcatcagcgcgaaatcaccagaactactcttcagtctgatcaagaggagattgactatgacgacaccataagcgtggaaatgaagaaggaggatttcgatatctatgacgaagatgagaaccagtctccgcggagctttcagaagaagacgcgacactacttcattgcagcagtcgaaaggctttgggactacggtatgtcatcatcccctcatgtgttgcgcaatagagctcagagtggaagtgttccacagttcaagaaagtcgtctttcaagagtttacagatggcagcttcacacagcctctctatcggggcgagcttaacgaacatttgggactccttggtccctatatccgagccgaagtggaggacaacattatggttacctttaggaatcaagcctctcgcccctacagcttctactcctccctcatcagttatgaggaggatcagagacaaggcgctgaaccacggaagaactttgtgaaaccgaatgagacgaagacctacttctggaaagtacagcaccacatggcccccacaaaagacgaattcgattgcaaagcatgggcgtatttttcagacgttgacttggagaaagatgtacattcaggacttattggtcctttgttggtgtgtcacactaacactctcaatccagcccatggcaggcaggtgacagtccaggaattcgctcttttctttaccatctttgatgagaccaagtcctggtacttcacggaaaacatggagcgcaattgcagagccccctgtaacatacagatggaggaccctacctttaaggaaaattatcggttccacgcaatcaacggatacattatggatacactccctggccttgtgatggctcaggaccaacgaatcaggtggtacctcctcagcatgggttctaatgagaacatacactccattcacttttcaggacatgtgttcactgtccggaagaaagaagagtataagatggccctctacaatttgtatccaggcgtgtttgagaccgttgaaatgcttccctctaaagctggcatctggagagtagagtgcttgatcggagaacatcttcacgcaggtatgagcaccttgttcctcgtgtacagcaacaaatgtcagaccccacttggcatggccagtggacacattcgcgactttcagatcacagcatctggccagtatggacaatgggccccaaagttggctcgcctccattactccggtagcataaatgcgtggtccactaaagaacctttcagctggattaaggtcgatcttcttgcccccatgatcatccacggcattaagacacagggagcgaggcagaaattctcctccctctacatctcacagttcattattatgtatagtttggacggcaagaagtggcaaacttatagaggtaacagtactggaacagacatggtgttcttcggcaacgttgatagctctggcatcaaacacaacatctttaatcctcccataatagctcggtacatcagattgcatccgacccactacagcattaggagtacactccgaatggagcttatgggttgcgacttgaattcctgttcaatgccactcggaatggagtctaaagccatctctgatgcacagataaccgccagtagctactttacgaacatgtttgctacgtggtcaccctctaaggcaaggcttcatttgcaaggccggtctaatgcctggagacctcaggtgaacaacccgaaagaatggctccaggtggactttcagaagaccatgaaagtaacaggtgtcactactcagggagttaagtccttggatactagcatgtatgtgaaggagttccttatttcctcatcacaagatggccaccagtggaccctcttctttcagaatggtaaggtcaaagtgtttcagggcaatcaagacagcttcacacccgtggtgaacagtcttgatcctccactcttgacacgataccttcgaatccatccacagtcttgggagcaccagattgcattgcgcatggaagtacttggatgcgaggctcaggacctctac

SEQ ID NO: 1042 - protein, 1457 aa, synthetic construct
  REGION 1..1457: note = Variant of human B-domain deleted Factor VIII
MQIELSTCFFLCLLRFCFSATRRYYLGAVELSWDYMQSDLGELPVDARFPPRVPKSFPFNTSVVYKKTLFVEFTDHLFNIAKPRPPWMGLLGPTIQAEVYDTVVITLKNMASHPVSLHAVGVSYWKASEGAEYDDQTSQREKEDDKVFPGGSHTYVWQVLKENGPMASDPPCLTYSYLSHVDLVKDLNSGLIGALLVCREGSLAKEKTQTLHKFILLFAVFDEGKSWHSETKNSLMQDRDAASARAWPKMHTVNGYVNRTLPGLIGCHRKSVYWHVIGMGTTPEVHSIFLEGHTFLVRNHRQASLGISPITFLTAQTLLMDLGQFLLFCHIPSHQHDGMEAYVKVDSCPEEPQLRMKNNEEAEDYDDDLTDSEMDVVRFDDDNSPSIIQARSVAKKHPKTWVHYIAAEEEDWDYAPLVLAPDDRSYKSQYLNNGPQRIGRKYKKVRFMAYTDETFKTREAIQHESGILGPLLYGEVGDTLLIIFKNQASRPYNIYPHGITDVRPLYSRRLPKGVKHLKDFPILPGEIFKYKWTVTVEDGPTKSDPRCLTRYYSSFVNMERDLASGLIGPLLICYKESVDQRGNQIMSDKRNVILFSVFDENRSWYLTENIERFLPNPAGVQLEDPEFQASNIMHSINGYVFDSLQLSVCLHEVAYWYILSIGAQTDFLSVFFSGYTFKHKMVYEDTLTLFPFSGETVFMSMENPGLWILGCHNSDFRNRGMTALLKVSSCDKNTGDYYEDSYEDISAYFDSKNNAIEPRSFSQNPPVLKRHQREITRTTLQSDQEEIDYDDTISVEMKKEDFDIYDEDENQSPRSFQKKTRHYFIAAVERLWDYGMSSSPHVLRNRAQSGSVPQFKKVVFQEFTDGSFTQPLYRGELNEHLGLLGPYIRAEVEDNIMVTFRNQASRPYSFYSSLISYEEDQRQGAEPRKNFVKPNETKTYFWKVQHHMAPTKDEFDCKAWAYFSDVDLEKDVHSGLIGPLLVCHTNTLNPAHGRQVTVQEFALFFTIFDETKSWYFTENMERNCRAPCNIQMEDPTFKENYRFHAINGYIMDTLPGLVMAQDQRIRWYLLSMGSNENIHSIHFSGHVFTVRKKEEYKMALYNLYPGVFETVEMLPSKAGIWRVECLIGEHLHAGMSTLFLVYSNKCQTPLGMASGHIRDFQITASGQYGQWAPKLARLHYSGSINAWSTKEPFSWIKVDLLAPMIIHGIKTQGARQKFSSLYISQFIIMYSLDGKKWQTYRGNSTGTDMVFFGNVDSSGIKHNIFNPPIIARYIRLHPTHYSIRSTLRMELMGCDLNSCSMPLGMESKAISDAQITASSYFTNMFATWSPSKARLHLQGRSNAWRPQVNNPKEWLQVDFQKTMKVTGVTTQGVKSLDTSMYVKEFLISSSQDGHQWTLFFQNGKVKVFQGNQDSFTPVVNSLDPPLLTRYLRIHPQSWEHQIALRMEVLGCEAQDLY

SEQ ID NO: 1043 - DNA, 4371 bp, synthetic construct
  misc_feature 1..4371: note = Variant of human B-domain deleted Factor VIII
  source 1..4371: mol_type = other DNA
atgcagattgaactgtctacctgcttcttcctctgtttgctgaggttctgctttagcgccactagacggtactaccttggcgctgtggagctgtcctgggactatatgcagagtgatttgggagagcttcccgtcgacgcacgatttcctcctcgcgttccaaagtcatttccctttaacacaagcgtggtgtacaagaagacgctcttcgtcgaattcaccgatcacctgttcaatatcgccaaacccagaccaccatggatgggtcttttggggcctaccatacaagcggaggtgtatgacacagttgttatcactctcaagaacatggcttctcatccggtaagtcttcacgcagtgggcgtgtcctactggaaagcttcagaaggagccgagtatgatgatcagacatcccagagggagaaagaagacgacaaggtatttccaggtgggtctcatacctatgtgtggcaagtgctcaaagagaatggccctatggcaagcgatccgccgtgtttgacttacagctacctttcacacgttgacctcgtcaaggacctcaactccgggttgattggagccttgttggtatgcagggaaggatctcttgccaaagagaagacacagaccctccacaagtttatccttctctttgctgtgttcgatgagggcaaaagttggcatagcgaaacgaagaattccctcatgcaggatcgcgacgcagccagcgccagagcttggcccaagatgcacactgtgaacggatatgtcaataggacgcttcctggcttgattgggtgtcatcggaaaagtgtctactggcacgtgatcggaatggggacaacaccagaggtccactccatatttctcgaaggccataccttccttgttcgaaaccacagacaggcatccttggggatctctcccattacctttctcactgcccaaacgctccttatggacttgggtcagttccttctcttttgccatatcccgtcacaccagcatgatggtatggaagcttatgtgaaagtcgacagttgtcctgaggagccacagttgcgcatgaagaataatgaagaagccgaggattacgacgacgatctcaccgattctgagatggacgtggtgaggtttgatgacgacaactctccctccatcattcaagctcggagcgtggcgaagaaacaccccaagacttgggtccactatatagcggcggaagaggaggattgggattacgctcctcttgtattggcaccagatgaccgctcatacaaaagccagtacctcaacaacggaccgcagagaattggccggaagtataagaaagtgcgatttatggcctatacagacgaaacctttaagacaagggaggccatccagcatgagagtgggattttgggacctcttctttacggcgaagttggtgataccctcctcatcatcttcaagaatcaagcttctcgcccctataacatttacccacacgggatcactgacgttaggcctttgtatagcagaagacttcccaaaggcgtgaagcatctcaaagacttccccattttgccaggcgagatctttaagtacaaatggaccgtcacagtggaagatggaccgactaaatcagaccctcgatgccttacgcggtactattcctccttcgtgaatatggagagagatttggcaagcggactcataggaccactcctcatctgttacaaggaatctgtagaccagaggggtaaccagattatgagtgataaacgcaatgtgatcctttttagcgtcttcgacgagaaccggtcctggtacttgaccgagaatatacaaaggttccttcccaaccccgcaggcccgcagttggaagaccctgagtttcaggccagcaatattatgcactcaatcaacggctatgtgtttgatagtctccagctttctgtttgcctccatgaagtagcctattggtacatcttgtcaattggtgctcaaacagacttcctctccgtcttcttctccggctacacctttaagcacaagatggtgtatgaggacactctcacactctttccattttctggagaaaccgtgttcatgagcatggagaatccaggcctttggatcttgggttgccacaacagtgattttcgcaatcggggaatgactgctctcctcaaagtcagcagctgtgataagaacacaggcgactattacgaagattcttacgaggacataagtgcctactttgactccaagaataacgccattgagcccagatcattctcccagaatcctcccgtgcttaaaaggcatcagcgcgaaatcaccagaactactcttcagtctgatcaagaggagattgactatgacgacaccataagcgtggaaatgaagaaggaggatttcgatatctatgacgaagatgagaaccagtctccgcggagctttcagaagaagacgcgacactacttcattgcagcagtcgaaaggctttgggactacggtatgtcatcatcccctcatgtgttgcgcaatagagctcagagtggaagtgttccacagttcaagaaagtcgtctttcaagagtttacagatggcagcttcacacagcctctctatcggggcgagcttaacgaacatttgggactccttggtccctatatccgagccgaagtggaggacaacattatggttacctttaggaatcaagcctctcgcccctacagcttctactcctccctcatcagttatgaggaggatcagagacaaggcgctgaaccacggaagaactttgtgaaaccgaatgagacgaagacctacttctggaaagtacagcaccacatggcccccacaaaagacgaattcgattgcaaagcatgggcgtatttttcagacgttgacttggagaaagatgtacattcaggacttattggtcctttgttggtgtgtcacactaacactctcaatccagcccatggcaggcaggtgacagtccaggaattcgctcttttctttaccatctttgatgagaccaagtcctggtacttcacggaaaacatggagcgcaattgcagagccccctgtaacatacagatggaggaccctacctttaaggaaaattatcggttccacgcaatcaacggatacattatggatacactccctggccttgtgatggctcaggaccaacgaatcaggtggtacctcctcagcatgggttctaatgagaacatacactccattcacttttcaggacatgtgttcactgtccggaagaaagaagagtataagatggccctctacaatttgtatccaggcgtgtttgagaccgttgaaatgcttccctctaaagctggcatctggagagtagagtgcttgatcggagaacatcttcacgcaggtatgagcaccttgttcctcgtgtacagcaacaaatgtcagaccccacttggcatggccagtggacacattcgcgactttcagatcacagcatctggccagtatggacaatgggccccaaagttggctcgcctccattactccggtagcataaatgcgtggtccactaaagaacctttcagctggattaaggtcgatcttcttgcccccatgatcatccacggcattaagacacagggagcgaggcagaaattctcctccctctacatctcacagttcattattatgtatagtttggacggcaagaagtggcaaacttatagaggtaacagtactggaacagacatggtgttcttcggcaacgttgatagctctggcatcaaacacaacatctttaatcctcccataatagctcggtacatcagattgcatccgacccactacagcattaggagtacactccgaatggagcttatgggttgcgacttgaattcctgttcaatgccactcggaatggagtctaaagccatctctgatgcacagataaccgccagtagctactttacgaacatgtttgctacgtggtcaccctctaaggcaaggcttcatttgcaaggccggtctaatgcctggagacctcaggtgaacaacccgaaagaatggctccaggtggactttcagaagaccatgaaagtaacaggtgtcactactcagggagttaagtccttggatactagcatgtatgtgaaggagttccttatttcctcatcacaagatggccaccagtggaccctcttctttcagaatggtaaggtcaaagtgtttcagggcaatcaagacagcttcacacccgtggtgaacagtcttgatcctccactcttgacacgataccttcgaatccatccacagtcttgggagcaccagattgcattgcgcatggaagtacttggatgcgaggctcaggacctctac

SEQ ID NO: 1044 - protein, 1457 aa, synthetic construct
  REGION 1..1457: note = Variant of human B-domain deleted Factor VIII
MQIELSTCFFLCLLRFCFSATRRYYLGAVELSWDYMQSDLGELPVDARFPPRVPKSFPFNTSVVYKKTLFVEFTDHLFNIAKPRPPWMGLLGPTIQAEVYDTVVITLKNMASHPVSLHAVGVSYWKASEGAEYDDQTSQREKEDDKVFPGGSHTYVWQVLKENGPMASDPPCLTYSYLSHVDLVKDLNSGLIGALLVCREGSLAKEKTQTLHKFILLFAVFDEGKSWHSETKNSLMQDRDAASARAWPKMHTVNGYVNRTLPGLIGCHRKSVYWHVIGMGTTPEVHSIFLEGHTFLVRNHRQASLGISPITFLTAQTLLMDLGQFLLFCHIPSHQHDGMEAYVKVDSCPEEPQLRMKNNEEAEDYDDDLTDSEMDVVRFDDDNSPSIIQARSVAKKHPKTWVHYIAAEEEDWDYAPLVLAPDDRSYKSQYLNNGPQRIGRKYKKVRFMAYTDETFKTREAIQHESGILGPLLYGEVGDTLLIIFKNQASRPYNIYPHGITDVRPLYSRRLPKGVKHLKDFPILPGEIFKYKWTVTVEDGPTKSDPRCLTRYYSSFVNMERDLASGLIGPLLICYKESVDQRGNQIMSDKRNVILFSVFDENRSWYLTENIQRFLPNPAGPQLEDPEFQASNIMHSINGYVFDSLQLSVCLHEVAYWYILSIGAQTDFLSVFFSGYTFKHKMVYEDTLTLFPFSGETVFMSMENPGLWILGCHNSDFRNRGMTALLKVSSCDKNTGDYYEDSYEDISAYFDSKNNAIEPRSFSQNPPVLKRHQREITRTTLQSDQEEIDYDDTISVEMKKEDFDIYDEDENQSPRSFQKKTRHYFIAAVERLWDYGMSSSPHVLRNRAQSGSVPQFKKVVFQEFTDGSFTQPLYRGELNEHLGLLGPYIRAEVEDNIMVTFRNQASRPYSFYSSLISYEEDQRQGAEPRKNFVKPNETKTYFWKVQHHMAPTKDEFDCKAWAYFSDVDLEKDVHSGLIGPLLVCHTNTLNPAHGRQVTVQEFALFFTIFDETKSWYFTENMERNCRAPCNIQMEDPTFKENYRFHAINGYIMDTLPGLVMAQDQRIRWYLLSMGSNENIHSIHFSGHVFTVRKKEEYKMALYNLYPGVFETVEMLPSKAGIWRVECLIGEHLHAGMSTLFLVYSNKCQTPLGMASGHIRDFQITASGQYGQWAPKLARLHYSGSINAWSTKEPFSWIKVDLLAPMIIHGIKTQGARQKFSSLYISQFIIMYSLDGKKWQTYRGNSTGTDMVFFGNVDSSGIKHNIFNPPIIARYIRLHPTHYSIRSTLRMELMGCDLNSCSMPLGMESKAISDAQITASSYFTNMFATWSPSKARLHLQGRSNAWRPQVNNPKEWLQVDFQKTMKVTGVTTQGVKSLDTSMYVKEFLISSSQDGHQWTLFFQNGKVKVFQGNQDSFTPVVNSLDPPLLTRYLRIHPQSWEHQIALRMEVLGCEAQDLY

SEQ ID NO: 1045 - DNA, 4371 bp, synthetic construct
  misc_feature 1..4371: note = Variant of human B-domain deleted Factor VIII
  source 1..4371: mol_type = other DNA
atgcagattgaactgtctacctgcttcttcctctgtttgctgaggttctgctttagcgccactagacggtactaccttggcgctgtggagctgtcctgggactatatgcagagtgatttgggagagcttcccgtcgacgcacgatttcctcctcgcgttccaaagtcatttccctttaacacaagcgtggtgtacaagaagacgctcttcgtcgaattcaccgatcacctgttcaatatcgccaaacccagaccaccatggatgggtcttttggggcctaccatacaagcggaggtgtatgacacagttgttatcactctcaagaacatggcttctcatccggtaagtcttcacgcagtgggcgtgtcctactggaaagcttcagaaggagccgagtatgatgatcagacatcccagagggagaaagaagacgacaaggtatttccaggtgggtctcatacctatgtgtggcaagtgctcaaagagaatggccctatggcaagcgatccgccgtgtttgacttacagctacctttcacacgttgacctcgtcaaggacctcaactccgggttgattggagccttgttggtatgcagggaaggatctcttgccaaagagaagacacagaccctccacaagtttatccttctctttgctgtgttcgatgagggcaaaagttggcatagcgaaacgaagaattccctcatgcaggatcgcgacgcagccagcgccagagcttggcccaagatgcacactgtgaacggatatgtcaataggacgcttcctggcttgattgggtgtcatcggaaaagtgtctactggcacgtgatcggaatggggacaacaccagaggtccactccatatttctcgaaggccataccttccttgttcgaaaccacagacaggcatccttggggatctctcccattacctttctcactgcccaaacgctccttatggacttgggtcagttccttctcttttgccatatcccgtcacaccagcatgatggtatggaagcttatgtgaaagtcgacagttgtcctgaggagccacagttgcgcatgaagaataatgaagaagccgaggattacgacgacgatctcaccgattctgagatggacgtggtgaggtttgatgacgacaactctccctccatcattcaagctcggagcgtggcgaagaaacaccccaagacttgggtccactatatagcggcggaagaggaggattgggattacgctcctcttgtattggcaccagatgaccgctcatacaaaagccagtacctcaacaacggaccgcagagaattggccggaagtataagaaagtgcgatttatggcctatacagacgaaacctttaagacaagggaggccatccagcatgagagtgggattttgggacctcttctttacggcgaagttggtgataccctcctcatcatcttcaagaatcaagcttctcgcccctataacatttacccacacgggatcactgacgttaggcctttgtatagcagaagacttcccaaaggcgtgaagcatctcaaagacttccccattttgccaggcgagatctttaagtacaaatggaccgtcacagtggaagatggaccgactaaatcagaccctcgatgccttacgcggtactattcctccttcgtgaatatggagagagatttggcaagcggactcataggaccactcctcatctgttacaaggaatctgtagaccagaggggtaaccagattatgagtgataaacgcaatgtgatcctttttagcgtcttcgacgagaaccggtcctggtacttgaccgagaatatacaaaggttccttcccaacggggcaggcgttcagttggaagaccctgagtttcaggccagcaatattatgcactcaatcaacggctatgtgtttgatagtctccagctttctgtttgcctccatgaagtagcctattggtacatcttgtcaattggtgctcaaacagacttcctctccgtcttcttctccggctacacctttaagcacaagatggtgtatgaggacactctcacactctttccattttctggagaaaccgtgttcatgagcatggagaatccaggcctttggatcttgggttgccacaacagtgattttcgcaatcggggaatgactgctctcctcaaagtcagcagctgtgataagaacacaggcgactattacgaagattcttacgaggacataagtgcctactttgactccaagaataacgccattgagcccagatcattctcccagaatcctcccgtgcttaaaaggcatcagcgcgaaatcaccagaactactcttcagtctgatcaagaggagattgactatgacgacaccataagcgtggaaatgaagaaggaggatttcgatatctatgacgaagatgagaaccagtctccgcggagctttcagaagaagacgcgacactacttcattgcagcagtcgaaaggctttgggactacggtatgtcatcatcccctcatgtgttgcgcaatagagctcagagtggaagtgttccacagttcaagaaagtcgtctttcaagagtttacagatggcagcttcacacagcctctctatcggggcgagcttaacgaacatttgggactccttggtccctatatccgagccgaagtggaggacaacattatggttacctttaggaatcaagcctctcgcccctacagcttctactcctccctcatcagttatgaggaggatcagagacaaggcgctgaaccacggaagaactttgtgaaaccgaatgagacgaagacctacttctggaaagtacagcaccacatggcccccacaaaagacgaattcgattgcaaagcatgggcgtatttttcagacgttgacttggagaaagatgtacattcaggacttattggtcctttgttggtgtgtcacactaacactctcaatccagcccatggcaggcaggtgacagtccaggaattcgctcttttctttaccatctttgatgagaccaagtcctggtacttcacggaaaacatggagcgcaattgcagagccccctgtaacatacagatggaggaccctacctttaaggaaaattatcggttccacgcaatcaacggatacattatggatacactccctggccttgtgatggctcaggaccaacgaatcaggtggtacctcctcagcatgggttctaatgagaacatacactccattcacttttcaggacatgtgttcactgtccggaagaaagaagagtataagatggccctctacaatttgtatccaggcgtgtttgagaccgttgaaatgcttccctctaaagctggcatctggagagtagagtgcttgatcggagaacatcttcacgcaggtatgagcaccttgttcctcgtgtacagcaacaaatgtcagaccccacttggcatggccagtggacacattcgcgactttcagatcacagcatctggccagtatggacaatgggccccaaagttggctcgcctccattactccggtagcataaatgcgtggtccactaaagaacctttcagctggattaaggtcgatcttcttgcccccatgatcatccacggcattaagacacagggagcgaggcagaaattctcctccctctacatctcacagttcattattatgtatagtttggacggcaagaagtggcaaacttatagaggtaacagtactggaacagacatggtgttcttcggcaacgttgatagctctggcatcaaacacaacatctttaatcctcccataatagctcggtacatcagattgcatccgacccactacagcattaggagtacactccgaatggagcttatgggttgcgacttgaattcctgttcaatgccactcggaatggagtctaaagccatctctgatgcacagataaccgccagtagctactttacgaacatgtttgctacgtggtcaccctctaaggcaaggcttcatttgcaaggccggtctaatgcctggagacctcaggtgaacaacccgaaagaatggctccaggtggactttcagaagaccatgaaagtaacaggtgtcactactcagggagttaagtccttggatactagcatgtatgtgaaggagttccttatttcctcatcacaagatggccaccagtggaccctcttctttcagaatggtaaggtcaaagtgtttcagggcaatcaagacagcttcacacccgtggtgaacagtcttgatcctccactcttgacacgataccttcgaatccatccacagtcttgggagcaccagattgcattgcgcatggaagtacttggatgcgaggctcaggacctctac

SEQ ID NO: 1046 - protein, 1457 aa, synthetic construct
  REGION 1..1457: note = Variant of human B-domain deleted Factor VIII
MQIELSTCFFLCLLRFCFSATRRYYLGAVELSWDYMQSDLGELPVDARFPPRVPKSFPFNTSVVYKKTLFVEFTDHLFNIAKPRPPWMGLLGPTIQAEVYDTVVITLKNMASHPVSLHAVGVSYWKASEGAEYDDQTSQREKEDDKVFPGGSHTYVWQVLKENGPMASDPPCLTYSYLSHVDLVKDLNSGLIGALLVCREGSLAKEKTQTLHKFILLFAVFDEGKSWHSETKNSLMQDRDAASARAWPKMHTVNGYVNRTLPGLIGCHRKSVYWHVIGMGTTPEVHSIFLEGHTFLVRNHRQASLGISPITFLTAQTLLMDLGQFLLFCHIPSHQHDGMEAYVKVDSCPEEPQLRMKNNEEAEDYDDDLTDSEMDVVRFDDDNSPSIIQARSVAKKHPKTWVHYIAAEEEDWDYAPLVLAPDDRSYKSQYLNNGPQRIGRKYKKVRFMAYTDETFKTREAIQHESGILGPLLYGEVGDTLLIIFKNQASRPYNIYPHGITDVRPLYSRRLPKGVKHLKDFPILPGEIFKYKWTVTVEDGPTKSDPRCLTRYYSSFVNMERDLASGLIGPLLICYKESVDQRGNQIMSDKRNVILFSVFDENRSWYLTENIQRFLPNGAGVQLEDPEFQASNIMHSINGYVFDSLQLSVCLHEVAYWYILSIGAQTDFLSVFFSGYTFKHKMVYEDTLTLFPFSGETVFMSMENPGLWILGCHNSDFRNRGMTALLKVSSCDKNTGDYYEDSYEDISAYFDSKNNAIEPRSFSQNPPVLKRHQREITRTTLQSDQEEIDYDDTISVEMKKEDFDIYDEDENQSPRSFQKKTRHYFIAAVERLWDYGMSSSPHVLRNRAQSGSVPQFKKVVFQEFTDGSFTQPLYRGELNEHLGLLGPYIRAEVEDNIMVTFRNQASRPYSFYSSLISYEEDQRQGAEPRKNFVKPNETKTYFWKVQHHMAPTKDEFDCKAWAYFSDVDLEKDVHSGLIGPLLVCHTNTLNPAHGRQVTVQEFALFFTIFDETKSWYFTENMERNCRAPCNIQMEDPTFKENYRFHAINGYIMDTLPGLVMAQDQRIRWYLLSMGSNENIHSIHFSGHVFTVRKKEEYKMALYNLYPGVFETVEMLPSKAGIWRVECLIGEHLHAGMSTLFLVYSNKCQTPLGMASGHIRDFQITASGQYGQWAPKLARLHYSGSINAWSTKEPFSWIKVDLLAPMIIHGIKTQGARQKFSSLYISQFIIMYSLDGKKWQTYRGNSTGTDMVFFGNVDSSGIKHNIFNPPIIARYIRLHPTHYSIRSTLRMELMGCDLNSCSMPLGMESKAISDAQITASSYFTNMFATWSPSKARLHLQGRSNAWRPQVNNPKEWLQVDFQKTMKVTGVTTQGVKSLDTSMYVKEFLISSSQDGHQWTLFFQNGKVKVFQGNQDSFTPVVNSLDPPLLTRYLRIHPQSWEHQIALRMEVLGCEAQDLY

SEQ ID NO: 1047 - DNA, 4371 bp, synthetic construct
  misc_feature 1..4371: note = Variant of human B-domain deleted Factor VIII
  source 1..4371: mol_type = other DNA
atgcagattgaactgtctacctgcttcttcctctgtttgctgaggttctgctttagcgccactagacggtactaccttggcgctgtggagctgtcctgggactatatgcagagtgatttgggagagcttcccgtcgacgcacgatttcctcctcgcgttccaaagtcatttccctttaacacaagcgtggtgtacaagaagacgctcttcgtcgaattcaccgatcacctgttcaatatcgccaaacccagaccaccatggatgggtcttttggggcctaccatacaagcggaggtgtatgacacagttgttatcactctcaagaacatggcttctcatccggtaagtcttcacgcagtgggcgtgtcctactggaaagcttcagaaggagccgagtatgatgatcagacatcccagagggagaaagaagacgacaaggtatttccaggtgggtctcatacctatgtgtggcaagtgctcaaagagaatggccctatggcaagcgatccgccgtgtttgacttacagctacctttcacacgttgacctcgtcaaggacctcaactccgggttgattggagccttgttggtatgcagggaaggatctcttgccaaagagaagacacagaccctccacaagtttatccttctctttgctgtgttcgatgagggcaaaagttggcatagcgaaacgaagaattccctcatgcaggatcgcgacgcagccagcgccagagcttggcccaagatgcacactgtgaacggatatgtcaataggacgcttcctggcttgattgggtgtcatcggaaaagtgtctactggcacgtgatcggaatggggacaacaccagaggtccactccatatttctcgaaggccataccttccttgttcgaaaccacagacaggcatccttggggatctctcccattacctttctcactgcccaaacgctccttatggacttgggtcagttccttctcttttgccatatcccgtcacaccagcatgatggtatggaagcttatgtgaaagtcgacagttgtcctgaggagccacagttgcgcatgaagaataatgaagaagccgaggattacgacgacgatctcaccgattctgagatggacgtggtgaggtttgatgacgacaactctccctccatcattcaagctcggagcgtggcgaagaaacaccccaagacttgggtccactatatagcggcggaagaggaggattgggattacgctcctcttgtattggcaccagatgaccgctcatacaaaagccagtacctcaacaacggaccgcagagaattggccggaagtataagaaagtgcgatttatggcctatacagacgaaacctttaagacaagggaggccatccagcatgagagtgggattttgggacctcttctttacggcgaagttggtgataccctcctcatcatcttcaagaatcaagggtctcgcccctataacatttacccacacgggatcactgacgttaggcctttgtatagcagaagacttcccaaaggcgtgaagcatctcaaagacttccccattttgccaggcgagatctttaagtacaaatggaccgtcacagtggaagatggaccgactaaatcagaccctcgatgccttacgcggtactattcctccttcgtgaatatggagagagatttggcaagcggactcataggaccactcctcatctgttacaaggaatctgtagaccagaggggtaaccagattatgagtgataaacgcaatgtgatcctttttagcgtcttcgacgagaaccggtcctggtacttgaccgagaatatacaaaggttccttcccaaccccgcaggcgttcagttggaagaccctgagtttcaggccagcaatattatgcactcaatcaacggctatgtgtttgatagtctccagctttctgtttgcctccatgaagtagcctattggtacatcttgtcaattggtgctcaaacagacttcctctccgtcttcttctccggctacacctttaagcacaagatggtgtatgaggacactctcacactctttccattttctggagaaaccgtgttcatgagcatggagaatccaggcctttggatcttgggttgccacaacagtgattttcgcaatcggggaatgactgctctcctcaaagtcagcagctgtgataagaacacaggcgactattacgaagattcttacgaggacataagtgcctactttgactccaagaataacgccattgagcccagatcattctcccagaatcctcccgtgcttaaaaggcatcagcgcgaaatcaccagaactactcttcagtctgatcaagaggagattgactatgacgacaccataagcgtggaaatgaagaaggaggatttcgatatctatgacgaagatgagaaccagtctccgcggagctttcagaagaagacgcgacactacttcattgcagcagtcgaaaggctttgggactacggtatgtcatcatcccctcatgtgttgcgcaatagagctcagagtggaagtgttccacagttcaagaaagtcgtctttcaagagtttacagatggcagcttcacacagcctctctatcggggcgagcttaacgaacatttgggactccttggtccctatatccgagccgaagtggaggacaacattatggttacctttaggaatcaagcctctcgcccctacagcttctactcctccctcatcagttatgaggaggatcagagacaaggcgctgaaccacggaagaactttgtgaaaccgaatgagacgaagacctacttctggaaagtacagcaccacatggcccccacaaaagacgaattcgattgcaaagcatgggcgtatttttcagacgttgacttggagaaagatgtacattcaggacttattggtcctttgttggtgtgtcacactaacactctcaatccagcccatggcaggcaggtgacagtccaggaattcgctcttttctttaccatctttgatgagaccaagtcctggtacttcacggaaaacatggagcgcaattgcagagccccctgtaacatacagatggaggaccctacctttaaggaaaattatcggttccacgcaatcaacggatacattatggatacactccctggccttgtgatggctcaggaccaacgaatcaggtggtacctcctcagcatgggttctaatgagaacatacactccattcacttttcaggacatgtgttcactgtccggaagaaagaagagtataagatggccctctacaatttgtatccaggcgtgtttgagaccgttgaaatgcttccctctaaagctggcatctggagagtagagtgcttgatcggagaacatcttcacgcaggtatgagcaccttgttcctcgtgtacagcaacaaatgtcagaccccacttggcatggccagtggacacattcgcgactttcagatcacagcatctggccagtatggacaatgggccccaaagttggctcgcctccattactccggtagcataaatgcgtggtccactaaagaacctttcagctggattaaggtcgatcttcttgcccccatgatcatccacggcattaagacacagggagcgaggcagaaattctcctccctctacatctcacagttcattattatgtatagtttggacggcaagaagtggcaaacttatagaggtaacagtactggaacagacatggtgttcttcggcaacgttgatagctctggcatcaaacacaacatctttaatcctcccataatagctcggtacatcagattgcatccgacccactacagcattaggagtacactccgaatggagcttatgggttgcgacttgaattcctgttcaatgccactcggaatggagtctaaagccatctctgatgcacagataaccgccagtagctactttacgaacatgtttgctacgtggtcaccctctaaggcaaggcttcatttgcaaggccggtctaatgcctggagacctcaggtgaacaacccgaaagaatggctccaggtggactttcagaagaccatgaaagtaacaggtgtcactactcagggagttaagtccttggatactagcatgtatgtgaaggagttccttatttcctcatcacaagatggccaccagtggaccctcttctttcagaatggtaaggtcaaagtgtttcagggcaatcaagacagcttcacacccgtggtgaacagtcttgatcctccactcttgacacgataccttcgaatccatccacagtcttgggagcaccagattgcattgcgcatggaagtacttggatgcgaggctcaggacctctac

SEQ ID NO: 1048 - protein, 1457 aa, synthetic construct
  REGION 1..1457: note = Variant of human B-domain deleted Factor VIII
MQIELSTCFFLCLLRFCFSATRRYYLGAVELSWDYMQSDLGELPVDARFPPRVPKSFPFNTSVVYKKTLFVEFTDHLFNIAKPRPPWMGLLGPTIQAEVYDTVVITLKNMASHPVSLHAVGVSYWKASEGAEYDDQTSQREKEDDKVFPGGSHTYVWQVLKENGPMASDPPCLTYSYLSHVDLVKDLNSGLIGALLVCREGSLAKEKTQTLHKFILLFAVFDEGKSWHSETKNSLMQDRDAASARAWPKMHTVNGYVNRTLPGLIGCHRKSVYWHVIGMGTTPEVHSIFLEGHTFLVRNHRQASLGISPITFLTAQTLLMDLGQFLLFCHIPSHQHDGMEAYVKVDSCPEEPQLRMKNNEEAEDYDDDLTDSEMDVVRFDDDNSPSIIQARSVAKKHPKTWVHYIAAEEEDWDYAPLVLAPDDRSYKSQYLNNGPQRIGRKYKKVRFMAYTDETFKTREAIQHESGILGPLLYGEVGDTLLIIFKNQGSRPYNIYPHGITDVRPLYSRRLPKGVKHLKDFPILPGEIFKYKWTVTVEDGPTKSDPRCLTRYYSSFVNMERDLASGLIGPLLICYKESVDQRGNQIMSDKRNVILFSVFDENRSWYLTENIQRFLPNPAGVQLEDPEFQASNIMHSINGYVFDSLQLSVCLHEVAYWYILSIGAQTDFLSVFFSGYTFKHKMVYEDTLTLFPFSGETVFMSMENPGLWILGCHNSDFRNRGMTALLKVSSCDKNTGDYYEDSYEDISAYFDSKNNAIEPRSFSQNPPVLKRHQREITRTTLQSDQEEIDYDDTISVEMKKEDFDIYDEDENQSPRSFQKKTRHYFIAAVERLWDYGMSSSPHVLRNRAQSGSVPQFKKVVFQEFTDGSFTQPLYRGELNEHLGLLGPYIRAEVEDNIMVTFRNQASRPYSFYSSLISYEEDQRQGAEPRKNFVKPNETKTYFWKVQHHMAPTKDEFDCKAWAYFSDVDLEKDVHSGLIGPLLVCHTNTLNPAHGRQVTVQEFALFFTIFDETKSWYFTENMERNCRAPCNIQMEDPTFKENYRFHAINGYIMDTLPGLVMAQDQRIRWYLLSMGSNENIHSIHFSGHVFTVRKKEEYKMALYNLYPGVFETVEMLPSKAGIWRVECLIGEHLHAGMSTLFLVYSNKCQTPLGMASGHIRDFQITASGQYGQWAPKLARLHYSGSINAWSTKEPFSWIKVDLLAPMIIHGIKTQGARQKFSSLYISQFIIMYSLDGKKWQTYRGNSTGTDMVFFGNVDSSGIKHNIFNPPIIARYIRLHPTHYSIRSTLRMELMGCDLNSCSMPLGMESKAISDAQITASSYFTNMFATWSPSKARLHLQGRSNAWRPQVNNPKEWLQVDFQKTMKVTGVTTQGVKSLDTSMYVKEFLISSSQDGHQWTLFFQNGKVKVFQGNQDSFTPVVNSLDPPLLTRYLRIHPQSWEHQIALRMEVLGCEAQDLY

SEQ ID NO: 1049 - DNA, 4371 bp, synthetic construct
  misc_feature 1..4371: note = Variant of human B-domain deleted Factor VIII
  source 1..4371: mol_type = other DNA
atgcagattgaactgtctacctgcttcttcctctgtttgctgaggttctgctttagcgccactagacggtactaccttggcgctgtggagctgtcctgggactatatgcagagtgatttgggagagcttcccgtcgacgcacgatttcctcctcgcgttccaaagtcatttccctttaacacaagcgtggtgtacaagaagacgctcttcgtcgaattcaccgatcacctgttcaatatcgccaaacccagaccaccatggatgggtcttttggggcctaccatacaagcggaggtgtatgacacagttgttatcactctcaagaacatggcttctcatccggtaagtcttcacgcagtgggcgtgtcctactggaaagcttcagaaggagccgagtatgatgatcagacatcccagagggagaaagaagacgacaaggtatttccaggtgggtctcatacctatgtgtggcaagtgctcaaagagaatggccctatggcaagcgatccgccgtgtttgacttacagctacctttcacacgttgacctcgtcaaggacctcaactccgggttgattggagccttgttggtatgcagggaaggatctcttgccaaagagaagacacagaccctccacaagtttatccttctctttgctgtgttcgatgagggcaaaagttggcatagcgaaacgaagaattccctcatgcaggatcgcgacgcagccagcgccagagcttggcccaagatgcacactgtgaacggatatgtcaataggacgcttcctggcttgattgggtgtcatcggaaaagtgtctactggcacgtgatcggaatggggacaacaccagaggtccactccatatttctcgaaggccataccttccttgttcgaaaccacagacaggcatccttggggatctctcccattacctttctcactgcccaaacgctccttatggacttgggtcagttccttctcttttgccatatcccgtcacaccagcatgatggtatggaagcttatgtgaaagtcgacagttgtcctgaggagccacagttgcgcatgaagaataatgaagaagccgaggattacgacgacgatctcaccgattctgagatggacgtggtgaggtttgatgacgacaactctccctccatcattcaagctcggagcgtggcgaagaaacaccccaagacttgggtccactatatagcggcggaagaggaggattgggattacgctcctcttgtattggcaccagatgaccgctcatacaaaagccagtacctcaacaacggaccgcagagaattggccggaagtataagaaagtgcgatttatggcctatacagacgaaacctttaagacaagggaggccatccagcatgagagtgggattttgggacctcttctttacggcgaagttggtgataccctcctcatcatcttcaagaatcaagcttctcgcccctataacatttacccacacgggatcactgacgttaggcctttgtatagcagaagacttcccaaaggcgtgaagcatctcaaagacttccccattttgccaggcgagatctttaagtacaaatggaccgtcacagtggaagatggaccgactaaatcagaccctcgatgccttacgcggtactattcctccttcgtgaatatggagagagatttggcaagcggactcataggaccactcctcatctgttacaaggaatctgtagaccagaggggtaaccagattatgagtgataaacgcaatgtgatcctttttagcgtcttcgacgagaaccggtcctggtacttgaccgagaatatacaaaggttccttcccaaccccgcaggcgttcagttggaagaccctgagtttcaggccagcaatattatgcactcaatcaacggctatgtgtttgatagtctccagctttctgtttgcctccatgaagtagcctattggtacatcttgtcaattggtgctcaaacagacttcctctccgtcttcttctccggctacacctttaagcacaagatggtgtatgaggacactctcacactctttccattttctggagaaaccgtgttcatgagcatggagaatccaggcctttggatcttgggttgccacaacagtgattttcgcaatcggggaatgactgctctcctcaaagtcagcagctgtgataagaacacaggcgactattacgaagattcttacgaggacataagtgcctactttgactccaagaataacgccattgagcccagatcattctcccagaatcctcccgtgcttaaaaggcatcagcgcgaaatcaccagaactactcttcagtctgatcaagaggagattgactatgacgacaccataagcgtggaaatgaagaaggaggatttcgatatctatgacgaagatgagaaccagtctccgcggagctttcagaagaagacgcgacactacttcattgcagcagtcgaaaggctttgggactacggtatgtcatcatcccctcatgtgttgcgcaatagagctcagagtggaagtgttccacagttcaagaaagtcgtctttcaagagtttacagatggcagcttcacacagcctctctatcggggcgagcttaacgaacatttgggactccttggtccctatatccgagccgaagtggaggacaacattatggttacctttaggaatcaagcctctcgcccctacagcttctactcctccctcatcagttatgaggaggatcagagacaaggcgctgaaccacggaagaactttgtgaaaccgaatgagacgaagacctacttctggaaagtacagcaccacatggcccccacaaaagacgaattcgattgcaaagcatgggcgtatttttcagacgttgacttggagaaagatgtacattcaggacttattggtcctttgttggtgtgtcacactaacactctcaatccagcccatggcaggcaggtgacagtccaggaattcgctcttttctttaccatctttgatgagaccaagtcctggtacttcacggaaaacatggagcgcaattgcagagccccctgtaacatacagatggaggaccctacctttaaggaaaattatcggttccacgcaatcaacggatacattatggatacactccctggccttgtgatggctcaggaccaacgaatcaggtggtacctcctcagcatgggttctaatgagaacatacactccattcacttttcaggacatgtgttcactgtccggaagaaagaagagtataagatggccctctacaatttgtatccaggcgtgtttgagaccgttgaaatgcttccctctaaagctggcatctggagagtagagtgcttgatcggagaacatcttcacgcaggtatgagcaccttgttcctcgtgtacagcaacaaatgtcagaccccacttggcatggccagtggacacattcgcgactttcagatcacagcatctggccagtatggacaatgggccccaaagttggctcgcctccattactccggtagcataaatgcgtggtccactaaagaagacttcagctggattaaggtcgatcttcttgcccccatgatcatccacggcattaagacacagggagcgaggcagaaattctcctccctctacatctcacagttcattattatgtatagtttggacggcaagaagtggcaaacttatagaggtaacagtactggaacagacatggtgttcttcggcaacgttgatagctctggcatcaaacacaacatctttaatcctcccataatagctcggtacatcagattgcatccgacccactacagcattaggagtacactccgaatggagcttatgggttgcgacttgaattcctgttcaatgccactcggaatggagtctaaagccatctctgatgcacagataaccgccagtagctactttacgaacatgtttgctacgtggtcaccctctaaggcaaggcttcatttgcaaggccggtctaatgcctggagacctcaggtgaacaacccgaaagaatggctccaggtggactttcagaagaccatgaaagtaacaggtgtcactactcagggagttaagtccttggatactagcatgtatgtgaaggagttccttatttcctcatcacaagatggccaccagtggaccctcttctttcagaatggtaaggtcaaagtgtttcagggcaatcaagacagcttcacacccgtggtgaacagtcttgatcctccactcttgacacgataccttcgaatccatccacagtcttgggagcaccagattgcattgcgcatggaagtacttggatgcgaggctcaggacctctac

SEQ ID NO: 1050 - protein, 1457 aa, synthetic construct
  REGION 1..1457: note = Variant of human B-domain deleted Factor VIII
MQIELSTCFFLCLLRFCFSATRRYYLGAVELSWDYMQSDLGELPVDARFPPRVPKSFPFNTSVVYKKTLFVEFTDHLFNIAKPRPPWMGLLGPTIQAEVYDTVVITLKNMASHPVSLHAVGVSYWKASEGAEYDDQTSQREKEDDKVFPGGSHTYVWQVLKENGPMASDPPCLTYSYLSHVDLVKDLNSGLIGALLVCREGSLAKEKTQTLHKFILLFAVFDEGKSWHSETKNSLMQDRDAASARAWPKMHTVNGYVNRTLPGLIGCHRKSVYWHVIGMGTTPEVHSIFLEGHTFLVRNHRQASLGISPITFLTAQTLLMDLGQFLLFCHIPSHQHDGMEAYVKVDSCPEEPQLRMKNNEEAEDYDDDLTDSEMDVVRFDDDNSPSIIQARSVAKKHPKTWVHYIAAEEEDWDYAPLVLAPDDRSYKSQYLNNGPQRIGRKYKKVRFMAYTDETFKTREAIQHESGILGPLLYGEVGDTLLIIFKNQASRPYNIYPHGITDVRPLYSRRLPKGVKHLKDFPILPGEIFKYKWTVTVEDGPTKSDPRCLTRYYSSFVNMERDLASGLIGPLLICYKESVDQRGNQIMSDKRNVILFSVFDENRSWYLTENIQRFLPNPAGVQLEDPEFQASNIMHSINGYVFDSLQLSVCLHEVAYWYILSIGAQTDFLSVFFSGYTFKHKMVYEDTLTLFPFSGETVFMSMENPGLWILGCHNSDFRNRGMTALLKVSSCDKNTGDYYEDSYEDISAYFDSKNNAIEPRSFSQNPPVLKRHQREITRTTLQSDQEEIDYDDTISVEMKKEDFDIYDEDENQSPRSFQKKTRHYFIAAVERLWDYGMSSSPHVLRNRAQSGSVPQFKKVVFQEFTDGSFTQPLYRGELNEHLGLLGPYIRAEVEDNIMVTFRNQASRPYSFYSSLISYEEDQRQGAEPRKNFVKPNETKTYFWKVQHHMAPTKDEFDCKAWAYFSDVDLEKDVHSGLIGPLLVCHTNTLNPAHGRQVTVQEFALFFTIFDETKSWYFTENMERNCRAPCNIQMEDPTFKENYRFHAINGYIMDTLPGLVMAQDQRIRWYLLSMGSNENIHSIHFSGHVFTVRKKEEYKMALYNLYPGVFETVEMLPSKAGIWRVECLIGEHLHAGMSTLFLVYSNKCQTPLGMASGHIRDFQITASGQYGQWAPKLARLHYSGSINAWSTKEDFSWIKVDLLAPMIIHGIKTQGARQKFSSLYISQFIIMYSLDGKKWQTYRGNSTGTDMVFFGNVDSSGIKHNIFNPPIIARYIRLHPTHYSIRSTLRMELMGCDLNSCSMPLGMESKAISDAQITASSYFTNMFATWSPSKARLHLQGRSNAWRPQVNNPKEWLQVDFQKTMKVTGVTTQGVKSLDTSMYVKEFLISSSQDGHQWTLFFQNGKVKVFQGNQDSFTPVVNSLDPPLLTRYLRIHPQSWEHQIALRMEVLGCEAQDLY

SEQ ID NO: 1051 - DNA, 4371 bp, synthetic construct
  misc_feature 1..4371: note = Variant of human B-domain deleted Factor VIII
  source 1..4371: mol_type = other DNA
atgcagattgaactgtctacctgcttcttcctctgtttgctgaggttctgctttagcgccactagacggtactaccttggcgctgtggagctgtcctgggactatatgcagagtgatttgggagagcttcccgtcgacgcacgatttcctcctcgcgttccaaagtcatttccctttaacacaagcgtggtgtacaagaagacgctcttcgtcgaattcaccgatcacctgttcaatatcgccaaacccagaccaccatggatgggtcttttggggcctaccatacaagcggaggtgtatgacacagttgttatcactctcaagaacatggcttctcatccggtaagtcttcacgcagtgggcgtgtcctactggaaagcttcagaaggagccgagtatgatgatcagacatcccagagggagaaagaagacgacaaggtatttccaggtgggtctcatacctatgtgtggcaagtgctcaaagagaatggccctatggcaagcgatccgccgtgtttgacttacagctacctttcacacgttgacctcgtcaaggacctcaactccgggttgattggagccttgttggtatgcagggaaggatctcttgccaaagagaagacacagaccctccacaagtttatccttctctttgctgtgttcgatgagggcaaaagttggcatagcgaaacgaagaattccctcatgcaggatcgcgacgcagccagcgccagagcttggcccaagatgcacactgtgaacggatatgtcaataggacgcttcctggcttgattgggtgtcatcggaaaagtgtctactggcacgtgatcggaatggggacaacaccagaggtccactccatatttctcgaaggccataccttccttgttcgaaaccacagacaggcatccttggggatctctcccattacctttctcactgcccaaacgctccttatggacttgggtcagttccttctcttttgccatatcccgtcacaccagcatgatggtatggaagcttatgtgaaagtcgacagttgtcctgaggagccacagttgcgcatgaagaataatgaagaagccgaggattacgacgacgatctcaccgattctgagatggacgtggtgaggtttgatgacgacaactctccctccatcattcaagctcggagcgtggcgaagaaacaccccaagacttgggtccactatatagcggcggaagaggaggattgggattacgctcctcttgtattggcaccagatgaccgctcatacaaaagccagtacctcaacaacggaccgcagagaattggccggaagtataagaaagtgcgatttatggcctatacagacgaaacctttaagacaagggaggccatccagcatgagagtgggattttgggacctcttctttacggcgaagttggtgataccctcctcatcatcttcaagaatcaagcttctcgcccctataacatttacccacacgggatcactgacgttaggcctttgtatagcagaagacttcccaaaggcgtgaagcatctcaaagacttccccattttgccaggcgagatctttaagtacaaatggaccgtcacagtggaagatggaccgactaaatcagaccctcgatgccttacgcggtactattcctccttcgtgaatatggagagagatttggcaagcggactcataggaccactcctcatctgttacaaggaatctgtagaccagaggggtaaccagattatgagtgataaacgcaatgtgatcctttttagcgtcttcgacgagaaccggtcctggtacttgaccgagaatatacaaaggttccttcccaaccccgcaggcgttcagttggaagaccctgagtttcaggccagcaatattatgcactcaatcaacggctatgtgtttgatagtctccagctttctgtttgcctccatgaagtagcctattggtacatcttgtcaattggtgctcaaacagacttcctctccgtcttcttctccggctacacctttaagcacaagatggtgtatgaggacactctcacactctttccattttctggagaaaccgtgttcatgagcatggagaatccaggcctttggatcttgggttgccacaacagtgattttcgcaatcggggaatgactgctctcctcaaagtcagcagctgtgataagaacacaggcgactattacgaagattcttacgaggacataagtgcctactttgactccaagaataacgccattgagcccagatcattctcccagaatcctcccgtgcttaaaaggcatcagcgcgaaatcaccagaactactcttcagtctgatcaagaggagattgactatgacgacaccataagcgtggaaatgaagaaggaggatttcgatatctatgacgaagatgagaaccagtctccgcggagctttcagaagaagacgcgacactacttcattgcagcagtcgaaaggctttgggactacggtatgtcatcatcccctcatgtgttgcgcaatagagctcagagtggaagtgttccacagttcaagaaagtcgtctttcaagagtttacagatggcagcttcacacagcctctctatcggggcgagcttaacgaacatttgggactccttggtccctatatccgagccgaagtggaggacaacattatggttacctttaggaatcaagcctctcgcccctacagcttctactcctccctcatcagttatgaggaggatcagagacaaggcgctgaaccacggaagaactttgtgaaaccgaatgagacgaagacctacttctggaaagtacagcaccacatggcccccacaaaagacgaattcgattgcaaagcatgggcgtatttttcagacgttgacttggagaaagatgtacattcaggacttattggtcctttgttggtgtgtcacactaacactctcaatccagcccatggcaggcaggtgacagtccaggaattcgctcttttctttaccatctttgatgagaccaagtcctggtacttcacggaaaacatggagcgcaattgcagagccccctgtaacatacagatggaggaccctacctttaaggaaaattatcggttccacgcaatcaacggatacattatggatacactccctggccttgtgatggctcaggaccaacgaatcaggtggtacctcctcagcatgggttctaatgagaacatacactccattcacttttcaggacatgtgttcactgtccggaagaaagaagagtataagatggccctctacaatttgtatccaggcgtgtttgagaccgttgaaatgcttccctctaaagctggcatctggagagtagagtgcttgatcggagaacatcttcacgcaggtatgagcaccttgttcctcgtgtacagcaacaaatgtcagaccccacttggcatggccagtggacacattcgcgactttcagatcacagcatctggccagtatggacaatgggccccaaagttggctcgcctccattactccggtagcataaatgcgtggtccactaaagaacctttcccgtggattaaggtcgatcttcttgcccccatgatcatccacggcattaagacacagggagcgaggcagaaattctcctccctctacatctcacagttcattattatgtatagtttggacggcaagaagtggcaaacttatagaggtaacagtactggaacagacatggtgttcttcggcaacgttgatagctctggcatcaaacacaacatctttaatcctcccataatagctcggtacatcagattgcatccgacccactacagcattaggagtacactccgaatggagcttatgggttgcgacttgaattcctgttcaatgccactcggaatggagtctaaagccatctctgatgcacagataaccgccagtagctactttacgaacatgtttgctacgtggtcaccctctaaggcaaggcttcatttgcaaggccggtctaatgcctggagacctcaggtgaacaacccgaaagaatggctccaggtggactttcagaagaccatgaaagtaacaggtgtcactactcagggagttaagtccttggatactagcatgtatgtgaaggagttccttatttcctcatcacaagatggccaccagtggaccctcttctttcagaatggtaaggtcaaagtgtttcagggcaatcaagacagcttcacacccgtggtgaacagtcttgatcctccactcttgacacgataccttcgaatccatccacagtcttgggagcaccagattgcattgcgcatggaagtacttggatgcgaggctcaggacctctac

SEQ ID NO: 1052 - protein, 1457 aa, synthetic construct
  REGION 1..1457: note = Variant of human B-domain deleted Factor VIII
MQIELSTCFFLCLLRFCFSATRRYYLGAVELSWDYMQSDLGELPVDARFPPRVPKSFPFNTSVVYKKTLFVEFTDHLFNIAKPRPPWMGLLGPTIQAEVYDTVVITLKNMASHPVSLHAVGVSYWKASEGAEYDDQTSQREKEDDKVFPGGSHTYVWQVLKENGPMASDPPCLTYSYLSHVDLVKDLNSGLIGALLVCREGSLAKEKTQTLHKFILLFAVFDEGKSWHSETKNSLMQDRDAASARAWPKMHTVNGYVNRTLPGLIGCHRKSVYWHVIGMGTTPEVHSIFLEGHTFLVRNHRQASLGISPITFLTAQTLLMDLGQFLLFCHIPSHQHDGMEAYVKVDSCPEEPQLRMKNNEEAEDYDDDLTDSEMDVVRFDDDNSPSIIQARSVAKKHPKTWVHYIAAEEEDWDYAPLVLAPDDRSYKSQYLNNGPQRIGRKYKKVRFMAYTDETFKTREAIQHESGILGPLLYGEVGDTLLIIFKNQASRPYNIYPHGITDVRPLYSRRLPKGVKHLKDFPILPGEIFKYKWTVTVEDGPTKSDPRCLTRYYSSFVNMERDLASGLIGPLLICYKESVDQRGNQIMSDKRNVILFSVFDENRSWYLTENIQRFLPNPAGVQLEDPEFQASNIMHSINGYVFDSLQLSVCLHEVAYWYILSIGAQTDFLSVFFSGYTFKHKMVYEDTLTLFPFSGETVFMSMENPGLWILGCHNSDFRNRGMTALLKVSSCDKNTGDYYEDSYEDISAYFDSKNNAIEPRSFSQNPPVLKRHQREITRTTLQSDQEEIDYDDTISVEMKKEDFDIYDEDENQSPRSFQKKTRHYFIAAVERLWDYGMSSSPHVLRNRAQSGSVPQFKKVVFQEFTDGSFTQPLYRGELNEHLGLLGPYIRAEVEDNIMVTFRNQASRPYSFYSSLISYEEDQRQGAEPRKNFVKPNETKTYFWKVQHHMAPTKDEFDCKAWAYFSDVDLEKDVHSGLIGPLLVCHTNTLNPAHGRQVTVQEFALFFTIFDETKSWYFTENMERNCRAPCNIQMEDPTFKENYRFHAINGYIMDTLPGLVMAQDQRIRWYLLSMGSNENIHSIHFSGHVFTVRKKEEYKMALYNLYPGVFETVEMLPSKAGIWRVECLIGEHLHAGMSTLFLVYSNKCQTPLGMASGHIRDFQITASGQYGQWAPKLARLHYSGSINAWSTKEPFPWIKVDLLAPMIIHGIKTQGARQKFSSLYISQFIIMYSLDGKKWQTYRGNSTGTDMVFFGNVDSSGIKHNIFNPPIIARYIRLHPTHYSIRSTLRMELMGCDLNSCSMPLGMESKAISDAQITASSYFTNMFATWSPSKARLHLQGRSNAWRPQVNNPKEWLQVDFQKTMKVTGVTTQGVKSLDTSMYVKEFLISSSQDGHQWTLFFQNGKVKVFQGNQDSFTPVVNSLDPPLLTRYLRIHPQSWEHQIALRMEVLGCEAQDLY

SEQ ID NO: 1053 - DNA, 4371 bp, synthetic construct
  misc_feature 1..4371: note = Variant of human B-domain deleted Factor VIII
  source 1..4371: mol_type = other DNA
atgcagattgaactgtctacctgcttcttcctctgtttgctgaggttctgctttagcgccactagacggtactaccttggcgctgtggagctgtcctgggactatatgcagagtgatttgggagagcttcccgtcgacgcacgatttcctcctcgcgttccaaagtcatttccctttaacacaagcgtggtgtacaagaagacgctcttcgtcgaattcaccgatcacctgttcaatatcgccaaacccagaccaccatggatgggtcttttggggcctaccatacaagcggaggtgtatgacacagttgttatcactctcaagaacatggcttctcatccggtaagtcttcacgcagtgggcgtgtcctactggaaagcttcagaaggagccgagtatgatgatcagacatcccagagggagaaagaagacgacaaggtatttccaggtgggtctcatacctatgtgtggcaagtgctcaaagagaatggccctatggcaagcgatccgccgtgtttgacttacagctacctttcacacgttgacctcgtcaaggacctcaactccgggttgattggagccttgttggtatgcagggaaggatctcttgccaaagagaagacacagaccctccacaagtttatccttctctttgctgtgttcgatgagggcaaaagttggcatagcgaaacgaagaattccctcatgcaggatcgcgacgcagccagcgccagagcttggcccaagatgcacactgtgaacggatatgtcaataggacgcttcctggcttgattgggtgtcatcggaaaagtgtctactggcacgtgatcggaatggggacaacaccagaggtccactccatatttctcgaaggccataccttccttgttcgaaaccacagacaggcatccttggggatctctcccattacctttctcactgcccaaacgctccttatggacttgggtcagttccttctcttttgccatatcccgtcacaccagcatgatggtatggaagcttatgtgaaagtcgacagttgtcctgaggagccacagttgcgcatgaagaataatgaagaagccgaggattacgacgacgatctcaccgattctgagatggacgtggtgaggtttgatgacgacaactctccctccatcattcaagctcggagcgtggcgaagaaacaccccaagacttgggtccactatatagcggcggaagaggaggattgggattacgctcctcttgtattggcaccagatgaccgctcatacaaaagccagtacctcaacaacggaccgcagagaattggccggaagtataagaaagtgcgatttatggcctatacagacgaaacctttaagacaagggaggccatccagcatgagagtgggattttgggacctcttctttacggcgaagttggtgataccctcctcatcatcttcaagaatcaagcttctcgcccctataacatttacccacacgggatcactgacgttaggcctttgtatagcagaagacttcccaaaggcgtgaagcatctcaaagacttccccattttgccaggcgagatctttaagtacaaatggaccgtcacagtggaagatggaccgactaaatcagaccctcgatgccttacgcggtactattcctccttcgtgaatatggagagagatttggcaagcggactcataggaccactcctcatctgttacaaggaatctgtagaccagaggggtaaccagattatgagtgataaacgcaatgtgatcctttttagcgtcttcgacgagaaccggtcctggtacttgaccgagaatatacaaaggttccttcccaaccccgcagaagttcagttggaagaccctgagtttcaggccagcaatattatgcactcaatcaacggctatgtgtttgatagtctccagctttctgtttgcctccatgaagtagcctattggtacatcttgtcaattggtgctcaaacagacttcctctccgtcttcttctccggctacacctttaagcacaagatggtgtatgaggacactctcacactctttccattttctggagaaaccgtgttcatgagcatggagaatccaggcctttggatcttgggttgccacaacagtgattttcgcaatcggggaatgactgctctcctcaaagtcagcagctgtgataagaacacaggcgactattacgaagattcttacgaggacataagtgcctactttgactccaagaataacgccattgagcccagatcattctcccagaatcctcccgtgcttaaaaggcatcagcgcgaaatcaccagaactactcttcagtctgatcaagaggagattgactatgacgacaccataagcgtggaaatgaagaaggaggatttcgatatctatgacgaagatgagaaccagtctccgcggagctttcagaagaagacgcgacactacttcattgcagcagtcgaaaggctttgggactacggtatgtcatcatcccctcatgtgttgcgcaatagagctcagagtggaagtgttccacagttcaagaaagtcgtctttcaagagtttacagatggcagcttcacacagcctctctatcggggcgagcttaacgaacatttgggactccttggtccctatatccgagccgaagtggaggacaacattatggttacctttaggaatcaagcctctcgcccctacagcttctactcctccctcatcagttatgaggaggatcagagacaaggcgctgaaccacggaagaactttgtgaaaccgaatgagacgaagacctacttctggaaagtacagcaccacatggcccccacaaaagacgaattcgattgcaaagcatgggcgtatttttcagacgttgacttggagaaagatgtacattcaggacttattggtcctttgttggtgtgtcacactaacactctcaatccagcccatggcaggcaggtgacagtccaggaattcgctcttttctttaccatctttgatgagaccaagtcctggtacttcacggaaaacatggagcgcaattgcagagccccctgtaacatacagatggaggaccctacctttaaggaaaattatcggttccacgcaatcaacggatacattatggatacactccctggccttgtgatggctcaggaccaacgaatcaggtggtacctcctcagcatgggttctaatgagaacatacactccattcacttttcaggacatgtgttcactgtccggaagaaagaagagtataagatggccctctacaatttgtatccaggcgtgtttgagaccgttgaaatgcttccctctaaagctggcatctggagagtagagtgcttgatcggagaacatcttcacgcaggtatgagcaccttgttcctcgtgtacagcaacaaatgtcagaccccacttggcatggccagtggacacattcgcgactttcagatcacagcatctggccagtatggacaatgggccccaaagttggctcgcctccattactccggtagcataaatgcgtggtccactaaagaacctttcagctggattaaggtcgatcttcttgcccccatgatcatccacggcattaagacacagggagcgaggcagaaattctcctccctctacatctcacagttcattattatgtatagtttggacggcaagaagtggcaaacttatagaggtaacagtactggaacagacatggtgttcttcggcaacgttgatagctctggcatcaaacacaacatctttaatcctcccataatagctcggtacatcagattgcatccgacccactacagcattaggagtacactccgaatggagcttatgggttgcgacttgaattcctgttcaatgccactcggaatggagtctaaagccatctctgatgcacagataaccgccagtagctactttacgaacatgtttgctacgtggtcaccctctaaggcaaggcttcatttgcaaggccggtctaatgcctggagacctcaggtgaacaacccgaaagaatggctccaggtggactttcagaagaccatgaaagtaacaggtgtcactactcagggagttaagtccttggatactagcatgtatgtgaaggagttccttatttcctcatcacaagatggccaccagtggaccctcttctttcagaatggtaaggtcaaagtgtttcagggcaatcaagacagcttcacacccgtggtgaacagtcttgatcctccactcttgacacgataccttcgaatccatccacagtcttgggagcaccagattgcattgcgcatggaagtacttggatgcgaggctcaggacctctac

SEQ ID NO: 1054 - protein, 1457 aa, synthetic construct
  REGION 1..1457: note = Variant of human B-domain deleted Factor VIII
MQIELSTCFFLCLLRFCFSATRRYYLGAVELSWDYMQSDLGELPVDARFPPRVPKSFPFNTSVVYKKTLFVEFTDHLFNIAKPRPPWMGLLGPTIQAEVYDTVVITLKNMASHPVSLHAVGVSYWKASEGAEYDDQTSQREKEDDKVFPGGSHTYVWQVLKENGPMASDPPCLTYSYLSHVDLVKDLNSGLIGALLVCREGSLAKEKTQTLHKFILLFAVFDEGKSWHSETKNSLMQDRDAASARAWPKMHTVNGYVNRTLPGLIGCHRKSVYWHVIGMGTTPEVHSIFLEGHTFLVRNHRQASLGISPITFLTAQTLLMDLGQFLLFCHIPSHQHDGMEAYVKVDSCPEEPQLRMKNNEEAEDYDDDLTDSEMDVVRFDDDNSPSIIQARSVAKKHPKTWVHYIAAEEEDWDYAPLVLAPDDRSYKSQYLNNGPQRIGRKYKKVRFMAYTDETFKTREAIQHESGILGPLLYGEVGDTLLIIFKNQASRPYNIYPHGITDVRPLYSRRLPKGVKHLKDFPILPGEIFKYKWTVTVEDGPTKSDPRCLTRYYSSFVNMERDLASGLIGPLLICYKESVDQRGNQIMSDKRNVILFSVFDENRSWYLTENIQRFLPNPAEVQLEDPEFQASNIMHSINGYVFDSLQLSVCLHEVAYWYILSIGAQTDFLSVFFSGYTFKHKMVYEDTLTLFPFSGETVFMSMENPGLWILGCHNSDFRNRGMTALLKVSSCDKNTGDYYEDSYEDISAYFDSKNNAIEPRSFSQNPPVLKRHQREITRTTLQSDQEEIDYDDTISVEMKKEDFDIYDEDENQSPRSFQKKTRHYFIAAVERLWDYGMSSSPHVLRNRAQSGSVPQFKKVVFQEFTDGSFTQPLYRGELNEHLGLLGPYIRAEVEDNIMVTFRNQASRPYSFYSSLISYEEDQRQGAEPRKNFVKPNETKTYFWKVQHHMAPTKDEFDCKAWAYFSDVDLEKDVHSGLIGPLLVCHTNTLNPAHGRQVTVQEFALFFTIFDETKSWYFTENMERNCRAPCNIQMEDPTFKENYRFHAINGYIMDTLPGLVMAQDQRIRWYLLSMGSNENIHSIHFSGHVFTVRKKEEYKMALYNLYPGVFETVEMLPSKAGIWRVECLIGEHLHAGMSTLFLVYSNKCQTPLGMASGHIRDFQITASGQYGQWAPKLARLHYSGSINAWSTKEPFSWIKVDLLAPMIIHGIKTQGARQKFSSLYISQFIIMYSLDGKKWQTYRGNSTGTDMVFFGNVDSSGIKHNIFNPPIIARYIRLHPTHYSIRSTLRMELMGCDLNSCSMPLGMESKAISDAQITASSYFTNMFATWSPSKARLHLQGRSNAWRPQVNNPKEWLQVDFQKTMKVTGVTTQGVKSLDTSMYVKEFLISSSQDGHQWTLFFQNGKVKVFQGNQDSFTPVVNSLDPPLLTRYLRIHPQSWEHQIALRMEVLGCEAQDLY

SEQ ID NO: 1055 - DNA, 4371 bp, synthetic construct
  misc_feature 1..4371: note = Variant of human B-domain deleted Factor VIII
  source 1..4371: mol_type = other DNA
atgcagattgaactgtctacctgcttcttcctctgtttgctgaggttctgctttagcgccactagacggtactaccttggcgctgtggagctgtcctgggactatatgcagagtgatttgggagagcttcccgtcgacgcacgatttcctcctcgcgttccaaagtcatttccctttaacacaagcgtggtgtacaagaagacgctcttcgtcgaattcaccgatcacctgttcaatatcgccaaacccagaccaccatggatgggtcttttggggcctaccatacaagcggaggtgtatgacacagttgttatcactctcaagaacatggcttctcatccggtaagtcttcacgcagtgggcgtgtcctactggaaagcttcagaaggagccgagtatgatgatcagacatcccagagggagaaagaagacgacaaggtatttccaggtgggtctcatacctatgtgtggcaagtgctcaaagagaatggccctatggcaagcgatccgccgtgtttgacttacagctacctttcacacgttgacctcgtcaaggacctcaactccgggttgattggagccttgttggtatgcagggaaggatctcttgccaaagagaagacacagaccctccacaagtttatccttctctttgctgtgttcgatgagggcaaaagttggcatagcgaaacgaagaattccctcatgcaggatcgcgacgcagccagcgccagagcttggcccaagatgcacactgtgaacggatatgtcaataggacgcttcctggcttgattgggtgtcatcggaaaagtgtctactggcacgtgatcggaatggggacaacaccagaggtccactccatatttctcgaaggccataccttccttgttcgaaaccacagacaggcatccttggggatctctcccattacctttctcactgcccaaacgctccttatggacttgggtcagttccttctcttttgccatatcccgtcacaccagcatgatggtatggaagcttatgtgaaagtcgacagttgtcctgaggagccacagttgcgcatgaagaataatgaagaagccgaggattacgacgacgatctcaccgattctgagatggacgtggtgaggtttgatgacgacaactctccctccatcattcaagctcggagcgtggcgaagaaacaccccaagacttgggtccactatatagcggcggaagaggaggattgggattacgctcctcttgtattggcaccagatgaccgctcatacaaaagccagtacctcaacaacggaccgcagagaattggccggaagtataagaaagtgcgatttatggcctatacagacgaaacctttaagacaagggaggccatccagcatgagagtgggattttgggacctcttctttacggcgaagttggtgataccctcctcatcatcttcaagaatcaagcttctcgcccctataacatttacccacacgggatcactgacgttaggcctttgtatagcagaagacttcccaaaggcgtgaagcatctcaaagacttccccattttgccaggcgagatctttaagtacaaatggaccgtcacagtggaagatggaccgactaaatcagaccctcgatgccttacgcggtactattcctccttcgtgaatatggagagagatttggcaagcggactcataggaccactcctcatctgttacaaggaatctgtagaccagaggggtaaccagattatgagtgataaacgcaatgtgatcctttttagcgtcttcgacgagaaccggtcctggtacttgaccgagaatatacaaaggttccttgataaccccgcaggcgttcagttggaagaccctgagtttcaggccagcaatattatgcactcaatcaacggctatgtgtttgatagtctccagctttctgtttgcctccatgaagtagcctattggtacatcttgtcaattggtgctcaaacagacttcctctccgtcttcttctccggctacacctttaagcacaagatggtgtatgaggacactctcacactctttccattttctggagaaaccgtgttcatgagcatggagaatccaggcctttggatcttgggttgccacaacagtgattttcgcaatcggggaatgactgctctcctcaaagtcagcagctgtgataagaacacaggcgactattacgaagattcttacgaggacataagtgcctactttgactccaagaataacgccattgagcccagatcattctcccagaatcctcccgtgcttaaaaggcatcagcgcgaaatcaccagaactactcttcagtctgatcaagaggagattgactatgacgacaccataagcgtggaaatgaagaaggaggatttcgatatctatgacgaagatgagaaccagtctccgcggagctttcagaagaagacgcgacactacttcattgcagcagtcgaaaggctttgggactacggtatgtcatcatcccctcatgtgttgcgcaatagagctcagagtggaagtgttccacagttcaagaaagtcgtctttcaagagtttacagatggcagcttcacacagcctctctatcggggcgagcttaacgaacatttgggactccttggtccctatatccgagccgaagtggaggacaacattatggttacctttaggaatcaagcctctcgcccctacagcttctactcctccctcatcagttatgaggaggatcagagacaaggcgctgaaccacggaagaactttgtgaaaccgaatgagacgaagacctacttctggaaagtacagcaccacatggcccccacaaaagacgaattcgattgcaaagcatgggcgtatttttcagacgttgacttggagaaagatgtacattcaggacttattggtcctttgttggtgtgtcacactaacactctcaatccagcccatggcaggcaggtgacagtccaggaattcgctcttttctttaccatctttgatgagaccaagtcctggtacttcacggaaaacatggagcgcaattgcagagccccctgtaacatacagatggaggaccctacctttaaggaaaattatcggttccacgcaatcaacggatacattatggatacactccctggccttgtgatggctcaggaccaacgaatcaggtggtacctcctcagcatgggttctaatgagaacatacactccattcacttttcaggacatgtgttcactgtccggaagaaagaagagtataagatggccctctacaatttgtatccaggcgtgtttgagaccgttgaaatgcttccctctaaagctggcatctggagagtagagtgcttgatcggagaacatcttcacgcaggtatgagcaccttgttcctcgtgtacagcaacaaatgtcagaccccacttggcatggccagtggacacattcgcgactttcagatcacagcatctggccagtatggacaatgggccccaaagttggctcgcctccattactccggtagcataaatgcgtggtccactaaagaacctttcagctggattaaggtcgatcttcttgcccccatgatcatccacggcattaagacacagggagcgaggcagaaattctcctccctctacatctcacagttcattattatgtatagtttggacggcaagaagtggcaaacttatagaggtaacagtactggaacagacatggtgttcttcggcaacgttgatagctctggcatcaaacacaacatctttaatcctcccataatagctcggtacatcagattgcatccgacccactacagcattaggagtacactccgaatggagcttatgggttgcgacttgaattcctgttcaatgccactcggaatggagtctaaagccatctctgatgcacagataaccgccagtagctactttacgaacatgtttgctacgtggtcaccctctaaggcaaggcttcatttgcaaggccggtctaatgcctggagacctcaggtgaacaacccgaaagaatggctccaggtggactttcagaagaccatgaaagtaacaggtgtcactactcagggagttaagtccttggatactagcatgtatgtgaaggagttccttatttcctcatcacaagatggccaccagtggaccctcttctttcagaatggtaaggtcaaagtgtttcagggcaatcaagacagcttcacacccgtggtgaacagtcttgatcctccactcttgacacgataccttcgaatccatccacagtcttgggagcaccagattgcattgcgcatggaagtacttggatgcgaggctcaggacctctac

SEQ ID NO: 1056 - protein, 1457 aa, synthetic construct
  REGION 1..1457: note = Variant of human B-domain deleted Factor VIII
MQIELSTCFFLCLLRFCFSATRRYYLGAVELSWDYMQSDLGELPVDARFPPRVPKSFPFNTSVVYKKTLFVEFTDHLFNIAKPRPPWMGLLGPTIQAEVYDTVVITLKNMASHPVSLHAVGVSYWKASEGAEYDDQTSQREKEDDKVFPGGSHTYVWQVLKENGPMASDPPCLTYSYLSHVDLVKDLNSGLIGALLVCREGSLAKEKTQTLHKFILLFAVFDEGKSWHSETKNSLMQDRDAASARAWPKMHTVNGYVNRTLPGLIGCHRKSVYWHVIGMGTTPEVHSIFLEGHTFLVRNHRQASLGISPITFLTAQTLLMDLGQFLLFCHIPSHQHDGMEAYVKVDSCPEEPQLRMKNNEEAEDYDDDLTDSEMDVVRFDDDNSPSIIQARSVAKKHPKTWVHYIAAEEEDWDYAPLVLAPDDRSYKSQYLNNGPQRIGRKYKKVRFMAYTDETFKTREAIQHESGILGPLLYGEVGDTLLIIFKNQASRPYNIYPHGITDVRPLYSRRLPKGVKHLKDFPILPGEIFKYKWTVTVEDGPTKSDPRCLTRYYSSFVNMERDLASGLIGPLLICYKESVDQRGNQIMSDKRNVILFSVFDENRSWYLTENIQRFLDNPAGVQLEDPEFQASNIMHSINGYVFDSLQLSVCLHEVAYWYILSIGAQTDFLSVFFSGYTFKHKMVYEDTLTLFPFSGETVFMSMENPGLWILGCHNSDFRNRGMTALLKVSSCDKNTGDYYEDSYEDISAYFDSKNNAIEPRSFSQNPPVLKRHQREITRTTLQSDQEEIDYDDTISVEMKKEDFDIYDEDENQSPRSFQKKTRHYFIAAVERLWDYGMSSSPHVLRNRAQSGSVPQFKKVVFQEFTDGSFTQPLYRGELNEHLGLLGPYIRAEVEDNIMVTFRNQASRPYSFYSSLISYEEDQRQGAEPRKNFVKPNETKTYFWKVQHHMAPTKDEFDCKAWAYFSDVDLEKDVHSGLIGPLLVCHTNTLNPAHGRQVTVQEFALFFTIFDETKSWYFTENMERNCRAPCNIQMEDPTFKENYRFHAINGYIMDTLPGLVMAQDQRIRWYLLSMGSNENIHSIHFSGHVFTVRKKEEYKMALYNLYPGVFETVEMLPSKAGIWRVECLIGEHLHAGMSTLFLVYSNKCQTPLGMASGHIRDFQITASGQYGQWAPKLARLHYSGSINAWSTKEPFSWIKVDLLAPMIIHGIKTQGARQKFSSLYISQFIIMYSLDGKKWQTYRGNSTGTDMVFFGNVDSSGIKHNIFNPPIIARYIRLHPTHYSIRSTLRMELMGCDLNSCSMPLGMESKAISDAQITASSYFTNMFATWSPSKARLHLQGRSNAWRPQVNNPKEWLQVDFQKTMKVTGVTTQGVKSLDTSMYVKEFLISSSQDGHQWTLFFQNGKVKVFQGNQDSFTPVVNSLDPPLLTRYLRIHPQSWEHQIALRMEVLGCEAQDLY

SEQ ID NO: 1057 - DNA, 4371 bp, synthetic construct
  misc_feature 1..4371: note = Variant of human B-domain deleted Factor VIII
  source 1..4371: mol_type = other DNA
atgcagattgaactgtctacctgcttcttcctctgtttgctgagggcttgctttagcgccactagacggtactaccttggcgctgtggagctgtcctgggactatatgcagagtgatttgggagagcttcccgtcgacgcacgatttcctcctcgcgttccaaagtcatttccctttaacacaagcgtggtgtacaagaagacgctcttcgtcgaattcaccgatcacctgttcaatatcgccaaacccagaccaccatggatgggtcttttggggcctaccatacaagcggaggtgtatgacacagttgttatcactctcaagaacatggcttctcatccggtaagtcttcacgcagtgggcgtgtcctactggaaagcttcagaaggagccgagtatgatgatcagacatcccagagggagaaagaagacgacaaggtatttccaggtgggtctcatacctatgtgtggcaagtgctcaaagagaatggccctatggcaagcgatccgccgtgtttgacttacagctacctttcacacgttgacctcgtcaaggacctcaactccgggttgattggagccttgttggtatgcagggaaggatctcttgccaaagagaagacacagaccctccacaagtttatccttctctttgctgtgttcgatgagggcaaaagttggcatagcgaaacgaagaattccctcatgcaggatcgcgacgcagccagcgccagagcttggcccaagatgcacactgtgaacggatatgtcaataggacgcttcctggcttgattgggtgtcatcggaaaagtgtctactggcacgtgatcggaatggggacaacaccagaggtccactccatatttctcgaaggccataccttccttgttcgaaaccacagacaggcatccttggggatctctcccattacctttctcactgcccaaacgctccttatggacttgggtcagttccttctcttttgccatatcccgtcacaccagcatgatggtatggaagcttatgtgaaagtcgacagttgtcctgaggagccacagttgcgcatgaagaataatgaagaagccgaggattacgacgacgatctcaccgattctgagatggacgtggtgaggtttgatgacgacaactctccctccatcattcaagctcggagcgtggcgaagaaacaccccaagacttgggtccactatatagcggcggaagaggaggattgggattacgctcctcttgtattggcaccagatgaccgctcatacaaaagccagtacctcaacaacggaccgcagagaattggccggaagtataagaaagtgcgatttatggcctatacagacgaaacctttaagacaagggaggccatccagcatgagagtgggattttgggacctcttctttacggcgaagttggtgataccctcctcatcatcttcaagaatcaagcttctcgcccctataacatttacccacacgggatcactgacgttaggcctttgtatagcagaagacttcccaaaggcgtgaagcatctcaaagacttccccattttgccaggcgagatctttaagtacaaatggaccgtcacagtggaagatggaccgactaaatcagaccctcgatgccttacgcggtactattcctccttcgtgaatatggagagagatttggcaagcggactcataggaccactcctcatctgttacaaggaatctgtagaccagaggggtaaccagattatgagtgataaacgcaatgtgatcctttttagcgtcttcgacgagaaccggtcctggtacttgaccgagaatatacaaaggttccttcccaaccccgcaggcgttcagttggaagaccctgagtttcaggccagcaatattatgcactcaatcaacggctatgtgtttgatagtctccagctttctgtttgcctccatgaagtagcctattggtacatcttgtcaattggtgctcaaacagacttcctctccgtcttcttctccggctacacctttaagcacaagatggtgtatgaggacactctcacactctttccattttctggagaaaccgtgttcatgagcatggagaatccaggcctttggatcttgggttgccacaacagtgattttcgcaatcggggaatgactgctctcctcaaagtcagcagctgtgataagaacacaggcgactattacgaagattcttacgaggacataagtgcctactttgactccaagaataacgccattgagcccagatcattctcccagaatcctcccgtgcttaaaaggcatcagcgcgaaatcaccagaactactcttcagtctgatcaagaggagattgactatgacgacaccataagcgtggaaatgaagaaggaggatttcgatatctatgacgaagatgagaaccagtctccgcggagctttcagaagaagacgcgacactacttcattgcagcagtcgaaaggctttgggactacggtatgtcatcatcccctcatgtgttgcgcaatagagctcagagtggaagtgttccacagttcaagaaagtcgtctttcaagagtttacagatggcagcttcacacagcctctctatcggggcgagcttaacgaacatttgggactccttggtccctatatccgagccgaagtggaggacaacattatggttacctttaggaatcaagcctctcgcccctacagcttctactcctccctcatcagttatgaggaggatcagagacaaggcgctgaaccacggaagaactttgtgaaaccgaatgagacgaagacctacttctggaaagtacagcaccacatggcccccacaaaagacgaattcgattgcaaagcatgggcgtatttttcagacgttgacttggagaaagatgtacattcaggacttattggtcctttgttggtgtgtcacactaacactctcaatccagcccatggcaggcaggtgacagtccaggaattcgctcttttctttaccatctttgatgagaccaagtcctggtacttcacggaaaacatggagcgcaattgcagagccccctgtaacatacagatggaggaccctacctttaaggaaaattatcggttccacgcaatcaacggatacattatggatacactccctggccttgtgatggctcaggaccaacgaatcaggtggtacctcctcagcatgggttctaatgagaacatacactccattcacttttcaggacatgtgttcactgtccggaagaaagaagagtataagatggccctctacaatttgtatccaggcgtgtttgagaccgttgaaatgcttccctctaaagctggcatctggagagtagagtgcttgatcggagaacatcttcacgcaggtatgagcaccttgttcctcgtgtacagcaacaaatgtcagaccccacttggcatggccagtggacacattcgcgactttcagatcacagcatctggccagtatggacaatgggccccaaagttggctcgcctccattactccggtagcataaatgcgtggtccactaaagaacctttcagctggattaaggtcgatcttcttgcccccatgatcatccacggcattaagacacagggagcgaggcagaaattctcctccctctacatctcacagttcattattatgtatagtttggacggcaagaagtggcaaacttatagaggtaacagtactggaacagacatggtgttcttcggcaacgttgatagctctggcatcaaacacaacatctttaatcctcccataatagctcggtacatcagattgcatccgacccactacagcattaggagtacactccgaatggagcttatgggttgcgacttgaattcctgttcaatgccactcggaatggagtctaaagccatctctgatgcacagataaccgccagtagctactttacgaacatgtttgctacgtggtcaccctctaaggcaaggcttcatttgcaaggccggtctaatgcctggagacctcaggtgaacaacccgaaagaatggctccaggtggactttcagaagaccatgaaagtaacaggtgtcactactcagggagttaagtccttggatactagcatgtatgtgaaggagttccttatttcctcatcacaagatggccaccagtggaccctcttctttcagaatggtaaggtcaaagtgtttcagggcaatcaagacagcttcacacccgtggtgaacagtcttgatcctccactcttgacacgataccttcgaatccatccacagtcttgggagcaccagattgcattgcgcatggaagtacttggatgcgaggctcaggacctctac

SEQ ID NO: 1058 - protein, 1457 aa, synthetic construct
  REGION 1..1457: note = Variant of human B-domain deleted Factor VIII
MQIELSTCFFLCLLRACFSATRRYYLGAVELSWDYMQSDLGELPVDARFPPRVPKSFPFNTSVVYKKTLFVEFTDHLFNIAKPRPPWMGLLGPTIQAEVYDTVVITLKNMASHPVSLHAVGVSYWKASEGAEYDDQTSQREKEDDKVFPGGSHTYVWQVLKENGPMASDPPCLTYSYLSHVDLVKDLNSGLIGALLVCREGSLAKEKTQTLHKFILLFAVFDEGKSWHSETKNSLMQDRDAASARAWPKMHTVNGYVNRTLPGLIGCHRKSVYWHVIGMGTTPEVHSIFLEGHTFLVRNHRQASLGISPITFLTAQTLLMDLGQFLLFCHIPSHQHDGMEAYVKVDSCPEEPQLRMKNNEEAEDYDDDLTDSEMDVVRFDDDNSPSIIQARSVAKKHPKTWVHYIAAEEEDWDYAPLVLAPDDRSYKSQYLNNGPQRIGRKYKKVRFMAYTDETFKTREAIQHESGILGPLLYGEVGDTLLIIFKNQASRPYNIYPHGITDVRPLYSRRLPKGVKHLKDFPILPGEIFKYKWTVTVEDGPTKSDPRCLTRYYSSFVNMERDLASGLIGPLLICYKESVDQRGNQIMSDKRNVILFSVFDENRSWYLTENIQRFLPNPAGVQLEDPEFQASNIMHSINGYVFDSLQLSVCLHEVAYWYILSIGAQTDFLSVFFSGYTFKHKMVYEDTLTLFPFSGETVFMSMENPGLWILGCHNSDFRNRGMTALLKVSSCDKNTGDYYEDSYEDISAYFDSKNNAIEPRSFSQNPPVLKRHQREITRTTLQSDQEEIDYDDTISVEMKKEDFDIYDEDENQSPRSFQKKTRHYFIAAVERLWDYGMSSSPHVLRNRAQSGSVPQFKKVVFQEFTDGSFTQPLYRGELNEHLGLLGPYIRAEVEDNIMVTFRNQASRPYSFYSSLISYEEDQRQGAEPRKNFVKPNETKTYFWKVQHHMAPTKDEFDCKAWAYFSDVDLEKDVHSGLIGPLLVCHTNTLNPAHGRQVTVQEFALFFTIFDETKSWYFTENMERNCRAPCNIQMEDPTFKENYRFHAINGYIMDTLPGLVMAQDQRIRWYLLSMGSNENIHSIHFSGHVFTVRKKEEYKMALYNLYPGVFETVEMLPSKAGIWRVECLIGEHLHAGMSTLFLVYSNKCQTPLGMASGHIRDFQITASGQYGQWAPKLARLHYSGSINAWSTKEPFSWIKVDLLAPMIIHGIKTQGARQKFSSLYISQFIIMYSLDGKKWQTYRGNSTGTDMVFFGNVDSSGIKHNIFNPPIIARYIRLHPTHYSIRSTLRMELMGCDLNSCSMPLGMESKAISDAQITASSYFTNMFATWSPSKARLHLQGRSNAWRPQVNNPKEWLQVDFQKTMKVTGVTTQGVKSLDTSMYVKEFLISSSQDGHQWTLFFQNGKVKVFQGNQDSFTPVVNSLDPPLLTRYLRIHPQSWEHQIALRMEVLGCEAQDLY

SEQ ID NO: 1059 - DNA, 4371 bp, synthetic construct
  misc_feature 1..4371: note = Variant of human B-domain deleted Factor VIII
  source 1..4371: mol_type = other DNA
atgcagattgaactgtctacctgcttcttcctctgtttgctgaggttctgctttagcgccactagacggtactaccttggcgctgtggagctgtcctgggactatatgcagagtgatttgggagagcttcccgtcgacgcacgatttcctcctcgcgttccaaagtcatttccctttaacacaagcgtggtgtacaagaagacgctcttcgtcgaattcaccgatcacctgttcaatatcgccaaacccagaccaccatggatgggtcttttggggcctaccatacaagcggaggtgtatgacacagttgttatcactctcaagaacatggcttctcatccggtaagtcttcacgcagtgggcgtgtcctactggaaagcttcagaaggagccgagtatgatgatcagacatcccagagggagaaagaagacgacaaggtatttccaggtgggtctcatacctatgtgtggcaagtgctcaaagagaatggccctatggcaagcgatccgccgtgtttgacttacagctacctttcacacgttgacctcgtcaaggacctcaactccgggttgattggagccttgttggtatgcagggaaggatctcttgccaaagagaagacacagaccctccacaagtttatccttctctttgctgtgttcgatgagggcaaaagttggcatagcgaaacgaagaattccctcatgcaggatcgcgacgcagccagcgccagagcttggcccaagatgcacactgtgaacggatatgtcaataggacgcttcctggcttgattgggtgtcatcggaaaagtgtctactggcacgtgatcggaatggggacaacaccagaggtccactccatatttctcgaaggccataccttccttgttcgaaaccacagacaggcatccttggggatctctcccattacctttctcactgcccaaacgctccttatggacttgggtcagttccttctcttttgccatatcccgtcacaccagcatgatggtatggaagcttatgtgaaagtcgacagttgtcctgaggagccacagttgcgcatgaagaataatgaagaagccgaggattacgacgacgatctcaccgattctgagatggacgtggtgaggtttgatgacgacaactctccctccatcattcaagctcggagcgtggcgaagaaacaccccaagacttgggtccactatatagcggcggaagaggaggattgggattacgctcctcttgtattggcaccagatgaccgctcatacaaaagccagtacctcaacaacggaccgcagagaattggccggaagtataagaaagtgcgatttatggcctatacagacgaaacctttaagacaagggaggccatccagcatgagagtgggattttgggacctcttctttacggcgaagttggtgataccctcctcatcatcttcaagaatcaagcttctcgcccctataacatttacccacacgggatcactgacgttaggcctttgtatagcagaagacttcccaaaggcgtgaagcatctcaaagacttccccattttgccaggcgagatctttaagtacaaatggaccgtcacagtggaagatggaccgactaaatcagaccctcgatgccttacgcggtactattcctccttcgtgaatatggagagagatttggcaagcggactcataggaccactcctcatctgttacaaggaatctgtagaccagaggggtaaccagattatgagtgataaacgcaatgtgatcctttttagcgtcttcgacgagaaccggtcctggtacttgaccgagaatatacaaaggttccttcccaaccccgcaggcgttcagttggaagaccctgagtttcaggccagcaatattatgcactcaatcaacggctatgtgtttgatagtctccagctttctgtttgcctccatgaagtagcctattggtacatcttgtcaattggtgctcaaacagacttcctctccgtcttcttctccggctacacctttaagcacaagatggtgtatgaggacactctcacactctttccattttctggagaaaccgtgttcatgagcatggagaatccaggcctttggatcttgggttgccacaacagtgattttcgcaatcggggaatgactgctctcctcaaagtcagcagctgtgataagaacacaggcgactattacgaagattcttacgaggacataagtgcctactttgactccaagaataacgccattgagcccagatcattctcccagaatcctcccgtgcttaaaaggcatcagcgcgaaatcaccagaactactcttcagtctgatcaagaggagattgactatgacgacaccataagcgtggaaatgaagaaggaggattccgatatctatgacgaagatgagaaccagtctccgcggagctttcagaagaagacgcgacactacttcattgcagcagtcgaaaggctttgggactacggtatgtcatcatcccctcatgtgttgcgcaatagagctcagagtggaagtgttccacagttcaagaaagtcgtctttcaagagtttacagatggcagcttcacacagcctctctatcggggcgagcttaacgaacatttgggactccttggtccctatatccgagccgaagtggaggacaacattatggttacctttaggaatcaagcctctcgcccctacagcttctactcctccttgatcagttatgaggaggatcagagacaaggcgctgaaccacggaagaactttgtgaaaccgaatgagacgaagacctacttctggaaagtacagcaccacatggcccccacaaaagacgaattcgattgcaaagcatgggcgtatttttcagacgttgacttggagaaagatgtacattcaggacttattggtcctttgttggtgtgtcacactaacactctcaatccagcccatggcaggcaggtgacagtccaggaattcgctcttttctttaccatctttgatgagaccaagtcctggtacttcacggaaaacatggagcgcaattgcagagccccctgtaacatacagatggaggaccctacctttaaggaaaattatcggttccacgcaatcaacggatacattatggatacactccctggccttgtgatggctcaggaccaacgaatcaggtggtacctcctcagcatgggttctaatgagaacatacactccattcacttttcaggacatgtgttcactgtccggaagaaagaagagtataagatggccctctacaatttgtatccaggcgtgtttgagaccgttgaaatgcttccctctaaagctggcatctggagagtagagtgcttgatcggagaacatcttcacgcaggtatgagcaccttgttcctcgtgtacagcaacaaatgtcagaccccacttggcatggccagtggacacattcgcgactttcagatcacagcatctggccagtatggacaatgggccccaaagttggctcgcctccattactccggtagcataaatgcgtggtccactaaagaacctttcagctggattaaggtcgatcttcttgcccccatgatcatccacggcattaagacacagggagcgaggcagaaattctcctccctctacatctcacagttcattattatgtatagtttggacggcaagaagtggcaaacttatagaggtaacagtactggaacagacatggtgttcttcggcaacgttgatagctctggcatcaaacacaacatctttaatcctcccataatagctcggtacatcagattgcatccgacccactacagcattaggagtacactccgaatggagcttatgggttgcgacttgaattcctgttcaatgccactcggaatggagtctaaagccatctctgatgcacagataaccgccagtagctactttacgaacatgtttgctacgtggtcaccctctaaggcaaggcttcatttgcaaggccggtctaatgcctggagacctcaggtgaacaacccgaaagaatggctccaggtggactttcagaagaccatgaaagtaacaggtgtcactactcagggagttaagtccttggatactagcatgtatgtgaaggagttccttatttcctcatcacaagatggccaccagtggaccctcttctttcagaatggtaaggtcaaagtgtttcagggcaatcaagacagcttcacacccgtggtgaacagtcttgatcctccactcttgacacgataccttcgaatccatccacagtcttgggagcaccagattgcattgcgcatggaagtacttggatgcgaggctcaggacctctac

SEQ ID NO: 1060 - protein, 1457 aa, synthetic construct
  REGION 1..1457: note = Variant of human B-domain deleted Factor VIII
MQIELSTCFFLCLLRFCFSATRRYYLGAVELSWDYMQSDLGELPVDARFPPRVPKSFPFNTSVVYKKTLFVEFTDHLFNIAKPRPPWMGLLGPTIQAEVYDTVVITLKNMASHPVSLHAVGVSYWKASEGAEYDDQTSQREKEDDKVFPGGSHTYVWQVLKENGPMASDPPCLTYSYLSHVDLVKDLNSGLIGALLVCREGSLAKEKTQTLHKFILLFAVFDEGKSWHSETKNSLMQDRDAASARAWPKMHTVNGYVNRTLPGLIGCHRKSVYWHVIGMGTTPEVHSIFLEGHTFLVRNHRQASLGISPITFLTAQTLLMDLGQFLLFCHIPSHQHDGMEAYVKVDSCPEEPQLRMKNNEEAEDYDDDLTDSEMDVVRFDDDNSPSIIQARSVAKKHPKTWVHYIAAEEEDWDYAPLVLAPDDRSYKSQYLNNGPQRIGRKYKKVRFMAYTDETFKTREAIQHESGILGPLLYGEVGDTLLIIFKNQASRPYNIYPHGITDVRPLYSRRLPKGVKHLKDFPILPGEIFKYKWTVTVEDGPTKSDPRCLTRYYSSFVNMERDLASGLIGPLLICYKESVDQRGNQIMSDKRNVILFSVFDENRSWYLTENIQRFLPNPAGVQLEDPEFQASNIMHSINGYVFDSLQLSVCLHEVAYWYILSIGAQTDFLSVFFSGYTFKHKMVYEDTLTLFPFSGETVFMSMENPGLWILGCHNSDFRNRGMTALLKVSSCDKNTGDYYEDSYEDISAYFDSKNNAIEPRSFSQNPPVLKRHQREITRTTLQSDQEEIDYDDTISVEMKKEDSDIYDEDENQSPRSFQKKTRHYFIAAVERLWDYGMSSSPHVLRNRAQSGSVPQFKKVVFQEFTDGSFTQPLYRGELNEHLGLLGPYIRAEVEDNIMVTFRNQASRPYSFYSSLISYEEDQRQGAEPRKNFVKPNETKTYFWKVQHHMAPTKDEFDCKAWAYFSDVDLEKDVHSGLIGPLLVCHTNTLNPAHGRQVTVQEFALFFTIFDETKSWYFTENMERNCRAPCNIQMEDPTFKENYRFHAINGYIMDTLPGLVMAQDQRIRWYLLSMGSNENIHSIHFSGHVFTVRKKEEYKMALYNLYPGVFETVEMLPSKAGIWRVECLIGEHLHAGMSTLFLVYSNKCQTPLGMASGHIRDFQITASGQYGQWAPKLARLHYSGSINAWSTKEPFSWIKVDLLAPMIIHGIKTQGARQKFSSLYISQFIIMYSLDGKKWQTYRGNSTGTDMVFFGNVDSSGIKHNIFNPPIIARYIRLHPTHYSIRSTLRMELMGCDLNSCSMPLGMESKAISDAQITASSYFTNMFATWSPSKARLHLQGRSNAWRPQVNNPKEWLQVDFQKTMKVTGVTTQGVKSLDTSMYVKEFLISSSQDGHQWTLFFQNGKVKVFQGNQDSFTPVVNSLDPPLLTRYLRIHPQSWEHQIALRMEVLGCEAQDLY

SEQ ID NO: 1061 - DNA, 4371 bp, synthetic construct
  misc_feature 1..4371: note = Variant of human B-domain deleted Factor VIII
  source 1..4371: mol_type = other DNA
atgcagattgaactgtctacctgcttcttcctctgtttgctgaggttctgctttagcgccactagacggtactaccttggcgctgtggagctgtcctgggactatatgcagagtgatttgggagagcttcccgtcgacgcacgatttcctcctcgcgttccaaagtcatttccctttaacacaagcgtggtgtacaagaagacgctcttcgtcgaattcaccgatcacctgttcaatatcgccaaacccagaccaccatggatgggtcttttggggcctaccatacaagcggaggtgtatgacacagttgttatcactctcaagaacatggcttctcatccggtaagtcttcacgcagtgggcgtgtcctactggaaagcttcagaaggagccgagtatgatgatcagacatcccagagggagaaagaagacgacaaggtatttccaggtgggtctcatacctatgtgtggcaagtgctcaaagagaatggccctatggcaagcgatccgccgtgtttgacttacagctacctttcacacgttgacctcgtcaaggacctcaactccgggttgattggagccttgttggtatgcagggaaggatctcttgccaaagagaagacacagaccctccacaagtttatccttctctttgctgtgttcgatgagggcaaaagttggcatagcgaaacgaagaattccctcatgcaggatcgcgacgcagccagcgccagagcttggcccaagatgcacactgtgaacggatatgtcaataggacgcttcctggcttgattgggtgtcatcggaaaagtgtctactggcacgtgatcggaatggggacaacaccagaggtccactccatatttctcgaaggccataccttccttgttcgaaaccacagacaggcatccttggggatctctcccattacctttctcactgcccaaacgctccttatggacttgggtcagttccttctcttttgccatatcccgtcacaccagcatgatggtatggaagcttatgtgaaagtcgacagttgtcctgaggagccacagttgcgcatgaagaataatgaagaagccgaggattacgacgacgatctcaccgattctgagatggacgtggtgaggtttgatgacgacaactctccctccatcattcaagctcggagcgtggcgaagaaacaccccaagacttgggtccactatatagcggcggaagaggaggattgggattacgctcctcttgtattggcaccagatgaccgctcatacaaaagccagtacctcaacaacggaccgcagagaattggccggaagtataagaaagtgcgatttatggcctatacagacgaaacctttaagacaagggaggccatccagcatgagagtgggattttgggacctcttctttacggcgaagttggtgataccctcctcatcatcttcaagaatcaagcttctcgcccctataacatttacccacacgggatcactgacgttaggcctttgtatagcagaagacttcccaaaggcgtgaagcatctcaaagacttccccattttgccaggcgagatctttaagtacaaatggaccgtcacagtggaagatggaccgactaaatcagaccctcgatgccttacgcggtactattcctccttcgtgaatatggagagagatttggcaagcggactcataggaccactcctcatctgttacaaggaatctgtagaccagaggggtaaccagattatgagtgataaacgcaatgtgatcctttttagcgtcttcgacgagaaccggtcctggtacttgaccgagaatatacaaaggttccttcccaaccccgcaggcgttcagttggaagaccctgagtttcaggccagcaatattatgcactcaatcaacggctatgtgtttgatagtctccagctttctgtttgcctccatgaagtagcctattggtacatcttgtcaattggtgctcaaacagacttcctctccgtcttcttctccggctacacctttaagcacaagatggtgtatgaggacactctcacactctttccattttctggagaaaccgtgttcatgagcatggagaatccaggcctttggatcttgggttgccacaacagtgattttcgcaatcggggaatgactgctctcctcaaagtcagcagctgtgataagaacacaggcgactattacgaagattcttacgaggacataagtgcctactttgactccaagaataacgccattgagcccagatcattctcccagaatcctcccgtgcttaaaaggcatcagcgcgaaatcaccagaactactcttcagtctgatcaagaggagattgactatgacgacaccataagcgtggaaatgaagaaggaggatttcgatatctatgacgaagatgagaaccagtctccgcggagctttcaggtgaagacgcgacactacttcattgcagcagtcgaaaggctttgggactacggtatgtcatcatcccctcatgtgttgcgcaatagagctcagagtggaagtgttccacagttcaagaaagtcgtctttcaagagtttacagatggcagcttcacacagcctctctatcggggcgagcttaacgaacatttgggactccttggtccctatatccgagccgaagtggaggacaacattatggttacctttaggaatcaagcctctcgcccctacagcttctactcctccctcatcagttatgaggaggatcagagacaaggcgctgaaccacggaagaactttgtgaaaccgaatgagacgaagacctacttctggaaagtacagcaccacatggcccccacaaaagacgaattcgattgcaaagcatgggcgtatttttcagacgttgacttggagaaagatgtacattcaggacttattggtcctttgttggtgtgtcacactaacactctcaatccagcccatggcaggcaggtgacagtccaggaattcgctcttttctttaccatctttgatgagaccaagtcctggtacttcacggaaaacatggagcgcaattgcagagccccctgtaacatacagatggaggaccctacctttaaggaaaattatcggttccacgcaatcaacggatacattatggatacactccctggccttgtgatggctcaggaccaacgaatcaggtggtacctcctcagcatgggttctaatgagaacatacactccattcacttttcaggacatgtgttcactgtccggaagaaagaagagtataagatggccctctacaatttgtatccaggcgtgtttgagaccgttgaaatgcttccctctaaagctggcatctggagagtagagtgcttgatcggagaacatcttcacgcaggtatgagcaccttgttcctcgtgtacagcaacaaatgtcagaccccacttggcatggccagtggacacattcgcgactttcagatcacagcatctggccagtatggacaatgggccccaaagttggctcgcctccattactccggtagcataaatgcgtggtccactaaagaacctttcagctggattaaggtcgatcttcttgcccccatgatcatccacggcattaagacacagggagcgaggcagaaattctcctccctctacatctcacagttcattattatgtatagtttggacggcaagaagtggcaaacttatagaggtaacagtactggaacagacatggtgttcttcggcaacgttgatagctctggcatcaaacacaacatctttaatcctcccataatagctcggtacatcagattgcatccgacccactacagcattaggagtacactccgaatggagcttatgggttgcgacttgaattcctgttcaatgccactcggaatggagtctaaagccatctctgatgcacagataaccgccagtagctactttacgaacatgtttgctacgtggtcaccctctaaggcaaggcttcatttgcaaggccggtctaatgcctggagacctcaggtgaacaacccgaaagaatggctccaggtggactttcagaagaccatgaaagtaacaggtgtcactactcagggagttaagtccttggatactagcatgtatgtgaaggagttccttatttcctcatcacaagatggccaccagtggaccctcttctttcagaatggtaaggtcaaagtgtttcagggcaatcaagacagcttcacacccgtggtgaacagtcttgatcctccactcttgacacgataccttcgaatccatccacagtcttgggagcaccagattgcattgcgcatggaagtacttggatgcgaggctcaggacctctac

SEQ ID NO: 1062 - protein, 1457 aa, synthetic construct
  REGION 1..1457: note = Variant of human B-domain deleted Factor VIII
MQIELSTCFFLCLLRFCFSATRRYYLGAVELSWDYMQSDLGELPVDARFPPRVPKSFPFNTSVVYKKTLFVEFTDHLFNIAKPRPPWMGLLGPTIQAEVYDTVVITLKNMASHPVSLHAVGVSYWKASEGAEYDDQTSQREKEDDKVFPGGSHTYVWQVLKENGPMASDPPCLTYSYLSHVDLVKDLNSGLIGALLVCREGSLAKEKTQTLHKFILLFAVFDEGKSWHSETKNSLMQDRDAASARAWPKMHTVNGYVNRTLPGLIGCHRKSVYWHVIGMGTTPEVHSIFLEGHTFLVRNHRQASLGISPITFLTAQTLLMDLGQFLLFCHIPSHQHDGMEAYVKVDSCPEEPQLRMKNNEEAEDYDDDLTDSEMDVVRFDDDNSPSIIQARSVAKKHPKTWVHYIAAEEEDWDYAPLVLAPDDRSYKSQYLNNGPQRIGRKYKKVRFMAYTDETFKTREAIQHESGILGPLLYGEVGDTLLIIFKNQASRPYNIYPHGITDVRPLYSRRLPKGVKHLKDFPILPGEIFKYKWTVTVEDGPTKSDPRCLTRYYSSFVNMERDLASGLIGPLLICYKESVDQRGNQIMSDKRNVILFSVFDENRSWYLTENIQRFLPNPAGVQLEDPEFQASNIMHSINGYVFDSLQLSVCLHEVAYWYILSIGAQTDFLSVFFSGYTFKHKMVYEDTLTLFPFSGETVFMSMENPGLWILGCHNSDFRNRGMTALLKVSSCDKNTGDYYEDSYEDISAYFDSKNNAIEPRSFSQNPPVLKRHQREITRTTLQSDQEEIDYDDTISVEMKKEDFDIYDEDENQSPRSFQVKTRHYFIAAVERLWDYGMSSSPHVLRNRAQSGSVPQFKKVVFQEFTDGSFTQPLYRGELNEHLGLLGPYIRAEVEDNIMVTFRNQASRPYSFYSSLISYEEDQRQGAEPRKNFVKPNETKTYFWKVQHHMAPTKDEFDCKAWAYFSDVDLEKDVHSGLIGPLLVCHTNTLNPAHGRQVTVQEFALFFTIFDETKSWYFTENMERNCRAPCNIQMEDPTFKENYRFHAINGYIMDTLPGLVMAQDQRIRWYLLSMGSNENIHSIHFSGHVFTVRKKEEYKMALYNLYPGVFETVEMLPSKAGIWRVECLIGEHLHAGMSTLFLVYSNKCQTPLGMASGHIRDFQITASGQYGQWAPKLARLHYSGSINAWSTKEPFSWIKVDLLAPMIIHGIKTQGARQKFSSLYISQFIIMYSLDGKKWQTYRGNSTGTDMVFFGNVDSSGIKHNIFNPPIIARYIRLHPTHYSIRSTLRMELMGCDLNSCSMPLGMESKAISDAQITASSYFTNMFATWSPSKARLHLQGRSNAWRPQVNNPKEWLQVDFQKTMKVTGVTTQGVKSLDTSMYVKEFLISSSQDGHQWTLFFQNGKVKVFQGNQDSFTPVVNSLDPPLLTRYLRIHPQSWEHQIALRMEVLGCEAQDLY

SEQ ID NO: 1063 - DNA, 4371 bp, synthetic construct
  misc_feature 1..4371: note = Variant of human B-domain deleted Factor VIII
  source 1..4371: mol_type = other DNA
atgcagattgaactgtctacctgcttcttcctctgtttgctgaggttctgctttagcgccactagacggtactaccttggcgctgtggagctgtcctgggactatatgcagagtgatttgggagagcttcccgtcgacgcacgatttcctcctcgcgttccaaagtcatttccctttaacacaagcgtggtgtacaagaagacgctcttcgtcgaattcaccgatcacctgttcaatatcgccaaacccagaccaccatggatgggtcttttggggcctaccatacaagcggaggtgtatgacacagttgttatcactctcaagaacatggcttctcatccggtaagtcttcacgcagtgggcgtgtcctactggaaagcttcagaaggagccgagtatgatgatcagacatcccagagggagaaagaagacgacaaggtatttccaggtgggtctcatacctatgtgtggcaagtgctcaaagagaatggccctatggcaagcgatccgccgtgtttgacttacagctacctttcacacgttgacctcgtcaaggacctcaactccgggttgattggagccttgttggtatgcagggaaggatctcttgccaaagagaagacacagaccaagcacaagtttatccttctctttgctgtgttcgatgagggcaaaagttggcatagcgaaacgaagaattccctcatgcaggatcgcgacgcagccagcgccagagcttggcccaagatgcacactgtgaacggatatgtcaataggacgcttcctggcttgattgggtgtcatcggaaaagtgtctactggcacgtgatcggaatggggacaacaccagaggtccactccatatttctcgaaggccataccttccttgttcgaaaccacagacaggcatccttggggatctctcccattacctttctcactgcccaaacgctccttatggacttgggtcagttccttctcttttgccatatcccgtcacaccagcatgatggtatggaagcttatgtgaaagtcgacagttgtcctgaggagccacagttgcgcatgaagaataatgaagaagccgaggattacgacgacgatctcaccgattctgagatggacgtggtgaggtttgatgacgacaactctccctccatcattcaagctcggagcgtggcgaagaaacaccccaagacttgggtccactatatagcggcggaagaggaggattgggattacgctcctcttgtattggcaccagatgaccgctcatacaaaagccagtacctcaacaacggaccgcagagaattggccggaagtataagaaagtgcgatttatggcctatacagacgaaacctttaagacaagggaggccatccagcatgagagtgggattttgggacctcttctttacggcgaagttggtgataccctcctcatcatcttcaagaatcaagcttctcgcccctataacatttacccacacgggatcactgacgttaggcctttgtatagcagaagacttcccaaaggcgtgaagcatctcaaagacttccccattttgccaggcgagatctttaagtacaaatggaccgtcacagtggaagatggaccgactaaatcagaccctcgatgccttacgcggtactattcctccttcgtgaatatggagagagatttggcaagcggactcataggaccactcctcatctgttacaaggaatctgtagaccagaggggtaaccagattatgagtgataaacgcaatgtgatcctttttagcgtcttcgacgagaaccggtcctggtacttgaccgagaatatacaaaggttccttcccaaccccgcaggcgttcagttggaagaccctgagtttcaggccagcaatattatgcactcaatcaacggctatgtgtttgatagtctccagctttctgtttgcctccatgaagtagcctattggtacatcttgtcaattggtgctcaaacagacttcctctccgtcttcttctccggctacacctttaagcacaagatggtgtatgaggacactctcacactctttccattttctggagaaaccgtgttcatgagcatggagaatccaggcctttggatcttgggttgccacaacagtgattttcgcaatcggggaatgactgctctcctcaaagtcagcagctgtgataagaacacaggcgactattacgaagattcttacgaggacataagtgcctactttgactccaagaataacgccattgagcccagatcattctcccagaatcctcccgtgcttaaaaggcatcagcgcgaaatcaccagaactactcttcagtctgatcaagaggagattgactatgacgacaccataagcgtggaaatgaagaaggaggatttcgatatctatgacgaagatgagaaccagtctccgcggagctttcagaagaagacgcgacactacttcattgcagcagtcgaaaggctttgggactacggtatgtcatcatcccctcatgtgttgcgcaatagagctcagagtggaagtgttccacagttcaagaaagtcgtctttcaagagtttacagatggcagcttcacacagcctctctatcggggcgagcttaacgaacatttgggactccttggtccctatatccgagccgaagtggaggacaacattatggttacctttaggaatcaagcctctcgcccctacagcttctactcctccctcatcagttatgaggaggatcagagacaaggcgctgaaccacggaagaactttgtgaaaccgaatgagacgaagacctacttctggaaagtacagcaccacatggcccccacaaaagacgaattcgattgcaaagcatgggcgtatttttcagacgttgacttggagaaagatgtacattcaggacttattggtcctttgttggtgtgtcacactaacactctcaatccagcccatggcaggcaggtgacagtccaggaattcgctcttttctttaccatctttgatgagaccaagtcctggtacttcacggaaaacatggagcgcaattgcagagccccctgtaacatacagatggaggaccctacctttaaggaaaattatcggttccacgcaatcaacggatacattatggatacactccctggccttgtgatggctcaggaccaacgaatcaggtggtacctcctcagcatgggttctaatgagaacatacactccattcacttttcaggacatgtgttcactgtccggaagaaagaagagtataagatggccctctacaatttgtatccaggcgtgtttgagaccgttgaaatgcttccctctaaagctggcatctggagagtagagtgcttgatcggagaacatcttcacgcaggtatgagcaccttgttcctcgtgtacagcaacaaatgtcagaccccacttggcatggccagtggacacattcgcgactttcagatcacagcatctggccagtatggacaatgggccccaaagttggctcgcctccattactccggtagcataaatgcgtggtccactaaagaacctttcagctggattaaggtcgatcttcttgcccccatgatcatccacggcattaagacacagggagcgaggcagaaattctcctccctctacatctcacagttcattattatgtatagtttggacggcaagaagtggcaaacttatagaggtaacagtactggaacagacatggtgttcttcggcaacgttgatagctctggcatcaaacacaacatctttaatcctcccataatagctcggtacatcagattgcatccgacccactacagcattaggagtacactccgaatggagcttatgggttgcgacttgaattcctgttcaatgccactcggaatggagtctaaagccatctctgatgcacagataaccgccagtagctactttacgaacatgtttgctacgtggtcaccctctaaggcaaggcttcatttgcaaggccggtctaatgcctggagacctcaggtgaacaacccgaaagaatggctccaggtggactttcagaagaccatgaaagtaacaggtgtcactactcagggagttaagtccttggatactagcatgtatgtgaaggagttccttatttcctcatcacaagatggccaccagtggaccctcttctttcagaatggtaaggtcaaagtgtttcagggcaatcaagacagcttcacacccgtggtgaacagtcttgatcctccactcttgacacgataccttcgaatccatccacagtcttgggagcaccagattgcattgcgcatggaagtacttggatgcgaggctcaggacctctac

SEQ ID NO: 1064 - protein, 1457 aa, synthetic construct
  REGION 1..1457: note = Variant of human B-domain deleted Factor VIII
MQIELSTCFFLCLLRFCFSATRRYYLGAVELSWDYMQSDLGELPVDARFPPRVPKSFPFNTSVVYKKTLFVEFTDHLFNIAKPRPPWMGLLGPTIQAEVYDTVVITLKNMASHPVSLHAVGVSYWKASEGAEYDDQTSQREKEDDKVFPGGSHTYVWQVLKENGPMASDPPCLTYSYLSHVDLVKDLNSGLIGALLVCREGSLAKEKTQTKHKFILLFAVFDEGKSWHSETKNSLMQDRDAASARAWPKMHTVNGYVNRTLPGLIGCHRKSVYWHVIGMGTTPEVHSIFLEGHTFLVRNHRQASLGISPITFLTAQTLLMDLGQFLLFCHIPSHQHDGMEAYVKVDSCPEEPQLRMKNNEEAEDYDDDLTDSEMDVVRFDDDNSPSIIQARSVAKKHPKTWVHYIAAEEEDWDYAPLVLAPDDRSYKSQYLNNGPQRIGRKYKKVRFMAYTDETFKTREAIQHESGILGPLLYGEVGDTLLIIFKNQASRPYNIYPHGITDVRPLYSRRLPKGVKHLKDFPILPGEIFKYKWTVTVEDGPTKSDPRCLTRYYSSFVNMERDLASGLIGPLLICYKESVDQRGNQIMSDKRNVILFSVFDENRSWYLTENIQRFLPNPAGVQLEDPEFQASNIMHSINGYVFDSLQLSVCLHEVAYWYILSIGAQTDFLSVFFSGYTFKHKMVYEDTLTLFPFSGETVFMSMENPGLWILGCHNSDFRNRGMTALLKVSSCDKNTGDYYEDSYEDISAYFDSKNNAIEPRSFSQNPPVLKRHQREITRTTLQSDQEEIDYDDTISVEMKKEDFDIYDEDENQSPRSFQKKTRHYFIAAVERLWDYGMSSSPHVLRNRAQSGSVPQFKKVVFQEFTDGSFTQPLYRGELNEHLGLLGPYIRAEVEDNIMVTFRNQASRPYSFYSSLISYEEDQRQGAEPRKNFVKPNETKTYFWKVQHHMAPTKDEFDCKAWAYFSDVDLEKDVHSGLIGPLLVCHTNTLNPAHGRQVTVQEFALFFTIFDETKSWYFTENMERNCRAPCNIQMEDPTFKENYRFHAINGYIMDTLPGLVMAQDQRIRWYLLSMGSNENIHSIHFSGHVFTVRKKEEYKMALYNLYPGVFETVEMLPSKAGIWRVECLIGEHLHAGMSTLFLVYSNKCQTPLGMASGHIRDFQITASGQYGQWAPKLARLHYSGSINAWSTKEPFSWIKVDLLAPMIIHGIKTQGARQKFSSLYISQFIIMYSLDGKKWQTYRGNSTGTDMVFFGNVDSSGIKHNIFNPPIIARYIRLHPTHYSIRSTLRMELMGCDLNSCSMPLGMESKAISDAQITASSYFTNMFATWSPSKARLHLQGRSNAWRPQVNNPKEWLQVDFQKTMKVTGVTTQGVKSLDTSMYVKEFLISSSQDGHQWTLFFQNGKVKVFQGNQDSFTPVVNSLDPPLLTRYLRIHPQSWEHQIALRMEVLGCEAQDLY

SEQ ID NO: 1065 - DNA, 4371 bp, synthetic construct
  misc_feature 1..4371: note = Variant of human B-domain deleted Factor VIII
  source 1..4371: mol_type = other DNA
atgcagattgaactgtctacctgcttcttcctctgtttgctgaggttctgctttagcgccactagacggtactaccttggcgctgtggagctgtcctgggactatatgcagagtgatttgggagagcttcccgtcgacgcacgatttcctcctcgcgttccaaagtcatttccctttaacacaagcgtggtgtacaagaagacgctcttcgtcgaattcaccgatcacctgttcaatatcgccaaacccagaccaccatggatgggtcttttggggcctaccatacaagcggaggtgtatgacacagttgttatcactctcaagaacatggcttctcatccggtaagtcttcacgcagtgggcgtgtcctactggaaagcttcagaaggagccgagtatgatgatcagacatcccagagggagaaagaagacgacaaggtatttccaggtgggtctcatacctatgtgtggcaagtgctcaaagagaatggccctatggcaagcgatccgccgtgtttgacttacagctacctttcacacgttgacctcgtcaaggacctcaactccgggttgattggagccttgttggtatgcagggaaggatctcttgccaaagagaagacacagaccctccacaagtttatccttctctttgctgtgttcgatgagggcaaaagttggcatagcgaaacgaagaattccctcatgcaggatcgcgacgcagccagcgccagagcttggcccaagatgcacactgtgaacggatatgtcaataggacgcttcctggcttgattgggtgtcatcggaaaagtgtctactggcacgtgatcggaatggggacaacaccagaggtccactccatatttctcgaaggccataccttccttgttcgaaaccacagacaggcatccttggggatctctcccattacctttctcactgcccaaacgctccttatggacttgggtcagttccttctcttttgccatatcccgtcacaccagcatgatggtatggaagcttatgtgaaagtcgacagttgtcctgaggagccacagttgcgcatgaagaataatgaagaagccgaggattacgacgacgatctcaccgattctgagatggacgtggtgaggtttgatgacgacaactctccctccatcattcaagctcggagcgtggcgaagaaacaccccaagacttgggtccactatatagcggcggaagaggaggattgggattacgctcctcttgtattggcaccagatgaccgctcatacaaaagccagtacctcaacaacggaccgcagagaattggccggaagtataagaaagtgcgatttatggcctatacagacgaaacctttaagacaagggaggccatccagcatgagagtgggattttgggacctcttctttacggcgaagttggtgataccctcctcatcatcttcaagaatcaagcttctcgcccctataacatttacccacacgggatcactgacgttaggcctttgtatagcagaagacttcccaaaggcgtgaagcatctcaaagacttccccattttgccaggcgagatctttaagtacaaatggaccgtcacagtggaagatggaccgactaaatcagaccctcgatgccttacgcggtactattcctccttcgtgaatatggagagagatttggcaagcggactcataggaccactcctcatctgttacaaggaatctgtagaccagaggggtaaccagattatgagtgataaacgcaatgtgatcctttttagcgtcttcgacgagaaccggtcctggtacttgaccgagaatatacaaaggttccttcccaaccccgcaggcgttcagttggaagaccctgagtttcaggccagcaatattatgcactcaatcaacggctatgtgtttgatagtctccagctttctgtttgcctccatgaagtagcctattggtacatcttgtcaattggtgctcaaacagacttcctctccgtcttcttctccggctacacctttaagcacaagatggtgtatgaggacactctcacactctttccattttctggagaaaccgtgttcatgagcatggagaatccaggcctttggatcttgggttgccacaacagtgattttcgcaatcggggaatgactgctctcctcaaagtcagcagctgtgataagaacacaggcgactattacgaagattcttacgaggacataagtgcctactttgactccaagaataacgccattgagcccagatcattctcccagaatcctcccgtgcttaaaaggcatcagcgcgaaatcaccagaactactcttcagtctgatcaagaggagattgactatgacgacaccataagcgtggaaatgaagaaggaggatttcgatatctatgacgaagatgagaaccagtctccgcggagctttcagaagaagacgcgacactacttcattgcagcagtcgaaaggctttgggactacggttggtcatcatcccctcatgtgttgcgcaatagagctcagagtggaagtgttccacagttcaagaaagtcgtctttcaagagtttacagatggcagcttcacacagcctctctatcggggcgagcttaacgaacatttgggactccttggtccctatatccgagccgaagtggaggacaacattatggttacctttaggaatcaagcctctcgcccctacagcttctactcctccctcatcagttatgaggaggatcagagacaaggcgctgaaccacggaagaactttgtgaaaccgaatgagacgaagacctacttctggaaagtacagcaccacatggcccccacaaaagacgaattcgattgcaaagcatgggcgtatttttcagacgttgacttggagaaagatgtacattcaggacttattggtcctttgttggtgtgtcacactaacactctcaatccagcccatggcaggcaggtgacagtccaggaattcgctcttttctttaccatctttgatgagaccaagtcctggtacttcacggaaaacatggagcgcaattgcagagccccctgtaacatacagatggaggaccctacctttaaggaaaattatcggttccacgcaatcaacggatacattatggatacactccctggccttgtgatggctcaggaccaacgaatcaggtggtacctcctcagcatgggttctaatgagaacatacactccattcacttttcaggacatgtgttcactgtccggaagaaagaagagtataagatggccctctacaatttgtatccaggcgtgtttgagaccgttgaaatgcttccctctaaagctggcatctggagagtagagtgcttgatcggagaacatcttcacgcaggtatgagcaccttgttcctcgtgtacagcaacaaatgtcagaccccacttggcatggccagtggacacattcgcgactttcagatcacagcatctggccagtatggacaatgggccccaaagttggctcgcctccattactccggtagcataaatgcgtggtccactaaagaacctttcagctggattaaggtcgatcttcttgcccccatgatcatccacggcattaagacacagggagcgaggcagaaattctcctccctctacatctcacagttcattattatgtatagtttggacggcaagaagtggcaaacttatagaggtaacagtactggaacagacatggtgttcttcggcaacgttgatagctctggcatcaaacacaacatctttaatcctcccataatagctcggtacatcagattgcatccgacccactacagcattaggagtacactccgaatggagcttatgggttgcgacttgaattcctgttcaatgccactcggaatggagtctaaagccatctctgatgcacagataaccgccagtagctactttacgaacatgtttgctacgtggtcaccctctaaggcaaggcttcatttgcaaggccggtctaatgcctggagacctcaggtgaacaacccgaaagaatggctccaggtggactttcagaagaccatgaaagtaacaggtgtcactactcagggagttaagtccttggatactagcatgtatgtgaaggagttccttatttcctcatcacaagatggccaccagtggaccctcttctttcagaatggtaaggtcaaagtgtttcagggcaatcaagacagcttcacacccgtggtgaacagtcttgatcctccactcttgacacgataccttcgaatccatccacagtcttgggagcaccagattgcattgcgcatggaagtacttggatgcgaggctcaggacctctac

SEQ ID NO: 1066 - protein, 1457 aa, synthetic construct
  REGION 1..1457: note = Variant of human B-domain deleted Factor VIII
MQIELSTCFFLCLLRFCFSATRRYYLGAVELSWDYMQSDLGELPVDARFPPRVPKSFPFNTSVVYKKTLFVEFTDHLFNIAKPRPPWMGLLGPTIQAEVYDTVVITLKNMASHPVSLHAVGVSYWKASEGAEYDDQTSQREKEDDKVFPGGSHTYVWQVLKENGPMASDPPCLTYSYLSHVDLVKDLNSGLIGALLVCREGSLAKEKTQTLHKFILLFAVFDEGKSWHSETKNSLMQDRDAASARAWPKMHTVNGYVNRTLPGLIGCHRKSVYWHVIGMGTTPEVHSIFLEGHTFLVRNHRQASLGISPITFLTAQTLLMDLGQFLLFCHIPSHQHDGMEAYVKVDSCPEEPQLRMKNNEEAEDYDDDLTDSEMDVVRFDDDNSPSIIQARSVAKKHPKTWVHYIAAEEEDWDYAPLVLAPDDRSYKSQYLNNGPQRIGRKYKKVRFMAYTDETFKTREAIQHESGILGPLLYGEVGDTLLIIFKNQASRPYNIYPHGITDVRPLYSRRLPKGVKHLKDFPILPGEIFKYKWTVTVEDGPTKSDPRCLTRYYSSFVNMERDLASGLIGPLLICYKESVDQRGNQIMSDKRNVILFSVFDENRSWYLTENIQRFLPNPAGVQLEDPEFQASNIMHSINGYVFDSLQLSVCLHEVAYWYILSIGAQTDFLSVFFSGYTFKHKMVYEDTLTLFPFSGETVFMSMENPGLWILGCHNSDFRNRGMTALLKVSSCDKNTGDYYEDSYEDISAYFDSKNNAIEPRSFSQNPPVLKRHQREITRTTLQSDQEEIDYDDTISVEMKKEDFDIYDEDENQSPRSFQKKTRHYFIAAVERLWDYGWSSSPHVLRNRAQSGSVPQFKKVVFQEFTDGSFTQPLYRGELNEHLGLLGPYIRAEVEDNIMVTFRNQASRPYSFYSSLISYEEDQRQGAEPRKNFVKPNETKTYFWKVQHHMAPTKDEFDCKAWAYFSDVDLEKDVHSGLIGPLLVCHTNTLNPAHGRQVTVQEFALFFTIFDETKSWYFTENMERNCRAPCNIQMEDPTFKENYRFHAINGYIMDTLPGLVMAQDQRIRWYLLSMGSNENIHSIHFSGHVFTVRKKEEYKMALYNLYPGVFETVEMLPSKAGIWRVECLIGEHLHAGMSTLFLVYSNKCQTPLGMASGHIRDFQITASGQYGQWAPKLARLHYSGSINAWSTKEPFSWIKVDLLAPMIIHGIKTQGARQKFSSLYISQFIIMYSLDGKKWQTYRGNSTGTDMVFFGNVDSSGIKHNIFNPPIIARYIRLHPTHYSIRSTLRMELMGCDLNSCSMPLGMESKAISDAQITASSYFTNMFATWSPSKARLHLQGRSNAWRPQVNNPKEWLQVDFQKTMKVTGVTTQGVKSLDTSMYVKEFLISSSQDGHQWTLFFQNGKVKVFQGNQDSFTPVVNSLDPPLLTRYLRIHPQSWEHQIALRMEVLGCEAQDLY

SEQ ID NO: 1067 - DNA, 4371 bp, synthetic construct
  misc_feature 1..4371: note = Variant of human B-domain deleted Factor VIII
  source 1..4371: mol_type = other DNA
atgcagattgaactgtctacctgcttcttcctctgtttgctgaggttctgctttagcgccactagacggtactaccttggcgctgtggagctgtcctgggactatatgcagagtgatttgggagagcttcccgtcgacgcacgatttcctcctcgcgttccaaagtcatttccctttaacacaagcgtggtgtacaagaagacgctcttcgtcgaattcaccgatcacctgttcaatatcgccaaacccagaccaccatggatgggtcttttggggcctaccatacaagcggaggtgtatgacacagttgttatcactctcaagaacatggcttctcatccggtaagtcttcacgcagtgggcgtgtcctactggaaagcttcagaaggagccgagtatgatgatcagacatcccagagggagaaagaagacgacaaggtatttccaggtgggtctcatacctatgtgtggcaagtgctcaaagagaatggccctatggcaagcgatccgccgtgtttgacttacagctacctttcacacgttgacctcgtcaaggacctcaactccgggttgattggagccttgttggtatgcagggaaggatctcttgccaaagagaagacacagaccctccacaagtttatccttctctttgctgtgttcgatgagggcaaaagttggcatagcgaaacgaagaattccctcatgcaggatcgcgacgcagccagcgccagagcttggcccaagatgcacactgtgaacggatatgtcaataggacgcttcctggcttgattgggtgtcatcggaaaagtgtctactggcacgtgatcggaatggggacaacaccagaggtccactccatatttctcgaaggccataccttccttgttcgaaaccacagacaggcatccttggggatctctcccattacctttctcactgcccaaacgctccttatggacttgggtcagttccttctcttttgccatatcccgtcacaccagcatgatggtatggaagcttatgtgaaagtcgacagttgtcctgaggagccacagttgcgcatgaagaataatgaagaagccgaggattacgacgacgatctcaccgattctgagatggacgtggtgaggtttgatgacgacaactctccctccatcattcaagctcggagcgtggcgaagaaacaccccaagacttgggtccactatatagcggcggaagaggaggattgggattacgctcctcttgtattggcaccagatgaccgctcatacaaaagccagtacctcaacaacggaccgcagagaattggccggaagtataagaaagtgcgatttatggcctatacagacgaaacctttaagacaagggaggccatccagcatgagagtgggattttgggacctcttctttacggcgaagttggtgataccctcctcatcatcttcaagaatcaagcttctcgcccctataacatttacccacacgggatcactgacgttaggcctttgtatagcagaagacttcccaaaggcgtgaagcatctcaaagacttccccattttgccaggcgagatctttaagtacaaatggaccgtcacagtggaagatggaccgactaaatcagaccctcgatgccttacgcggtactattcctccagggtgaatatggagagagatttggcaagcggactcataggaccactcctcatctgttacaaggaatctgtagaccagaggggtaaccagattatgagtgataaacgcaatgtgatcctttttagcgtcttcgacgagaaccggtcctggtacttgaccgagaatatacaaaggttccttcccaaccccgcaggcgttcagttggaagaccctgagtttcaggccagcaatattatgcactcaatcaacggctatgtgtttgatagtctccagctttctgtttgcctccatgaagtagcctattggtacatcttgtcaattggtgctcaaacagacttcctctccgtcttcttctccggctacacctttaagcacaagatggtgtatgaggacactctcacactctttccattttctggagaaaccgtgttcatgagcatggagaatccaggcctttggatcttgggttgccacaacagtgattttcgcaatcggggaatgactgctctcctcaaagtcagcagctgtgataagaacacaggcgactattacgaagattcttacgaggacataagtgcctactttgactccaagaataacgccattgagcccagatcattctcccagaatcctcccgtgcttaaaaggcatcagcgcgaaatcaccagaactactcttcagtctgatcaagaggagattgactatgacgacaccataagcgtggaaatgaagaaggaggatttcgatatctatgacgaagatgagaaccagtctccgcggagctttcagaagaagacgcgacactacttcattgcagcagtcgaaaggctttgggactacggtatgtcatcatcccctcatgtgttgcgcaatagagctcagagtggaagtgttccacagttcaagaaagtcgtctttcaagagtttacagatggcagcttcacacagcctctctatcggggcgagcttaacgaacatttgggactccttggtccctatatccgagccgaagtggaggacaacattatggttacctttaggaatcaagcctctcgcccctacagcttctactcctccctcatcagttatgaggaggatcagagacaaggcgctgaaccacggaagaactttgtgaaaccgaatgagacgaagacctacttctggaaagtacagcaccacatggcccccacaaaagacgaattcgattgcaaagcatgggcgtatttttcagacgttgacttggagaaagatgtacattcaggacttattggtcctttgttggtgtgtcacactaacactctcaatccagcccatggcaggcaggtgacagtccaggaattcgctcttttctttaccatctttgatgagaccaagtcctggtacttcacggaaaacatggagcgcaattgcagagccccctgtaacatacagatggaggaccctacctttaaggaaaattatcggttccacgcaatcaacggatacattatggatacactccctggccttgtgatggctcaggaccaacgaatcaggtggtacctcctcagcatgggttctaatgagaacatacactccattcacttttcaggacatgtgttcactgtccggaagaaagaagagtataagatggccctctacaatttgtatccaggcgtgtttgagaccgttgaaatgcttccctctaaagctggcatctggagagtagagtgcttgatcggagaacatcttcacgcaggtatgagcaccttgttcctcgtgtacagcaacaaatgtcagaccccacttggcatggccagtggacacattcgcgactttcagatcacagcatctggccagtatggacaatgggccccaaagttggctcgcctccattactccggtagcataaatgcgtggtccactaaagaacctttcagctggattaaggtcgatcttcttgcccccatgatcatccacggcattaagacacagggagcgaggcagaaattctcctccctctacatctcacagttcattattatgtatagtttggacggcaagaagtggcaaacttatagaggtaacagtactggaacagacatggtgttcttcggcaacgttgatagctctggcatcaaacacaacatctttaatcctcccataatagctcggtacatcagattgcatccgacccactacagcattaggagtacactccgaatggagcttatgggttgcgacttgaattcctgttcaatgccactcggaatggagtctaaagccatctctgatgcacagataaccgccagtagctactttacgaacatgtttgctacgtggtcaccctctaaggcaaggcttcatttgcaaggccggtctaatgcctggagacctcaggtgaacaacccgaaagaatggctccaggtggactttcagaagaccatgaaagtaacaggtgtcactactcagggagttaagtccttggatactagcatgtatgtgaaggagttccttatttcctcatcacaagatggccaccagtggaccctcttctttcagaatggtaaggtcaaagtgtttcagggcaatcaagacagcttcacacccgtggtgaacagtcttgatcctccactcttgacacgataccttcgaatccatccacagtcttgggagcaccagattgcattgcgcatggaagtacttggatgcgaggctcaggacctctac

SEQ ID NO: 1068 - protein, 1457 aa, synthetic construct
  REGION 1..1457: note = Variant of human B-domain deleted Factor VIII
MQIELSTCFFLCLLRFCFSATRRYYLGAVELSWDYMQSDLGELPVDARFPPRVPKSFPFNTSVVYKKTLFVEFTDHLFNIAKPRPPWMGLLGPTIQAEVYDTVVITLKNMASHPVSLHAVGVSYWKASEGAEYDDQTSQREKEDDKVFPGGSHTYVWQVLKENGPMASDPPCLTYSYLSHVDLVKDLNSGLIGALLVCREGSLAKEKTQTLHKFILLFAVFDEGKSWHSETKNSLMQDRDAASARAWPKMHTVNGYVNRTLPGLIGCHRKSVYWHVIGMGTTPEVHSIFLEGHTFLVRNHRQASLGISPITFLTAQTLLMDLGQFLLFCHIPSHQHDGMEAYVKVDSCPEEPQLRMKNNEEAEDYDDDLTDSEMDVVRFDDDNSPSIIQARSVAKKHPKTWVHYIAAEEEDWDYAPLVLAPDDRSYKSQYLNNGPQRIGRKYKKVRFMAYTDETFKTREAIQHESGILGPLLYGEVGDTLLIIFKNQASRPYNIYPHGITDVRPLYSRRLPKGVKHLKDFPILPGEIFKYKWTVTVEDGPTKSDPRCLTRYYSSRVNMERDLASGLIGPLLICYKESVDQRGNQIMSDKRNVILFSVFDENRSWYLTENIQRFLPNPAGVQLEDPEFQASNIMHSINGYVFDSLQLSVCLHEVAYWYILSIGAQTDFLSVFFSGYTFKHKMVYEDTLTLFPFSGETVFMSMENPGLWILGCHNSDFRNRGMTALLKVSSCDKNTGDYYEDSYEDISAYFDSKNNAIEPRSFSQNPPVLKRHQREITRTTLQSDQEEIDYDDTISVEMKKEDFDIYDEDENQSPRSFQKKTRHYFIAAVERLWDYGMSSSPHVLRNRAQSGSVPQFKKVVFQEFTDGSFTQPLYRGELNEHLGLLGPYIRAEVEDNIMVTFRNQASRPYSFYSSLISYEEDQRQGAEPRKNFVKPNETKTYFWKVQHHMAPTKDEFDCKAWAYFSDVDLEKDVHSGLIGPLLVCHTNTLNPAHGRQVTVQEFALFFTIFDETKSWYFTENMERNCRAPCNIQMEDPTFKENYRFHAINGYIMDTLPGLVMAQDQRIRWYLLSMGSNENIHSIHFSGHVFTVRKKEEYKMALYNLYPGVFETVEMLPSKAGIWRVECLIGEHLHAGMSTLFLVYSNKCQTPLGMASGHIRDFQITASGQYGQWAPKLARLHYSGSINAWSTKEPFSWIKVDLLAPMIIHGIKTQGARQKFSSLYISQFIIMYSLDGKKWQTYRGNSTGTDMVFFGNVDSSGIKHNIFNPPIIARYIRLHPTHYSIRSTLRMELMGCDLNSCSMPLGMESKAISDAQITASSYFTNMFATWSPSKARLHLQGRSNAWRPQVNNPKEWLQVDFQKTMKVTGVTTQGVKSLDTSMYVKEFLISSSQDGHQWTLFFQNGKVKVFQGNQDSFTPVVNSLDPPLLTRYLRIHPQSWEHQIALRMEVLGCEAQDLY

SEQ ID NO: 1069 - DNA, 4371 bp, synthetic construct
  misc_feature 1..4371: note = Variant of human B-domain deleted Factor VIII
  source 1..4371: mol_type = other DNA
atgcagattgaactgtctacctgcttcttcctctgtttgctgaggttctgctttagcgccactagacggtactaccttggcgctgtggagctgtcctgggactatatgcagagtgatttgggagagcttcccgtcgacgcacgatttcctcctcgcgttccaaagtcatttccctttaacacaagcgtggtgtacaagaagacgctcttcgtcgaattcaccgatcacctgttcaatatcgccaaacccagaccaccatggatgggtcttttggggcctaccatacaagcggaggtgtatgacacagttgttatcactctcaagaacatggcttctcatccggtaagtcttcacgcagtgggcgtgtcctactggaaagcttcagaaggagccgagtatgatgatcagacatcccagagggagaaagaagacgacaaggtatttccaggtgggtctcatacctatgtgtggcaagtgctcaaagagaatggccctatggcaagcgatccgccgtgtttgacttacagctacctttcacacgttgacctcgtcaaggacctcaactccgggttgattggagccttgttggtatgcagggaaggatctcttgccaaagagaagacacagaccctccacaagtttatccttctctttgctgtgttcgatgagggcaaaagttggcatagcgaaacgaagaattccctcatgcaggatcgcgacgcagccagcgccagagcttggcccaagatgcacactgtgaacggatatgtcaataggacgcttcctggcttgattgggtgtcatcggaaaagtgtctactggcacgtgatcggaatggggacaacaccagaggtccactccatatttctcgaaggccataccttccttgttcgaaaccacagacaggcatccttggggatctctcccattacctttctcactgcccaaacgctccttatggacttgggtcagttccttctcttttgccatatcccgtcacaccagcatgatggtatggaagcttatgtgaaagtcgacagttgtcctgaggagccacagttgcgcatgaagaataatgaagaagccgaggattacgacgacgatctcaccgattctgagatggacgtggtgaggtttgatgacgacaactctccctccatcattcaagctcggagcgtggcgaagaaacaccccaagacttgggtccactatatagcggcggaagaggaggattgggattacgctcctcttgtattggcaccagatgaccgctcatacaaaagccagtacctcaacaacggaccgcagagaattggccggaagtataagaaagtgcgatttatggcctatacagacgaaacctttaagacaagggaggccatccagcatgagagtgggattttgggacctcttctttacggcgaagttggtgataccctcctcatcatcttcaagaatcaagcttctcgcccctataacatttacccacacgggatcactgacgttaggcctttgtatagcagaagacttcccaaaggcgtgaagcatctcaaagacttccccattttgccaggcgagatctttaagtacaaatggaccgtcacagcggaagatggaccgactaaatcagaccctcgatgccttacgcggtactattcctccttcgtgaatatggagagagatttggcaagcggactcataggaccactcctcatctgttacaaggaatctgtagaccagaggggtaaccagattatgagtgataaacgcaatgtgatcctttttagcgtcttcgacgagaaccggtcctggtacttgaccgagaatatacaaaggttccttcccaaccccgcaggcgttcagttggaagaccctgagtttcaggccagcaatattatgcactcaatcaacggctatgtgtttgatagtctccagctttctgtttgcctccatgaagtagcctattggtacatcttgtcaattggtgctcaaacagacttcctctccgtcttcttctccggctacacctttaagcacaagatggtgtatgaggacactctcacactctttccattttctggagaaaccgtgttcatgagcatggagaatccaggcctttggatcttgggttgccacaacagtgattttcgcaatcggggaatgactgctctcctcaaagtcagcagctgtgataagaacacaggcgactattacgaagattcttacgaggacataagtgcctactttgactccaagaataacgccattgagcccagatcattctcccagaatcctcccgtgcttaaaaggcatcagcgcgaaatcaccagaactactcttcagtctgatcaagaggagattgactatgacgacaccataagcgtggaaatgaagaaggaggatttcgatatctatgacgaagatgagaaccagtctccgcggagctttcagaagaagacgcgacactacttcattgcagcagtcgaaaggctttgggactacggtatgtcatcatcccctcatgtgttgcgcaatagagctcagagtggaagtgttccacagttcaagaaagtcgtctttcaagagtttacagatggcagcttcacacagcctctctatcggggcgagcttaacgaacatttgggactccttggtccctatatccgagccgaagtggaggacaacattatggttacctttaggaatcaagcctctcgcccctacagcttctactcctccctcatcagttatgaggaggatcagagacaaggcgctgaaccacggaagaactttgtgaaaccgaatgagacgaagacctacttctggaaagtacagcaccacatggcccccacaaaagacgaattcgattgcaaagcatgggcgtatttttcagacgttgacttggagaaagatgtacattcaggacttattggtcctttgttggtgtgtcacactaacactctcaatccagcccatggcaggcaggtgacagtccaggaattcgctcttttctttaccatctttgatgagaccaagtcctggtacttcacggaaaacatggagcgcaattgcagagccccctgtaacatacagatggaggaccctacctttaaggaaaattatcggttccacgcaatcaacggatacattatggatacactccctggccttgtgatggctcaggaccaacgaatcaggtggtacctcctcagcatgggttctaatgagaacatacactccattcacttttcaggacatgtgttcactgtccggaagaaagaagagtataagatggccctctacaatttgtatccaggcgtgtttgagaccgttgaaatgcttccctctaaagctggcatctggagagtagagtgcttgatcggagaacatcttcacgcaggtatgagcaccttgttcctcgtgtacagcaacaaatgtcagaccccacttggcatggccagtggacacattcgcgactttcagatcacagcatctggccagtatggacaatgggccccaaagttggctcgcctccattactccggtagcataaatgcgtggtccactaaagaacctttcagctggattaaggtcgatcttcttgcccccatgatcatccacggcattaagacacagggagcgaggcagaaattctcctccctctacatctcacagttcattattatgtatagtttggacggcaagaagtggcaaacttatagaggtaacagtactggaacagacatggtgttcttcggcaacgttgatagctctggcatcaaacacaacatctttaatcctcccataatagctcggtacatcagattgcatccgacccactacagcattaggagtacactccgaatggagcttatgggttgcgacttgaattcctgttcaatgccactcggaatggagtctaaagccatctctgatgcacagataaccgccagtagctactttacgaacatgtttgctacgtggtcaccctctaaggcaaggcttcatttgcaaggccggtctaatgcctggagacctcaggtgaacaacccgaaagaatggctccaggtggactttcagaagaccatgaaagtaacaggtgtcactactcagggagttaagtccttggatactagcatgtatgtgaaggagttccttatttcctcatcacaagatggccaccagtggaccctcttctttcagaatggtaaggtcaaagtgtttcagggcaatcaagacagcttcacacccgtggtgaacagtcttgatcctccactcttgacacgataccttcgaatccatccacagtcttgggagcaccagattgcattgcgcatggaagtacttggatgcgaggctcaggacctctac

SEQ ID NO: 1070 - protein, 1457 aa, synthetic construct
  REGION 1..1457: note = Variant of human B-domain deleted Factor VIII
MQIELSTCFFLCLLRFCFSATRRYYLGAVELSWDYMQSDLGELPVDARFPPRVPKSFPFNTSVVYKKTLFVEFTDHLFNIAKPRPPWMGLLGPTIQAEVYDTVVITLKNMASHPVSLHAVGVSYWKASEGAEYDDQTSQREKEDDKVFPGGSHTYVWQVLKENGPMASDPPCLTYSYLSHVDLVKDLNSGLIGALLVCREGSLAKEKTQTLHKFILLFAVFDEGKSWHSETKNSLMQDRDAASARAWPKMHTVNGYVNRTLPGLIGCHRKSVYWHVIGMGTTPEVHSIFLEGHTFLVRNHRQASLGISPITFLTAQTLLMDLGQFLLFCHIPSHQHDGMEAYVKVDSCPEEPQLRMKNNEEAEDYDDDLTDSEMDVVRFDDDNSPSIIQARSVAKKHPKTWVHYIAAEEEDWDYAPLVLAPDDRSYKSQYLNNGPQRIGRKYKKVRFMAYTDETFKTREAIQHESGILGPLLYGEVGDTLLIIFKNQASRPYNIYPHGITDVRPLYSRRLPKGVKHLKDFPILPGEIFKYKWTVTAEDGPTKSDPRCLTRYYSSFVNMERDLASGLIGPLLICYKESVDQRGNQIMSDKRNVILFSVFDENRSWYLTENIQRFLPNPAGVQLEDPEFQASNIMHSINGYVFDSLQLSVCLHEVAYWYILSIGAQTDFLSVFFSGYTFKHKMVYEDTLTLFPFSGETVFMSMENPGLWILGCHNSDFRNRGMTALLKVSSCDKNTGDYYEDSYEDISAYFDSKNNAIEPRSFSQNPPVLKRHQREITRTTLQSDQEEIDYDDTISVEMKKEDFDIYDEDENQSPRSFQKKTRHYFIAAVERLWDYGMSSSPHVLRNRAQSGSVPQFKKVVFQEFTDGSFTQPLYRGELNEHLGLLGPYIRAEVEDNIMVTFRNQASRPYSFYSSLISYEEDQRQGAEPRKNFVKPNETKTYFWKVQHHMAPTKDEFDCKAWAYFSDVDLEKDVHSGLIGPLLVCHTNTLNPAHGRQVTVQEFALFFTIFDETKSWYFTENMERNCRAPCNIQMEDPTFKENYRFHAINGYIMDTLPGLVMAQDQRIRWYLLSMGSNENIHSIHFSGHVFTVRKKEEYKMALYNLYPGVFETVEMLPSKAGIWRVECLIGEHLHAGMSTLFLVYSNKCQTPLGMASGHIRDFQITASGQYGQWAPKLARLHYSGSINAWSTKEPFSWIKVDLLAPMIIHGIKTQGARQKFSSLYISQFIIMYSLDGKKWQTYRGNSTGTDMVFFGNVDSSGIKHNIFNPPIIARYIRLHPTHYSIRSTLRMELMGCDLNSCSMPLGMESKAISDAQITASSYFTNMFATWSPSKARLHLQGRSNAWRPQVNNPKEWLQVDFQKTMKVTGVTTQGVKSLDTSMYVKEFLISSSQDGHQWTLFFQNGKVKVFQGNQDSFTPVVNSLDPPLLTRYLRIHPQSWEHQIALRMEVLGCEAQDLY

SEQ ID NO: 1071 - DNA, 4371 bp, synthetic construct
  misc_feature 1..4371: note = Variant of human B-domain deleted Factor VIII
  source 1..4371: mol_type = other DNA
atgcagattgaactgtctacctgcttcttcctctgtttgctgaggttctgctttagcgccactagacggtactaccttggcgctgtggagctgtcctgggactatatgcagagtgatttgggagagcttcccgtcgacgcacgatttcctcctcgcgttccaaagtcatttccctttaacacaagcgtggtgtacaagaagacgctcttcgtcgaattcaccgatcacctgttcaatatcgccaaacccagaccaccatggatgggtcttttggggcctaccatacaagcggaggtgtatgacacagttgttatcactctcaagaacatggcttctcatccggtaagtcttcacgcagtgggcgtgtcctactggaaagcttcagaaggagccgagtatgatgatcagacatcccagagggagaaagaagacgacaaggtatttccaggtgggtctcatacctatgtgtggcaagtgctcaaagagaatggccctatggcaagcgatccgccgtgtttgacttacagctacctttcacacgttgacctcgtcaaggacctcaactccgggttgattggagccttgttggtatgcagggaaggatctcttgccaaagagaagacacagaccctccacaagtttatccttctctttgctgtgttcgatgagggcaaaagttggcatagcgaaacgaagaattccctcatgcaggatcgcgacgcagccagcgccagagcttggcccaagatgcacactgtgaacggatatgtcaataggacgcttcctggcttgattgggtgtcatcggaaaagtgtctactggcacgtgatcggaatggggacaacaccagaggtccactccatatttctcgaaggccataccttccttgttcgaaaccacagacaggcatccttggggatctctcccattacctttctcactgcccaaacgctccttatggacttgggtcagttccttctcttttgccatatcccgtcacaccagcatgatggtatggaagcttatgtgaaagtcgacagttgtcctgaggagccacagttgcgcatgaagaataatgaagaagccgaggattacgacgacgatctcaccgattctgagatggacgtggtgaggtttgatgacgacaactctccctccatcattcaagctcggagcgtggcgaagaaacaccccaagacttgggtccactatatagcggcggaagaggaggattgggattacgctcctcttgtattggcaccagatgaccgctcatacaaaagccagtacctcaacaacggaccgcagagaattggccggaagtataagaaagtgcgatttatggcctatacagacgaaacctttaagacaagggaggccatccagcatgagagtgggattttgggacctcttctttacggcgaagttggtgataccctcctcatcatcttcaagaatcaagcttctcgcccctataacatttacccacacgggatcactgacgttaggcctttgtatagcagaagacttcccaaaggcgtgaagcatctcaaagacttccccattttgccaggcgaggcgtttaagtacaaatggaccgtcacagtggaagatggaccgactaaatcagaccctcgatgccttacgcggtactattcctccttcgtgaatatggagagagatttggcaagcggactcataggaccactcctcatctgttacaaggaatctgtagaccagaggggtaaccagattatgagtgataaacgcaatgtgatcctttttagcgtcttcgacgagaaccggtcctggtacttgaccgagaatatacaaaggttccttcccaaccccgcaggcgttcagttggaagaccctgagtttcaggccagcaatattatgcactcaatcaacggctatgtgtttgatagtctccagctttctgtttgcctccatgaagtagcctattggtacatcttgtcaattggtgctcaaacagacttcctctccgtcttcttctccggctacacctttaagcacaagatggtgtatgaggacactctcacactctttccattttctggagaaaccgtgttcatgagcatggagaatccaggcctttggatcttgggttgccacaacagtgattttcgcaatcggggaatgactgctctcctcaaagtcagcagctgtgataagaacacaggcgactattacgaagattcttacgaggacataagtgcctactttgactccaagaataacgccattgagcccagatcattctcccagaatcctcccgtgcttaaaaggcatcagcgcgaaatcaccagaactactcttcagtctgatcaagaggagattgactatgacgacaccataagcgtggaaatgaagaaggaggatttcgatatctatgacgaagatgagaaccagtctccgcggagctttcagaagaagacgcgacactacttcattgcagcagtcgaaaggctttgggactacggtatgtcatcatcccctcatgtgttgcgcaatagagctcagagtggaagtgttccacagttcaagaaagtcgtctttcaagagtttacagatggcagcttcacacagcctctctatcggggcgagcttaacgaacatttgggactccttggtccctatatccgagccgaagtggaggacaacattatggttacctttaggaatcaagcctctcgcccctacagcttctactcctccctcatcagttatgaggaggatcagagacaaggcgctgaaccacggaagaactttgtgaaaccgaatgagacgaagacctacttctggaaagtacagcaccacatggcccccacaaaagacgaattcgattgcaaagcatgggcgtatttttcagacgttgacttggagaaagatgtacattcaggacttattggtcctttgttggtgtgtcacactaacactctcaatccagcccatggcaggcaggtgacagtccaggaattcgctcttttctttaccatctttgatgagaccaagtcctggtacttcacggaaaacatggagcgcaattgcagagccccctgtaacatacagatggaggaccctacctttaaggaaaattatcggttccacgcaatcaacggatacattatggatacactccctggccttgtgatggctcaggaccaacgaatcaggtggtacctcctcagcatgggttctaatgagaacatacactccattcacttttcaggacatgtgttcactgtccggaagaaagaagagtataagatggccctctacaatttgtatccaggcgtgtttgagaccgttgaaatgcttccctctaaagctggcatctggagagtagagtgcttgatcggagaacatcttcacgcaggtatgagcaccttgttcctcgtgtacagcaacaaatgtcagaccccacttggcatggccagtggacacattcgcgactttcagatcacagcatctggccagtatggacaatgggccccaaagttggctcgcctccattactccggtagcataaatgcgtggtccactaaagaacctttcagctggattaaggtcgatcttcttgcccccatgatcatccacggcattaagacacagggagcgaggcagaaattctcctccctctacatctcacagttcattattatgtatagtttggacggcaagaagtggcaaacttatagaggtaacagtactggaacagacatggtgttcttcggcaacgttgatagctctggcatcaaacacaacatctttaatcctcccataatagctcggtacatcagattgcatccgacccactacagcattaggagtacactccgaatggagcttatgggttgcgacttgaattcctgttcaatgccactcggaatggagtctaaagccatctctgatgcacagataaccgccagtagctactttacgaacatgtttgctacgtggtcaccctctaaggcaaggcttcatttgcaaggccggtctaatgcctggagacctcaggtgaacaacccgaaagaatggctccaggtggactttcagaagaccatgaaagtaacaggtgtcactactcagggagttaagtccttggatactagcatgtatgtgaaggagttccttatttcctcatcacaagatggccaccagtggaccctcttctttcagaatggtaaggtcaaagtgtttcagggcaatcaagacagcttcacacccgtggtgaacagtcttgatcctccactcttgacacgataccttcgaatccatccacagtcttgggagcaccagattgcattgcgcatggaagtacttggatgcgaggctcaggacctctac

SEQ ID NO: 1072 - protein, 1457 aa, synthetic construct
  REGION 1..1457: note = Variant of human B-domain deleted Factor VIII
MQIELSTCFFLCLLRFCFSATRRYYLGAVELSWDYMQSDLGELPVDARFPPRVPKSFPFNTSVVYKKTLFVEFTDHLFNIAKPRPPWMGLLGPTIQAEVYDTVVITLKNMASHPVSLHAVGVSYWKASEGAEYDDQTSQREKEDDKVFPGGSHTYVWQVLKENGPMASDPPCLTYSYLSHVDLVKDLNSGLIGALLVCREGSLAKEKTQTLHKFILLFAVFDEGKSWHSETKNSLMQDRDAASARAWPKMHTVNGYVNRTLPGLIGCHRKSVYWHVIGMGTTPEVHSIFLEGHTFLVRNHRQASLGISPITFLTAQTLLMDLGQFLLFCHIPSHQHDGMEAYVKVDSCPEEPQLRMKNNEEAEDYDDDLTDSEMDVVRFDDDNSPSIIQARSVAKKHPKTWVHYIAAEEEDWDYAPLVLAPDDRSYKSQYLNNGPQRIGRKYKKVRFMAYTDETFKTREAIQHESGILGPLLYGEVGDTLLIIFKNQASRPYNIYPHGITDVRPLYSRRLPKGVKHLKDFPILPGEAFKYKWTVTVEDGPTKSDPRCLTRYYSSFVNMERDLASGLIGPLLICYKESVDQRGNQIMSDKRNVILFSVFDENRSWYLTENIQRFLPNPAGVQLEDPEFQASNIMHSINGYVFDSLQLSVCLHEVAYWYILSIGAQTDFLSVFFSGYTFKHKMVYEDTLTLFPFSGETVFMSMENPGLWILGCHNSDFRNRGMTALLKVSSCDKNTGDYYEDSYEDISAYFDSKNNAIEPRSFSQNPPVLKRHQREITRTTLQSDQEEIDYDDTISVEMKKEDFDIYDEDENQSPRSFQKKTRHYFIAAVERLWDYGMSSSPHVLRNRAQSGSVPQFKKVVFQEFTDGSFTQPLYRGELNEHLGLLGPYIRAEVEDNIMVTFRNQASRPYSFYSSLISYEEDQRQGAEPRKNFVKPNETKTYFWKVQHHMAPTKDEFDCKAWAYFSDVDLEKDVHSGLIGPLLVCHTNTLNPAHGRQVTVQEFALFFTIFDETKSWYFTENMERNCRAPCNIQMEDPTFKENYRFHAINGYIMDTLPGLVMAQDQRIRWYLLSMGSNENIHSIHFSGHVFTVRKKEEYKMALYNLYPGVFETVEMLPSKAGIWRVECLIGEHLHAGMSTLFLVYSNKCQTPLGMASGHIRDFQITASGQYGQWAPKLARLHYSGSINAWSTKEPFSWIKVDLLAPMIIHGIKTQGARQKFSSLYISQFIIMYSLDGKKWQTYRGNSTGTDMVFFGNVDSSGIKHNIFNPPIIARYIRLHPTHYSIRSTLRMELMGCDLNSCSMPLGMESKAISDAQITASSYFTNMFATWSPSKARLHLQGRSNAWRPQVNNPKEWLQVDFQKTMKVTGVTTQGVKSLDTSMYVKEFLISSSQDGHQWTLFFQNGKVKVFQGNQDSFTPVVNSLDPPLLTRYLRIHPQSWEHQIALRMEVLGCEAQDLY

SEQ ID NO: 1073 - DNA, 4371 bp, synthetic construct
  misc_feature 1..4371: note = Variant of human B-domain deleted Factor VIII
  source 1..4371: mol_type = other DNA
atgcagattgaactgtctacctgcttcttcctctgtttgctgaggttctgctttagcgccactagacggtactaccttggcgctgtggagctgtcctgggactatatgcagagtgatttgggagagcttcccgtcgacgcacgatttcctcctcgcgttccaaagtcatttccctttaacacaagcgtggtgtacaagaagacgctcttcgtcgaattcaccgatcacctgttcaatatcgccaaacccagaccaccatggatgggtcttttggggcctaccatacaagcggaggtgtatgacacagttgttatcactctcaagaacatggcttctcatccggtaagtcttcacgcagtgggcgtgtcctactggaaagcttcagaaggagccgagtatgatgatcagacatcccagagggagaaagaagacgacaaggtatttccaggtgggtctcatacctatgtgtggcaagtgctcaaagagaatggccctatggcaagcgatccgccgtgtttgacttacagctacctttcacacgttgacctcgtcaaggacctcaactccgggttgattggagccttgttggtatgcagggaaggatctcttgccaaagagaagacacagaccctccacaagtttatccttctctttgctgtgttcgatgagggcaaaagttggcatagcgaaacgaagaattccctcatgcaggatcgcgacgcagccagcgccagagcttggcccaagatgcacactgtgaacggatatgtcaataggacgcttcctggcttgattgggtgtcatcggaaaagtgtctactggcacgtgatcggaatggggacaacaccagaggtccactccatatttctcgaaggccataccttccttgttcgaaaccacagacaggcatccttggggatctctcccattacctttctcactgcccaaacgctccttatggacttgggtcagttccttctcttttgccatatcccgtcacaccagcatgatggtatggaagcttatgtgaaagtcgacagttgtcctgaggagccacagttgcgcatgaagaataatgaagaagccgaggattacgacgacgatctcaccgattctgagatggacgtggtgaggtttgatgacgacaactctccctccatcattcaagctcggagcgtggcgaagaaacaccccaagacttgggtccactatatagcggcggaagaggaggattgggattacgctcctcttgtattggcaccagatgaccgctcatacaaaagccagtacctcaacaacggaccgcagagaattggccggaagtataagaaagtgcgatttatggcctatacagacgaaacctttaagacaagggaggccatccagcatgagagtgggattttgggacctcttctttacggcgaagttggtgataccctcctcatcatcttcaagaatcaagcttctcgcccctataacatttacccacacgggatcactgacgttaggcctttgtatagcagaagacttcccaaaggcgtgaagcatctcaaagacttccccattttgccaggcgagatctttaagtacaaatggaccgtcacagtggaagatggaccgactaaatcagaccctcgatgccttacgcggtactattcctccgaggtgaatatggagagagatttggcaagcggactcataggaccactcctcatctgttacaaggaatctgtagaccagaggggtaaccagattatgagtgataaacgcaatgtgatcctttttagcgtcttcgacgagaaccggtcctggtacttgaccgagaatatacaaaggttccttcccaaccccgcaggcgttcagttggaagaccctgagtttcaggccagcaatattatgcactcaatcaacggctatgtgtttgatagtctccagctttctgtttgcctccatgaagtagcctattggtacatcttgtcaattggtgctcaaacagacttcctctccgtcttcttctccggctacacctttaagcacaagatggtgtatgaggacactctcacactctttccattttctggagaaaccgtgttcatgagcatggagaatccaggcctttggatcttgggttgccacaacagtgattttcgcaatcggggaatgactgctctcctcaaagtcagcagctgtgataagaacacaggcgactattacgaagattcttacgaggacataagtgcctactttgactccaagaataacgccattgagcccagatcattctcccagaatcctcccgtgcttaaaaggcatcagcgcgaaatcaccagaactactcttcagtctgatcaagaggagattgactatgacgacaccataagcgtggaaatgaagaaggaggatttcgatatctatgacgaagatgagaaccagtctccgcggagctttcagaagaagacgcgacactacttcattgcagcagtcgaaaggctttgggactacggtatgtcatcatcccctcatgtgttgcgcaatagagctcagagtggaagtgttccacagttcaagaaagtcgtctttcaagagtttacagatggcagcttcacacagcctctctatcggggcgagcttaacgaacatttgggactccttggtccctatatccgagccgaagtggaggacaacattatggttacctttaggaatcaagcctctcgcccctacagcttctactcctccctcatcagttatgaggaggatcagagacaaggcgctgaaccacggaagaactttgtgaaaccgaatgagacgaagacctacttctggaaagtacagcaccacatggcccccacaaaagacgaattcgattgcaaagcatgggcgtatttttcagacgttgacttggagaaagatgtacattcaggacttattggtcctttgttggtgtgtcacactaacactctcaatccagcccatggcaggcaggtgacagtccaggaattcgctcttttctttaccatctttgatgagaccaagtcctggtacttcacggaaaacatggagcgcaattgcagagccccctgtaacatacagatggaggaccctacctttaaggaaaattatcggttccacgcaatcaacggatacattatggatacactccctggccttgtgatggctcaggaccaacgaatcaggtggtacctcctcagcatgggttctaatgagaacatacactccattcacttttcaggacatgtgttcactgtccggaagaaagaagagtataagatggccctctacaatttgtatccaggcgtgtttgagaccgttgaaatgcttccctctaaagctggcatctggagagtagagtgcttgatcggagaacatcttcacgcaggtatgagcaccttgttcctcgtgtacagcaacaaatgtcagaccccacttggcatggccagtggacacattcgcgactttcagatcacagcatctggccagtatggacaatgggccccaaagttggctcgcctccattactccggtagcataaatgcgtggtccactaaagaacctttcagctggattaaggtcgatcttcttgcccccatgatcatccacggcattaagacacagggagcgaggcagaaattctcctccctctacatctcacagttcattattatgtatagtttggacggcaagaagtggcaaacttatagaggtaacagtactggaacagacatggtgttcttcggcaacgttgatagctctggcatcaaacacaacatctttaatcctcccataatagctcggtacatcagattgcatccgacccactacagcattaggagtacactccgaatggagcttatgggttgcgacttgaattcctgttcaatgccactcggaatggagtctaaagccatctctgatgcacagataaccgccagtagctactttacgaacatgtttgctacgtggtcaccctctaaggcaaggcttcatttgcaaggccggtctaatgcctggagacctcaggtgaacaacccgaaagaatggctccaggtggactttcagaagaccatgaaagtaacaggtgtcactactcagggagttaagtccttggatactagcatgtatgtgaaggagttccttatttcctcatcacaagatggccaccagtggaccctcttctttcagaatggtaaggtcaaagtgtttcagggcaatcaagacagcttcacacccgtggtgaacagtcttgatcctccactcttgacacgataccttcgaatccatccacagtcttgggagcaccagattgcattgcgcatggaagtacttggatgcgaggctcaggacctctac

SEQ ID NO: 1074 - protein, 1457 aa, synthetic construct
  REGION 1..1457: note = Variant of human B-domain deleted Factor VIII
MQIELSTCFFLCLLRFCFSATRRYYLGAVELSWDYMQSDLGELPVDARFPPRVPKSFPFNTSVVYKKTLFVEFTDHLFNIAKPRPPWMGLLGPTIQAEVYDTVVITLKNMASHPVSLHAVGVSYWKASEGAEYDDQTSQREKEDDKVFPGGSHTYVWQVLKENGPMASDPPCLTYSYLSHVDLVKDLNSGLIGALLVCREGSLAKEKTQTLHKFILLFAVFDEGKSWHSETKNSLMQDRDAASARAWPKMHTVNGYVNRTLPGLIGCHRKSVYWHVIGMGTTPEVHSIFLEGHTFLVRNHRQASLGISPITFLTAQTLLMDLGQFLLFCHIPSHQHDGMEAYVKVDSCPEEPQLRMKNNEEAEDYDDDLTDSEMDVVRFDDDNSPSIIQARSVAKKHPKTWVHYIAAEEEDWDYAPLVLAPDDRSYKSQYLNNGPQRIGRKYKKVRFMAYTDETFKTREAIQHESGILGPLLYGEVGDTLLIIFKNQASRPYNIYPHGITDVRPLYSRRLPKGVKHLKDFPILPGEIFKYKWTVTVEDGPTKSDPRCLTRYYSSEVNMERDLASGLIGPLLICYKESVDQRGNQIMSDKRNVILFSVFDENRSWYLTENIQRFLPNPAGVQLEDPEFQASNIMHSINGYVFDSLQLSVCLHEVAYWYILSIGAQTDFLSVFFSGYTFKHKMVYEDTLTLFPFSGETVFMSMENPGLWILGCHNSDFRNRGMTALLKVSSCDKNTGDYYEDSYEDISAYFDSKNNAIEPRSFSQNPPVLKRHQREITRTTLQSDQEEIDYDDTISVEMKKEDFDIYDEDENQSPRSFQKKTRHYFIAAVERLWDYGMSSSPHVLRNRAQSGSVPQFKKVVFQEFTDGSFTQPLYRGELNEHLGLLGPYIRAEVEDNIMVTFRNQASRPYSFYSSLISYEEDQRQGAEPRKNFVKPNETKTYFWKVQHHMAPTKDEFDCKAWAYFSDVDLEKDVHSGLIGPLLVCHTNTLNPAHGRQVTVQEFALFFTIFDETKSWYFTENMERNCRAPCNIQMEDPTFKENYRFHAINGYIMDTLPGLVMAQDQRIRWYLLSMGSNENIHSIHFSGHVFTVRKKEEYKMALYNLYPGVFETVEMLPSKAGIWRVECLIGEHLHAGMSTLFLVYSNKCQTPLGMASGHIRDFQITASGQYGQWAPKLARLHYSGSINAWSTKEPFSWIKVDLLAPMIIHGIKTQGARQKFSSLYISQFIIMYSLDGKKWQTYRGNSTGTDMVFFGNVDSSGIKHNIFNPPIIARYIRLHPTHYSIRSTLRMELMGCDLNSCSMPLGMESKAISDAQITASSYFTNMFATWSPSKARLHLQGRSNAWRPQVNNPKEWLQVDFQKTMKVTGVTTQGVKSLDTSMYVKEFLISSSQDGHQWTLFFQNGKVKVFQGNQDSFTPVVNSLDPPLLTRYLRIHPQSWEHQIALRMEVLGCEAQDLY

SEQ ID NO: 1075 - DNA, 4371 bp, synthetic construct
  misc_feature 1..4371: note = Variant of human B-domain deleted Factor VIII
  source 1..4371: mol_type = other DNA
atgcagattgaactgtctacctgcttcttcctctgtttgctgaggttctgctttagcgccactagacggtactaccttggcgctgtggagctgtcctgggactatatgcagagtgatttgggagagcttcccgtcgacgcacgatttcctcctcgcgttccaaagtcatttccctttaacacaagcgtggtgtacaagaagacgctcttcgtcgaattcaccgatcacctgttcaatatcgccaaacccagaccaccatggatgggtcttttggggcctaccatacaagcggaggtgtatgacacagttgttatcactctcaagaacatggcttctcatccggtaagtcttcacgcagtgggcgtgtcctactggaaagcttcagaaggagccgagtatgatgatcagacatcccagagggagaaagaagacgacaaggtatttccaggtgggtctcatacctatgtgtggcaagtgctcaaagagaatggccctatggcaagcgatccgccgtgtttgacttacagctacctttcacacgttgacctcgtcaaggacctcaactccgggttgattggagccttgttggtatgcagggaaggatctcttgccaaagagaagacacagaccctccacaagtttatccttctctttgctgtgttcgatgagggcaaaagttggcatagcgaaacgaagaattccctcatgcaggatcgcgacgcagccagcgccagagcttggcccaagatgcacactgtgaacggatatgtcaataggacgcttcctggcttgattgggtgtcatcggaaaagtgtctactggcacgtgatcggaatggggacaacaccagaggtccactccatatttctcgaaggccataccttccttgttcgaaaccacagacaggcatccttggggatctctcccattacctttctcactgcccaaacgctccttatggacttgggtcagttccttctcttttgccatatcccgtcacaccagcatgatggtatggaagcttatgtgaaagtcgacagttgtcctgaggagccacagttgcgcatgaagaataatgaagaagccgaggattacgacgacgatctcaccgattctgagatggacgtggtgaggtttgatgacgacaactctccctccatcattcaagctcggagcgtggcgaagaaacaccccaagacttgggtccactatatagcggcggaagaggaggattgggattacgctcctcttgtattggcaccagatgaccgctcatacaaaagccagtacctcaacaacggaccgcagagaattggccggaagtataagaaagtgcgatttatggcctatacagacgaaacctttaagacaagggaggccatccagcatgagagtgggattttgggacctcttctttacggcgaagttggtgataccctcctcatcatcttcaagaatcaagcttctcgcccctataacatttacccacacgggatcactgacgttaggcctttgtatagcagaagacttcccaaaggcgtgaagcatctcaaagacttccccattttgccaggcgagatctttaagtacaaatggaccgtcacagtggaagatggaccgactaaatcagaccctcgatgccttacgcggtactattcctccttcgtgaatatggagagagatttggcaagcggactcataggaccactcctcatctgttacaaggaatctgtagaccagaggggtaaccagattatgagtgataaacgcaatgtgatcctttttagcgtcttcgacgagaaccggtcctggtacttgaccgagaatatacaaaggttccttcccaaccccgcaggcgttcagttggaagaccctgagtttcaggccagcaatattatgcactcaatcaacggctatgtgtttgatagtctccagctttctgtttgcctccatgaagtagcctattggtacatcttgtcaattggtgctcaaacagacttcctctccgtcttcttctccggctacacctttaagcacaagatggtgtatgaggacactctcacactctttccattttctggagaaaccgtgttcatgagcatggagaatccaggcctttggatcttgggttgccacaacagtgattttcgcaatcggggaatgactgctctcctcaaagtcagcagctgtgataagaacacaggcgactattacgaagattcttacgaggacataagtgcctactttgactccaagaataacgccattgagcccagatcattctcccagaatcctcccgtgcttaaaaggcatcagcgcgaaatcaccagaactactcttcagtctgatcaagaggagattgactatgacgacaccataagcgtggaaatgaagaaggaggatttcgatatctatgacgaagatgagaaccagtctccgcggagctttcagaagaagacgcgacactacttcattgcagcagtcgaaaggctttgggactacggtatgtcatcatccccttgggtgttgcgcaatagagctcagagtggaagtgttccacagttcaagaaagtcgtctttcaagagtttacagatggcagcttcacacagcctctctatcggggcgagcttaacgaacatttgggactccttggtccctatatccgagccgaagtggaggacaacattatggttacctttaggaatcaagcctctcgcccctacagcttctactcctccctcatcagttatgaggaggatcagagacaaggcgctgaaccacggaagaactttgtgaaaccgaatgagacgaagacctacttctggaaagtacagcaccacatggcccccacaaaagacgaattcgattgcaaagcatgggcgtatttttcagacgttgacttggagaaagatgtacattcaggacttattggtcctttgttggtgtgtcacactaacactctcaatccagcccatggcaggcaggtgacagtccaggaattcgctcttttctttaccatctttgatgagaccaagtcctggtacttcacggaaaacatggagcgcaattgcagagccccctgtaacatacagatggaggaccctacctttaaggaaaattatcggttccacgcaatcaacggatacattatggatacactccctggccttgtgatggctcaggaccaacgaatcaggtggtacctcctcagcatgggttctaatgagaacatacactccattcacttttcaggacatgtgttcactgtccggaagaaagaagagtataagatggccctctacaatttgtatccaggcgtgtttgagaccgttgaaatgcttccctctaaagctggcatctggagagtagagtgcttgatcggagaacatcttcacgcaggtatgagcaccttgttcctcgtgtacagcaacaaatgtcagaccccacttggcatggccagtggacacattcgcgactttcagatcacagcatctggccagtatggacaatgggccccaaagttggctcgcctccattactccggtagcataaatgcgtggtccactaaagaacctttcagctggattaaggtcgatcttcttgcccccatgatcatccacggcattaagacacagggagcgaggcagaaattctcctccctctacatctcacagttcattattatgtatagtttggacggcaagaagtggcaaacttatagaggtaacagtactggaacagacatggtgttcttcggcaacgttgatagctctggcatcaaacacaacatctttaatcctcccataatagctcggtacatcagattgcatccgacccactacagcattaggagtacactccgaatggagcttatgggttgcgacttgaattcctgttcaatgccactcggaatggagtctaaagccatctctgatgcacagataaccgccagtagctactttacgaacatgtttgctacgtggtcaccctctaaggcaaggcttcatttgcaaggccggtctaatgcctggagacctcaggtgaacaacccgaaagaatggctccaggtggactttcagaagaccatgaaagtaacaggtgtcactactcagggagttaagtccttggatactagcatgtatgtgaaggagttccttatttcctcatcacaagatggccaccagtggaccctcttctttcagaatggtaaggtcaaagtgtttcagggcaatcaagacagcttcacacccgtggtgaacagtcttgatcctccactcttgacacgataccttcgaatccatccacagtcttgggagcaccagattgcattgcgcatggaagtacttggatgcgaggctcaggacctctac

SEQ ID NO: 1076 - protein, 1457 aa, synthetic construct
  REGION 1..1457: note = Variant of human B-domain deleted Factor VIII
MQIELSTCFFLCLLRFCFSATRRYYLGAVELSWDYMQSDLGELPVDARFPPRVPKSFPFNTSVVYKKTLFVEFTDHLFNIAKPRPPWMGLLGPTIQAEVYDTVVITLKNMASHPVSLHAVGVSYWKASEGAEYDDQTSQREKEDDKVFPGGSHTYVWQVLKENGPMASDPPCLTYSYLSHVDLVKDLNSGLIGALLVCREGSLAKEKTQTLHKFILLFAVFDEGKSWHSETKNSLMQDRDAASARAWPKMHTVNGYVNRTLPGLIGCHRKSVYWHVIGMGTTPEVHSIFLEGHTFLVRNHRQASLGISPITFLTAQTLLMDLGQFLLFCHIPSHQHDGMEAYVKVDSCPEEPQLRMKNNEEAEDYDDDLTDSEMDVVRFDDDNSPSIIQARSVAKKHPKTWVHYIAAEEEDWDYAPLVLAPDDRSYKSQYLNNGPQRIGRKYKKVRFMAYTDETFKTREAIQHESGILGPLLYGEVGDTLLIIFKNQASRPYNIYPHGITDVRPLYSRRLPKGVKHLKDFPILPGEIFKYKWTVTVEDGPTKSDPRCLTRYYSSFVNMERDLASGLIGPLLICYKESVDQRGNQIMSDKRNVILFSVFDENRSWYLTENIQRFLPNPAGVQLEDPEFQASNIMHSINGYVFDSLQLSVCLHEVAYWYILSIGAQTDFLSVFFSGYTFKHKMVYEDTLTLFPFSGETVFMSMENPGLWILGCHNSDFRNRGMTALLKVSSCDKNTGDYYEDSYEDISAYFDSKNNAIEPRSFSQNPPVLKRHQREITRTTLQSDQEEIDYDDTISVEMKKEDFDIYDEDENQSPRSFQKKTRHYFIAAVERLWDYGMSSSPWVLRNRAQSGSVPQFKKVVFQEFTDGSFTQPLYRGELNEHLGLLGPYIRAEVEDNIMVTFRNQASRPYSFYSSLISYEEDQRQGAEPRKNFVKPNETKTYFWKVQHHMAPTKDEFDCKAWAYFSDVDLEKDVHSGLIGPLLVCHTNTLNPAHGRQVTVQEFALFFTIFDETKSWYFTENMERNCRAPCNIQMEDPTFKENYRFHAINGYIMDTLPGLVMAQDQRIRWYLLSMGSNENIHSIHFSGHVFTVRKKEEYKMALYNLYPGVFETVEMLPSKAGIWRVECLIGEHLHAGMSTLFLVYSNKCQTPLGMASGHIRDFQITASGQYGQWAPKLARLHYSGSINAWSTKEPFSWIKVDLLAPMIIHGIKTQGARQKFSSLYISQFIIMYSLDGKKWQTYRGNSTGTDMVFFGNVDSSGIKHNIFNPPIIARYIRLHPTHYSIRSTLRMELMGCDLNSCSMPLGMESKAISDAQITASSYFTNMFATWSPSKARLHLQGRSNAWRPQVNNPKEWLQVDFQKTMKVTGVTTQGVKSLDTSMYVKEFLISSSQDGHQWTLFFQNGKVKVFQGNQDSFTPVVNSLDPPLLTRYLRIHPQSWEHQIALRMEVLGCEAQDLY

SEQ ID NO: 1077 - DNA, 4371 bp, synthetic construct
  misc_feature 1..4371: note = Variant of human B-domain deleted Factor VIII
  source 1..4371: mol_type = other DNA
atgcagattgaactgtctacctgcttcttcctctgtttgctgaggttctgctttagcgccactagacggtactaccttggcgctgtggagctgtcctgggactatatgcagagtgatttgggagagcttcccgtcgacgcacgatttcctcctcgcgttccaaagtcatttccctttaacacaagcgtggtgtacaagaagacgctcttcgtcgaattcaccgatcacctgttcaatatcgccaaacccagaccaccatggatgggtcttttggggcctaccatacaagcggaggtgtatgacacagttgttatcactctcaagaacatggcttctcatccggtaagtcttcacgcagtgggcgtgtcctactggaaagcttcagaaggagccgagtatgatgatcagacatcccagagggagaaagaagacgacaaggtatttccaggtgggtctcatacctatgtgtggcaagtgctcaaagagaatggccctatggcaagcgatccgccgtgtttgacttacagctacctttcacacgttgacctcgtcaaggacctcaactccgggttgattggagccttgttggtatgcagggaaggatctcttgccaaagagaagacacagaccctccacaagtttatccttctctttgctgtgttcgatgagggcaaaagttggcatagcgaaacgaagaattccctcatgcaggatcgcgacgcagccagcgccagagcttggcccaagatgcacactgtgaacggatatgtcaataggacgcttcctggcttgattgggtgtcatcggaaaagtgtctactggcacgtgatcggaatggggacaacaccagaggtccactccatatttctcgaaggccataccttccttgttcgaaaccacagacaggcatccttggggatctctcccattacctttctcactgcccaaacgctccttcaggacttgggtcagttccttctcttttgccatatcccgtcacaccagcatgatggtatggaagcttatgtgaaagtcgacagttgtcctgaggagccacagttgcgcatgaagaataatgaagaagccgaggattacgacgacgatctcaccgattctgagatggacgtggtgaggtttgatgacgacaactctccctccatcattcaagctcggagcgtggcgaagaaacaccccaagacttgggtccactatatagcggcggaagaggaggattgggattacgctcctcttgtattggcaccagatgaccgctcatacaaaagccagtacctcaacaacggaccgcagagaattggccggaagtataagaaagtgcgatttatggcctatacagacgaaacctttaagacaagggaggccatccagcatgagagtgggattttgggacctcttctttacggcgaagttggtgataccctcctcatcatcttcaagaatcaagcttctcgcccctataacatttacccacacgggatcactgacgttaggcctttgtatagcagaagacttcccaaaggcgtgaagcatctcaaagacttccccattttgccaggcgagatctttaagtacaaatggaccgtcacagtggaagatggaccgactaaatcagaccctcgatgccttacgcggtactattcctccttcgtgaatatggagagagatttggcaagcggactcataggaccactcctcatctgttacaaggaatctgtagaccagaggggtaaccagattatgagtgataaacgcaatgtgatcctttttagcgtcttcgacgagaaccggtcctggtacttgaccgagaatatacaaaggttccttcccaaccccgcaggcgttcagttggaagaccctgagtttcaggccagcaatattatgcactcaatcaacggctatgtgtttgatagtctccagctttctgtttgcctccatgaagtagcctattggtacatcttgtcaattggtgctcaaacagacttcctctccgtcttcttctccggctacacctttaagcacaagatggtgtatgaggacactctcacactctttccattttctggagaaaccgtgttcatgagcatggagaatccaggcctttggatcttgggttgccacaacagtgattttcgcaatcggggaatgactgctctcctcaaagtcagcagctgtgataagaacacaggcgactattacgaagattcttacgaggacataagtgcctactttgactccaagaataacgccattgagcccagatcattctcccagaatcctcccgtgcttaaaaggcatcagcgcgaaatcaccagaactactcttcagtctgatcaagaggagattgactatgacgacaccataagcgtggaaatgaagaaggaggatttcgatatctatgacgaagatgagaaccagtctccgcggagctttcagaagaagacgcgacactacttcattgcagcagtcgaaaggctttgggactacggtatgtcatcatcccctcatgtgttgcgcaatagagctcagagtggaagtgttccacagttcaagaaagtcgtctttcaagagtttacagatggcagcttcacacagcctctctatcggggcgagcttaacgaacatttgggactccttggtccctatatccgagccgaagtggaggacaacattatggttacctttaggaatcaagcctctcgcccctacagcttctactcctccctcatcagttatgaggaggatcagagacaaggcgctgaaccacggaagaactttgtgaaaccgaatgagacgaagacctacttctggaaagtacagcaccacatggcccccacaaaagacgaattcgattgcaaagcatgggcgtatttttcagacgttgacttggagaaagatgtacattcaggacttattggtcctttgttggtgtgtcacactaacactctcaatccagcccatggcaggcaggtgacagtccaggaattcgctcttttctttaccatctttgatgagaccaagtcctggtacttcacggaaaacatggagcgcaattgcagagccccctgtaacatacagatggaggaccctacctttaaggaaaattatcggttccacgcaatcaacggatacattatggatacactccctggccttgtgatggctcaggaccaacgaatcaggtggtacctcctcagcatgggttctaatgagaacatacactccattcacttttcaggacatgtgttcactgtccggaagaaagaagagtataagatggccctctacaatttgtatccaggcgtgtttgagaccgttgaaatgcttccctctaaagctggcatctggagagtagagtgcttgatcggagaacatcttcacgcaggtatgagcaccttgttcctcgtgtacagcaacaaatgtcagaccccacttggcatggccagtggacacattcgcgactttcagatcacagcatctggccagtatggacaatgggccccaaagttggctcgcctccattactccggtagcataaatgcgtggtccactaaagaacctttcagctggattaaggtcgatcttcttgcccccatgatcatccacggcattaagacacagggagcgaggcagaaattctcctccctctacatctcacagttcattattatgtatagtttggacggcaagaagtggcaaacttatagaggtaacagtactggaacagacatggtgttcttcggcaacgttgatagctctggcatcaaacacaacatctttaatcctcccataatagctcggtacatcagattgcatccgacccactacagcattaggagtacactccgaatggagcttatgggttgcgacttgaattcctgttcaatgccactcggaatggagtctaaagccatctctgatgcacagataaccgccagtagctactttacgaacatgtttgctacgtggtcaccctctaaggcaaggcttcatttgcaaggccggtctaatgcctggagacctcaggtgaacaacccgaaagaatggctccaggtggactttcagaagaccatgaaagtaacaggtgtcactactcagggagttaagtccttggatactagcatgtatgtgaaggagttccttatttcctcatcacaagatggccaccagtggaccctcttctttcagaatggtaaggtcaaagtgtttcagggcaatcaagacagcttcacacccgtggtgaacagtcttgatcctccactcttgacacgataccttcgaatccatccacagtcttgggagcaccagattgcattgcgcatggaagtacttggatgcgaggctcaggacctctac

SEQ ID NO: 1078 - protein, 1457 aa, synthetic construct
  REGION 1..1457: note = Variant of human B-domain deleted Factor VIII
MQIELSTCFFLCLLRFCFSATRRYYLGAVELSWDYMQSDLGELPVDARFPPRVPKSFPFNTSVVYKKTLFVEFTDHLFNIAKPRPPWMGLLGPTIQAEVYDTVVITLKNMASHPVSLHAVGVSYWKASEGAEYDDQTSQREKEDDKVFPGGSHTYVWQVLKENGPMASDPPCLTYSYLSHVDLVKDLNSGLIGALLVCREGSLAKEKTQTLHKFILLFAVFDEGKSWHSETKNSLMQDRDAASARAWPKMHTVNGYVNRTLPGLIGCHRKSVYWHVIGMGTTPEVHSIFLEGHTFLVRNHRQASLGISPITFLTAQTLLQDLGQFLLFCHIPSHQHDGMEAYVKVDSCPEEPQLRMKNNEEAEDYDDDLTDSEMDVVRFDDDNSPSIIQARSVAKKHPKTWVHYIAAEEEDWDYAPLVLAPDDRSYKSQYLNNGPQRIGRKYKKVRFMAYTDETFKTREAIQHESGILGPLLYGEVGDTLLIIFKNQASRPYNIYPHGITDVRPLYSRRLPKGVKHLKDFPILPGEIFKYKWTVTVEDGPTKSDPRCLTRYYSSFVNMERDLASGLIGPLLICYKESVDQRGNQIMSDKRNVILFSVFDENRSWYLTENIQRFLPNPAGVQLEDPEFQASNIMHSINGYVFDSLQLSVCLHEVAYWYILSIGAQTDFLSVFFSGYTFKHKMVYEDTLTLFPFSGETVFMSMENPGLWILGCHNSDFRNRGMTALLKVSSCDKNTGDYYEDSYEDISAYFDSKNNAIEPRSFSQNPPVLKRHQREITRTTLQSDQEEIDYDDTISVEMKKEDFDIYDEDENQSPRSFQKKTRHYFIAAVERLWDYGMSSSPHVLRNRAQSGSVPQFKKVVFQEFTDGSFTQPLYRGELNEHLGLLGPYIRAEVEDNIMVTFRNQASRPYSFYSSLISYEEDQRQGAEPRKNFVKPNETKTYFWKVQHHMAPTKDEFDCKAWAYFSDVDLEKDVHSGLIGPLLVCHTNTLNPAHGRQVTVQEFALFFTIFDETKSWYFTENMERNCRAPCNIQMEDPTFKENYRFHAINGYIMDTLPGLVMAQDQRIRWYLLSMGSNENIHSIHFSGHVFTVRKKEEYKMALYNLYPGVFETVEMLPSKAGIWRVECLIGEHLHAGMSTLFLVYSNKCQTPLGMASGHIRDFQITASGQYGQWAPKLARLHYSGSINAWSTKEPFSWIKVDLLAPMIIHGIKTQGARQKFSSLYISQFIIMYSLDGKKWQTYRGNSTGTDMVFFGNVDSSGIKHNIFNPPIIARYIRLHPTHYSIRSTLRMELMGCDLNSCSMPLGMESKAISDAQITASSYFTNMFATWSPSKARLHLQGRSNAWRPQVNNPKEWLQVDFQKTMKVTGVTTQGVKSLDTSMYVKEFLISSSQDGHQWTLFFQNGKVKVFQGNQDSFTPVVNSLDPPLLTRYLRIHPQSWEHQIALRMEVLGCEAQDLY

SEQ ID NO: 1079 - DNA, 4371 bp, synthetic construct
  misc_feature 1..4371: note = Variant of human B-domain deleted Factor VIII
  source 1..4371: mol_type = other DNA
atgcagattgaactgtctacctgcttcttcctctgtttgctgaggttctgctttagcgccactagacggtactaccttggcgctgtggagctgtcctgggactatatgcagagtgatttgggagagcttcccgtcgacgcacgatttcctcctcgcgttccaaagtcatttccctttaacacaagcgtggtgtacaagaagacgctcttcgtcgaattcaccgatcacctgttcaatatcgccaaacccagaccaccatggatgggtcttttggggcctaccatacaagcggaggtgtatgacacagttgttatcactctcaagaacatggcttctcatccggtaagtcttcacgcagtgggcgtgtcctactggaaagcttcagaaggagccgagtatgatgatcagacatcccagagggagaaagaagacgacaaggtatttccaggtgggtctcatacctatgtgtggcaagtgctcaaagagaatggccctatggcaagcgatccgccgtgtttgacttacagctacctttcacacgttgacctcgtcaaggacctcaactccgggttgattggagccttgttggtatgcagggaaggatctcttgccaaagagaagacacagaccctccacaagtttatccttctctttgctgtgttcgatgagggcaaaagttggcatagcgaaacgaagaattccctcatgcaggatcgcgacgcagccagcgccagagcttggcccaagatgcacactgtgaacggatatgtcaataggacgcttcctggcttgattgggtgtcatcggaaaagtgtctactggcacgtgatcggaatggggacaacaccagaggtccactccatatttctcgaaggccataccttccttgttcgaaaccacagacaggcatccttggggatctctcccattacctttctcactgcccaaacgctccttatggacttgggtcagttccttctcttttgccatatcccgtcacaccagcatgatggtatggaagcttatgtgaaagtcgacagttgtcctgaggagccacagttgcgcatgaagaataatgaagaagccgaggattacgacgacgatctcaccgattctgagatggacgtggtgaggtttgatgacgacaactctccctccatcattcaagctcggagcgtggcgaagaaacaccccaagacttgggtccactatatagcggcggaagaggaggattgggattacgctcctcttgtattggcaccagatgaccgctcatacaaaagccagtacctcaacaacggaccgcagagaattggccggaagtataagaaagtgcgatttatggcctatacagacgaaacctttaagacaagggaggccatccagcatgagagtgggattttgggacctcttctttacggcgaagttggtgataccctcctcatcatcttcaagaatcaagcttctcgcccctataacatttacccacacgggatcactgacgttaggcctttgtatagcagaagacttcccaaaggcgtgaagcatctcaaagacttccccattttgccaggcgagatctttaagtacaaatggaccgtcacagtggaagatggaccgactaaatcagaccctcgatgccttacgcggtactattcctccttcgtgaatatggagagagatttggcaagcggactcataggaccactcctcatctgttacaaggaatctgtagaccagaggggtaaccagattatgagtgataaacgcaatgtgatcctttttagcgtcttcgacgagaaccggtcctggtacttgaccgagaatatacaaaggttccttcccaaccccgcaggcgttcagttggaagaccctgagtttcaggccagcaatattatgcactcaatcaacggctatgtgtttgatagtctccagctttctgtttgcctccatgaagtagcctattggtacatcttgtcaattggtgctcaaacagacttcctctccgtcttcttctccggctacacctttaagcacaagatggtgtatgaggacactctcacactctttccattttctggagaaaccgtgttcatgagcatggagaatccaggcctttggatcttgggttgccacaacagtgattttcgcaatcggggaatgactgctctcctcaaagtcagcagctgtgataagaacacaggcgactattacgaagattcttacgaggacataagtgcctactttgactccaagaataacgccattgagcccagatcattctcccagaatcctcccgtgcttaaaaggcatcagcgcgaaatcaccagaactactcttcagtctgatcaagaggagattgactatgacgacaccataagcgtggaaatgaagaaggaggatttcgatatctatgacgaagatgagaaccagtctccgcggagctttcagaagaagacgcgacactacttcattgcagcagtcgaaaggctttgggactacggtatggggtcatcccctcatgtgttgcgcaatagagctcagagtggaagtgttccacagttcaagaaagtcgtctttcaagagtttacagatggcagcttcacacagcctctctatcggggcgagcttaacgaacatttgggactccttggtccctatatccgagccgaagtggaggacaacattatggttacctttaggaatcaagcctctcgcccctacagcttctactcctccctcatcagttatgaggaggatcagagacaaggcgctgaaccacggaagaactttgtgaaaccgaatgagacgaagacctacttctggaaagtacagcaccacatggcccccacaaaagacgaattcgattgcaaagcatgggcgtatttttcagacgttgacttggagaaagatgtacattcaggacttattggtcctttgttggtgtgtcacactaacactctcaatccagcccatggcaggcaggtgacagtccaggaattcgctcttttctttaccatctttgatgagaccaagtcctggtacttcacggaaaacatggagcgcaattgcagagccccctgtaacatacagatggaggaccctacctttaaggaaaattatcggttccacgcaatcaacggatacattatggatacactccctggccttgtgatggctcaggaccaacgaatcaggtggtacctcctcagcatgggttctaatgagaacatacactccattcacttttcaggacatgtgttcactgtccggaagaaagaagagtataagatggccctctacaatttgtatccaggcgtgtttgagaccgttgaaatgcttccctctaaagctggcatctggagagtagagtgcttgatcggagaacatcttcacgcaggtatgagcaccttgttcctcgtgtacagcaacaaatgtcagaccccacttggcatggccagtggacacattcgcgactttcagatcacagcatctggccagtatggacaatgggccccaaagttggctcgcctccattactccggtagcataaatgcgtggtccactaaagaacctttcagctggattaaggtcgatcttcttgcccccatgatcatccacggcattaagacacagggagcgaggcagaaattctcctccctctacatctcacagttcattattatgtatagtttggacggcaagaagtggcaaacttatagaggtaacagtactggaacagacatggtgttcttcggcaacgttgatagctctggcatcaaacacaacatctttaatcctcccataatagctcggtacatcagattgcatccgacccactacagcattaggagtacactccgaatggagcttatgggttgcgacttgaattcctgttcaatgccactcggaatggagtctaaagccatctctgatgcacagataaccgccagtagctactttacgaacatgtttgctacgtggtcaccctctaaggcaaggcttcatttgcaaggccggtctaatgcctggagacctcaggtgaacaacccgaaagaatggctccaggtggactttcagaagaccatgaaagtaacaggtgtcactactcagggagttaagtccttggatactagcatgtatgtgaaggagttccttatttcctcatcacaagatggccaccagtggaccctcttctttcagaatggtaaggtcaaagtgtttcagggcaatcaagacagcttcacacccgtggtgaacagtcttgatcctccactcttgacacgataccttcgaatccatccacagtcttgggagcaccagattgcattgcgcatggaagtacttggatgcgaggctcaggacctctac

SEQ ID NO: 1080 - protein, 1457 aa, synthetic construct
  REGION 1..1457: note = Variant of human B-domain deleted Factor VIII
MQIELSTCFFLCLLRFCFSATRRYYLGAVELSWDYMQSDLGELPVDARFPPRVPKSFPFNTSVVYKKTLFVEFTDHLFNIAKPRPPWMGLLGPTIQAEVYDTVVITLKNMASHPVSLHAVGVSYWKASEGAEYDDQTSQREKEDDKVFPGGSHTYVWQVLKENGPMASDPPCLTYSYLSHVDLVKDLNSGLIGALLVCREGSLAKEKTQTLHKFILLFAVFDEGKSWHSETKNSLMQDRDAASARAWPKMHTVNGYVNRTLPGLIGCHRKSVYWHVIGMGTTPEVHSIFLEGHTFLVRNHRQASLGISPITFLTAQTLLMDLGQFLLFCHIPSHQHDGMEAYVKVDSCPEEPQLRMKNNEEAEDYDDDLTDSEMDVVRFDDDNSPSIIQARSVAKKHPKTWVHYIAAEEEDWDYAPLVLAPDDRSYKSQYLNNGPQRIGRKYKKVRFMAYTDETFKTREAIQHESGILGPLLYGEVGDTLLIIFKNQASRPYNIYPHGITDVRPLYSRRLPKGVKHLKDFPILPGEIFKYKWTVTVEDGPTKSDPRCLTRYYSSFVNMERDLASGLIGPLLICYKESVDQRGNQIMSDKRNVILFSVFDENRSWYLTENIQRFLPNPAGVQLEDPEFQASNIMHSINGYVFDSLQLSVCLHEVAYWYILSIGAQTDFLSVFFSGYTFKHKMVYEDTLTLFPFSGETVFMSMENPGLWILGCHNSDFRNRGMTALLKVSSCDKNTGDYYEDSYEDISAYFDSKNNAIEPRSFSQNPPVLKRHQREITRTTLQSDQEEIDYDDTISVEMKKEDFDIYDEDENQSPRSFQKKTRHYFIAAVERLWDYGMGSSPHVLRNRAQSGSVPQFKKVVFQEFTDGSFTQPLYRGELNEHLGLLGPYIRAEVEDNIMVTFRNQASRPYSFYSSLISYEEDQRQGAEPRKNFVKPNETKTYFWKVQHHMAPTKDEFDCKAWAYFSDVDLEKDVHSGLIGPLLVCHTNTLNPAHGRQVTVQEFALFFTIFDETKSWYFTENMERNCRAPCNIQMEDPTFKENYRFHAINGYIMDTLPGLVMAQDQRIRWYLLSMGSNENIHSIHFSGHVFTVRKKEEYKMALYNLYPGVFETVEMLPSKAGIWRVECLIGEHLHAGMSTLFLVYSNKCQTPLGMASGHIRDFQITASGQYGQWAPKLARLHYSGSINAWSTKEPFSWIKVDLLAPMIIHGIKTQGARQKFSSLYISQFIIMYSLDGKKWQTYRGNSTGTDMVFFGNVDSSGIKHNIFNPPIIARYIRLHPTHYSIRSTLRMELMGCDLNSCSMPLGMESKAISDAQITASSYFTNMFATWSPSKARLHLQGRSNAWRPQVNNPKEWLQVDFQKTMKVTGVTTQGVKSLDTSMYVKEFLISSSQDGHQWTLFFQNGKVKVFQGNQDSFTPVVNSLDPPLLTRYLRIHPQSWEHQIALRMEVLGCEAQDLY

SEQ ID NO: 1081 - DNA, 4371 bp, synthetic construct
  misc_feature 1..4371: note = Variant of human B-domain deleted Factor VIII
  source 1..4371: mol_type = other DNA
atgcagattgaactgtctacctgcttcttcctctgtttgctgaggttctgctttagcgccactagacggtactaccttggcgctgtggagctgtcctgggactatatgcagagtgatttgggagagcttcccgtcgacgcacgatttcctcctcgcgttccaaagtcatttccctttaacacaagcgtggtgtacaagaagacgctcttcgtcgaattcaccgatcacctgttcaatatcgccaaacccagaccaccatggatgggtcttttggggcctaccatacaagcggaggtgtatgacacagttgttatcactctcaagaacatggcttctcatccggtaagtcttcacgcagtgggcgtgtcctactggaaagcttcagaaggagccgagtatgatgatcagacatcccagagggagaaagaagacgacaaggtatttccaggtgggtctcatacctatgtgtggcaagtgctcaaagagaatggccctatggcaagcgatccgccgtgtttgacttacagctacctttcacacgttgacctcgtcaaggacctcaactccgggttgattggagccttgttggtatgcagggaaggatctcttgccaaagagaagacacagaccctccacaagtttatccttctctttgctgtgttcgatgagggcaaaagttggcatagcgaaacgaagaattccctcatgcaggatcgcgacgcagccagcgccagagcttggcccaagatgcacactgtgaacggatatgtcaataggacgcttcctggcttgattgggtgtcatcggaaaagtgtctactggcacgtgatcggaatggggacaacaccagaggtccactccatatttctcgaaggccataccttccttgttcgaaaccacagacaggcatccttggggatctctcccattacctttctcactgcccaaacgctccttatggacttgggtcagttccttctcttttgccatatcccgtcacaccagcatgatggtatggaagcttatgtgaaagtcgacagttgtcctgaggagccacagttgcgcatgaagaataatgaagaagccgaggattacgacgacgatctcaccgattctgagatggacgtggtgaggtttgatgacgacaactctccctccatcattcaagctcggagcgtggcgaagaaacaccccaagacttgggtccactatatagcggcggaagaggaggattgggattacgctcctcttgtattggcaccagatgaccgctcatacaaaagccagtacctcaacaacggaccgcagagaattggccggaagtataagaaagtgcgatttatggcctatacagacgaaacctttaagacaagggaggccatccagcatgagagtgggattttgggacctcttctttacggcgaagttggtgataccctcctcatcatcttcaagaatcaagcttctcgcccctataacatttacccacacgggatcactgacgttaggcctttgtatagcagaagacttcccaaaggcgtgaagcatctcaaagacttccccattttgccaggcgagatctttaagtacaaatggaccgtcacagtggaagatggaccgactaaatcagaccctcgatgccttacgcggtactattcctccttcgtgaatagggagagagatttggcaagcggactcataggaccactcctcatctgttacaaggaatctgtagaccagaggggtaaccagattatgagtgataaacgcaatgtgatcctttttagcgtcttcgacgagaaccggtcctggtacttgaccgagaatatacaaaggttccttcccaaccccgcaggcgttcagttggaagaccctgagtttcaggccagcaatattatgcactcaatcaacggctatgtgtttgatagtctccagctttctgtttgcctccatgaagtagcctattggtacatcttgtcaattggtgctcaaacagacttcctctccgtcttcttctccggctacacctttaagcacaagatggtgtatgaggacactctcacactctttccattttctggagaaaccgtgttcatgagcatggagaatccaggcctttggatcttgggttgccacaacagtgattttcgcaatcggggaatgactgctctcctcaaagtcagcagctgtgataagaacacaggcgactattacgaagattcttacgaggacataagtgcctactttgactccaagaataacgccattgagcccagatcattctcccagaatcctcccgtgcttaaaaggcatcagcgcgaaatcaccagaactactcttcagtctgatcaagaggagattgactatgacgacaccataagcgtggaaatgaagaaggaggatttcgatatctatgacgaagatgagaaccagtctccgcggagctttcagaagaagacgcgacactacttcattgcagcagtcgaaaggctttgggactacggtatgtcatcatcccctcatgtgttgcgcaatagagctcagagtggaagtgttccacagttcaagaaagtcgtctttcaagagtttacagatggcagcttcacacagcctctctatcggggcgagcttaacgaacatttgggactccttggtccctatatccgagccgaagtggaggacaacattatggttacctttaggaatcaagcctctcgcccctacagcttctactcctccctcatcagttatgaggaggatcagagacaaggcgctgaaccacggaagaactttgtgaaaccgaatgagacgaagacctacttctggaaagtacagcaccacatggcccccacaaaagacgaattcgattgcaaagcatgggcgtatttttcagacgttgacttggagaaagatgtacattcaggacttattggtcctttgttggtgtgtcacactaacactctcaatccagcccatggcaggcaggtgacagtccaggaattcgctcttttctttaccatctttgatgagaccaagtcctggtacttcacggaaaacatggagcgcaattgcagagccccctgtaacatacagatggaggaccctacctttaaggaaaattatcggttccacgcaatcaacggatacattatggatacactccctggccttgtgatggctcaggaccaacgaatcaggtggtacctcctcagcatgggttctaatgagaacatacactccattcacttttcaggacatgtgttcactgtccggaagaaagaagagtataagatggccctctacaatttgtatccaggcgtgtttgagaccgttgaaatgcttccctctaaagctggcatctggagagtagagtgcttgatcggagaacatcttcacgcaggtatgagcaccttgttcctcgtgtacagcaacaaatgtcagaccccacttggcatggccagtggacacattcgcgactttcagatcacagcatctggccagtatggacaatgggccccaaagttggctcgcctccattactccggtagcataaatgcgtggtccactaaagaacctttcagctggattaaggtcgatcttcttgcccccatgatcatccacggcattaagacacagggagcgaggcagaaattctcctccctctacatctcacagttcattattatgtatagtttggacggcaagaagtggcaaacttatagaggtaacagtactggaacagacatggtgttcttcggcaacgttgatagctctggcatcaaacacaacatctttaatcctcccataatagctcggtacatcagattgcatccgacccactacagcattaggagtacactccgaatggagcttatgggttgcgacttgaattcctgttcaatgccactcggaatggagtctaaagccatctctgatgcacagataaccgccagtagctactttacgaacatgtttgctacgtggtcaccctctaaggcaaggcttcatttgcaaggccggtctaatgcctggagacctcaggtgaacaacccgaaagaatggctccaggtggactttcagaagaccatgaaagtaacaggtgtcactactcagggagttaagtccttggatactagcatgtatgtgaaggagttccttatttcctcatcacaagatggccaccagtggaccctcttctttcagaatggtaaggtcaaagtgtttcagggcaatcaagacagcttcacacccgtggtgaacagtcttgatcctccactcttgacacgataccttcgaatccatccacagtcttgggagcaccagattgcattgcgcatggaagtacttggatgcgaggctcaggacctctac

SEQ ID NO: 1082 - protein, 1457 aa, synthetic construct
  REGION 1..1457: note = Variant of human B-domain deleted Factor VIII
MQIELSTCFFLCLLRFCFSATRRYYLGAVELSWDYMQSDLGELPVDARFPPRVPKSFPFNTSVVYKKTLFVEFTDHLFNIAKPRPPWMGLLGPTIQAEVYDTVVITLKNMASHPVSLHAVGVSYWKASEGAEYDDQTSQREKEDDKVFPGGSHTYVWQVLKENGPMASDPPCLTYSYLSHVDLVKDLNSGLIGALLVCREGSLAKEKTQTLHKFILLFAVFDEGKSWHSETKNSLMQDRDAASARAWPKMHTVNGYVNRTLPGLIGCHRKSVYWHVIGMGTTPEVHSIFLEGHTFLVRNHRQASLGISPITFLTAQTLLMDLGQFLLFCHIPSHQHDGMEAYVKVDSCPEEPQLRMKNNEEAEDYDDDLTDSEMDVVRFDDDNSPSIIQARSVAKKHPKTWVHYIAAEEEDWDYAPLVLAPDDRSYKSQYLNNGPQRIGRKYKKVRFMAYTDETFKTREAIQHESGILGPLLYGEVGDTLLIIFKNQASRPYNIYPHGITDVRPLYSRRLPKGVKHLKDFPILPGEIFKYKWTVTVEDGPTKSDPRCLTRYYSSFVNRERDLASGLIGPLLICYKESVDQRGNQIMSDKRNVILFSVFDENRSWYLTENIQRFLPNPAGVQLEDPEFQASNIMHSINGYVFDSLQLSVCLHEVAYWYILSIGAQTDFLSVFFSGYTFKHKMVYEDTLTLFPFSGETVFMSMENPGLWILGCHNSDFRNRGMTALLKVSSCDKNTGDYYEDSYEDISAYFDSKNNAIEPRSFSQNPPVLKRHQREITRTTLQSDQEEIDYDDTISVEMKKEDFDIYDEDENQSPRSFQKKTRHYFIAAVERLWDYGMSSSPHVLRNRAQSGSVPQFKKVVFQEFTDGSFTQPLYRGELNEHLGLLGPYIRAEVEDNIMVTFRNQASRPYSFYSSLISYEEDQRQGAEPRKNFVKPNETKTYFWKVQHHMAPTKDEFDCKAWAYFSDVDLEKDVHSGLIGPLLVCHTNTLNPAHGRQVTVQEFALFFTIFDETKSWYFTENMERNCRAPCNIQMEDPTFKENYRFHAINGYIMDTLPGLVMAQDQRIRWYLLSMGSNENIHSIHFSGHVFTVRKKEEYKMALYNLYPGVFETVEMLPSKAGIWRVECLIGEHLHAGMSTLFLVYSNKCQTPLGMASGHIRDFQITASGQYGQWAPKLARLHYSGSINAWSTKEPFSWIKVDLLAPMIIHGIKTQGARQKFSSLYISQFIIMYSLDGKKWQTYRGNSTGTDMVFFGNVDSSGIKHNIFNPPIIARYIRLHPTHYSIRSTLRMELMGCDLNSCSMPLGMESKAISDAQITASSYFTNMFATWSPSKARLHLQGRSNAWRPQVNNPKEWLQVDFQKTMKVTGVTTQGVKSLDTSMYVKEFLISSSQDGHQWTLFFQNGKVKVFQGNQDSFTPVVNSLDPPLLTRYLRIHPQSWEHQIALRMEVLGCEAQDLY

SEQ ID NO: 1083 - DNA, 4371 bp, synthetic construct
  misc_feature 1..4371: note = Variant of human B-domain deleted Factor VIII
  source 1..4371: mol_type = other DNA
atgcagattgaactgtctacctgcttcttcctctgtttgctgaggttctgctttagcgccactagacggtactaccttggcgctgtggagctgtcctgggactatatgcagagtgatttgggagagcttcccgtcgacgcacgatttcctcctcgcgttccaaagtcatttccctttaacacaagcgtggtgtacaagaagacgctcttcgtcgaattcaccgatcacctgttcaatatcgccaaacccagaccaccatggatgggtcttttggggcctaccatacaagcggaggtgtatgacacagttgttatcactctcaagaacatggcttctcatccggtaagtcttcacgcagtgggcgtgtcctactggaaagcttcagaaggagccgagtatgatgatcagacatcccagagggagaaagaagacgacaaggtatttccaggtgggtctcatacctatgtgtggcaagtgctcaaagagaatggccctatggcaagcgatccgccgtgtttgacttacagctacctttcacacgttgacctcgtcaaggacctcaactccgggttgattggagccttgttggtatgcagggaaggatctcttgccaaagagaagacacagaccctccacaagtttatccttctctttgctgtgttcgatgagggcaaaagttggcatagcgaaacgaagaattccctcatgcaggatcgcgacgcagccagcgccagagcttggcccaagatgcacactgtgaacggatatgtcaataggacgcttcctggcttgattgggtgtcatcggaaaagtgtctactggcacgtgatcggaatggggacaacaccagaggtccactccatatttctcgaaggccataccttccttgttcgaaaccacagacaggcatccttggggatctctcccattacctttctcactgcccaaacgctccttatggacttgggtcagttccttctcttttgccatatcccgtcacaccagcatgatggtatggaagcttatgtgaaagtcgacagttgtcctgaggagccacagttgcgcatgaagaataatgaagaagccgaggattacgacgacgatctcaccgattctgagatggacgtggtgaggtttgatgacgacaactctccctccatcattcaagctcggagcgtggcgaagaaacaccccaagacttgggtccactatatagcggcggaagaggaggattgggattacgctcctcttgtattggcaccagatgaccgctcatacaaaagccagtacctcaacaacggaccgcagagaattggccggaagtataagaaagtgcgatttatggcctatacagacgaaacctttaagacaagggaggccatccagcatgagagtgggattttgggacctcttctttacggcgaagttggtgataccctcctcatcatcttcaagaatcaagcttctcgcccctataacatttacccacacgggatcactgacgttaggcctttgtatagcagaagacttcccaaaggcgtgaagcatctcaaagacttccccattttgccaggcgagatctttaagtacaaatggaccgtcacagtggaagatggaccgactaaatcagaccctcgatgccttacgcggtactattcctccggggtgaatatggagagagatttggcaagcggactcataggaccactcctcatctgttacaaggaatctgtagaccagaggggtaaccagattatgagtgataaacgcaatgtgatcctttttagcgtcttcgacgagaaccggtcctggtacttgaccgagaatatacaaaggttccttcccaaccccgcaggcgttcagttggaagaccctgagtttcaggccagcaatattatgcactcaatcaacggctatgtgtttgatagtctccagctttctgtttgcctccatgaagtagcctattggtacatcttgtcaattggtgctcaaacagacttcctctccgtcttcttctccggctacacctttaagcacaagatggtgtatgaggacactctcacactctttccattttctggagaaaccgtgttcatgagcatggagaatccaggcctttggatcttgggttgccacaacagtgattttcgcaatcggggaatgactgctctcctcaaagtcagcagctgtgataagaacacaggcgactattacgaagattcttacgaggacataagtgcctactttgactccaagaataacgccattgagcccagatcattctcccagaatcctcccgtgcttaaaaggcatcagcgcgaaatcaccagaactactcttcagtctgatcaagaggagattgactatgacgacaccataagcgtggaaatgaagaaggaggatttcgatatctatgacgaagatgagaaccagtctccgcggagctttcagaagaagacgcgacactacttcattgcagcagtcgaaaggctttgggactacggtatgtcatcatcccctcatgtgttgcgcaatagagctcagagtggaagtgttccacagttcaagaaagtcgtctttcaagagtttacagatggcagcttcacacagcctctctatcggggcgagcttaacgaacatttgggactccttggtccctatatccgagccgaagtggaggacaacattatggttacctttaggaatcaagcctctcgcccctacagcttctactcctccctcatcagttatgaggaggatcagagacaaggcgctgaaccacggaagaactttgtgaaaccgaatgagacgaagacctacttctggaaagtacagcaccacatggcccccacaaaagacgaattcgattgcaaagcatgggcgtatttttcagacgttgacttggagaaagatgtacattcaggacttattggtcctttgttggtgtgtcacactaacactctcaatccagcccatggcaggcaggtgacagtccaggaattcgctcttttctttaccatctttgatgagaccaagtcctggtacttcacggaaaacatggagcgcaattgcagagccccctgtaacatacagatggaggaccctacctttaaggaaaattatcggttccacgcaatcaacggatacattatggatacactccctggccttgtgatggctcaggaccaacgaatcaggtggtacctcctcagcatgggttctaatgagaacatacactccattcacttttcaggacatgtgttcactgtccggaagaaagaagagtataagatggccctctacaatttgtatccaggcgtgtttgagaccgttgaaatgcttccctctaaagctggcatctggagagtagagtgcttgatcggagaacatcttcacgcaggtatgagcaccttgttcctcgtgtacagcaacaaatgtcagaccccacttggcatggccagtggacacattcgcgactttcagatcacagcatctggccagtatggacaatgggccccaaagttggctcgcctccattactccggtagcataaatgcgtggtccactaaagaacctttcagctggattaaggtcgatcttcttgcccccatgatcatccacggcattaagacacagggagcgaggcagaaattctcctccctctacatctcacagttcattattatgtatagtttggacggcaagaagtggcaaacttatagaggtaacagtactggaacagacatggtgttcttcggcaacgttgatagctctggcatcaaacacaacatctttaatcctcccataatagctcggtacatcagattgcatccgacccactacagcattaggagtacactccgaatggagcttatgggttgcgacttgaattcctgttcaatgccactcggaatggagtctaaagccatctctgatgcacagataaccgccagtagctactttacgaacatgtttgctacgtggtcaccctctaaggcaaggcttcatttgcaaggccggtctaatgcctggagacctcaggtgaacaacccgaaagaatggctccaggtggactttcagaagaccatgaaagtaacaggtgtcactactcagggagttaagtccttggatactagcatgtatgtgaaggagttccttatttcctcatcacaagatggccaccagtggaccctcttctttcagaatggtaaggtcaaagtgtttcagggcaatcaagacagcttcacacccgtggtgaacagtcttgatcctccactcttgacacgataccttcgaatccatccacagtcttgggagcaccagattgcattgcgcatggaagtacttggatgcgaggctcaggacctctac

SEQ ID NO: 1084 - protein, 1457 aa, synthetic construct
  REGION 1..1457: note = Variant of human B-domain deleted Factor VIII
MQIELSTCFFLCLLRFCFSATRRYYLGAVELSWDYMQSDLGELPVDARFPPRVPKSFPFNTSVVYKKTLFVEFTDHLFNIAKPRPPWMGLLGPTIQAEVYDTVVITLKNMASHPVSLHAVGVSYWKASEGAEYDDQTSQREKEDDKVFPGGSHTYVWQVLKENGPMASDPPCLTYSYLSHVDLVKDLNSGLIGALLVCREGSLAKEKTQTLHKFILLFAVFDEGKSWHSETKNSLMQDRDAASARAWPKMHTVNGYVNRTLPGLIGCHRKSVYWHVIGMGTTPEVHSIFLEGHTFLVRNHRQASLGISPITFLTAQTLLMDLGQFLLFCHIPSHQHDGMEAYVKVDSCPEEPQLRMKNNEEAEDYDDDLTDSEMDVVRFDDDNSPSIIQARSVAKKHPKTWVHYIAAEEEDWDYAPLVLAPDDRSYKSQYLNNGPQRIGRKYKKVRFMAYTDETFKTREAIQHESGILGPLLYGEVGDTLLIIFKNQASRPYNIYPHGITDVRPLYSRRLPKGVKHLKDFPILPGEIFKYKWTVTVEDGPTKSDPRCLTRYYSSGVNMERDLASGLIGPLLICYKESVDQRGNQIMSDKRNVILFSVFDENRSWYLTENIQRFLPNPAGVQLEDPEFQASNIMHSINGYVFDSLQLSVCLHEVAYWYILSIGAQTDFLSVFFSGYTFKHKMVYEDTLTLFPFSGETVFMSMENPGLWILGCHNSDFRNRGMTALLKVSSCDKNTGDYYEDSYEDISAYFDSKNNAIEPRSFSQNPPVLKRHQREITRTTLQSDQEEIDYDDTISVEMKKEDFDIYDEDENQSPRSFQKKTRHYFIAAVERLWDYGMSSSPHVLRNRAQSGSVPQFKKVVFQEFTDGSFTQPLYRGELNEHLGLLGPYIRAEVEDNIMVTFRNQASRPYSFYSSLISYEEDQRQGAEPRKNFVKPNETKTYFWKVQHHMAPTKDEFDCKAWAYFSDVDLEKDVHSGLIGPLLVCHTNTLNPAHGRQVTVQEFALFFTIFDETKSWYFTENMERNCRAPCNIQMEDPTFKENYRFHAINGYIMDTLPGLVMAQDQRIRWYLLSMGSNENIHSIHFSGHVFTVRKKEEYKMALYNLYPGVFETVEMLPSKAGIWRVECLIGEHLHAGMSTLFLVYSNKCQTPLGMASGHIRDFQITASGQYGQWAPKLARLHYSGSINAWSTKEPFSWIKVDLLAPMIIHGIKTQGARQKFSSLYISQFIIMYSLDGKKWQTYRGNSTGTDMVFFGNVDSSGIKHNIFNPPIIARYIRLHPTHYSIRSTLRMELMGCDLNSCSMPLGMESKAISDAQITASSYFTNMFATWSPSKARLHLQGRSNAWRPQVNNPKEWLQVDFQKTMKVTGVTTQGVKSLDTSMYVKEFLISSSQDGHQWTLFFQNGKVKVFQGNQDSFTPVVNSLDPPLLTRYLRIHPQSWEHQIALRMEVLGCEAQDLY

SEQ ID NO: 1085 - DNA, 4371 bp, synthetic construct
  misc_feature 1..4371: note = Variant of human B-domain deleted Factor VIII
  source 1..4371: mol_type = other DNA
atgcagattgaactgtctacctgcttcttcctctgtttgctgaggttctgctttagcgccactagacggtactaccttggcgctgtggagctgtcctgggactatatgcagagtgatttgggagagcttcccgtcgacgcacgatttcctcctcgcgttccaaagtcatttccctttaacacaagcgtggtgtacaagaagacgctcttcgtcgaattcaccgatcacctgttcaatatcgccaaacccagaccaccatggatgggtcttttggggcctaccatacaagcggaggtgtatgacacagttgttatcactctcaagaacatggcttctcatccggtaagtcttcacgcagtgggcgtgtcctactggaaagcttcagaaggagccgagtatgatgatcagacatcccagagggagaaagaagacgacaaggtatttccaggtgggtctcatacctatgtgtggcaagtgctcaaagagaatggccctatggcaagcgatccgccgtgtttgacttacagctacctttcacacgttgacctcgtcaaggacctcaactccgggttgattggagccttgttggtatgcagggaaggatctcttgccaaagagaagacacagacccggcacaagtttatccttctctttgctgtgttcgatgagggcaaaagttggcatagcgaaacgaagaattccctcatgcaggatcgcgacgcagccagcgccagagcttggcccaagatgcacactgtgaacggatatgtcaataggacgcttcctggcttgattgggtgtcatcggaaaagtgtctactggcacgtgatcggaatggggacaacaccagaggtccactccatatttctcgaaggccataccttccttgttcgaaaccacagacaggcatccttggggatctctcccattacctttctcactgcccaaacgctccttatggacttgggtcagttccttctcttttgccatatcccgtcacaccagcatgatggtatggaagcttatgtgaaagtcgacagttgtcctgaggagccacagttgcgcatgaagaataatgaagaagccgaggattacgacgacgatctcaccgattctgagatggacgtggtgaggtttgatgacgacaactctccctccatcattcaagctcggagcgtggcgaagaaacaccccaagacttgggtccactatatagcggcggaagaggaggattgggattacgctcctcttgtattggcaccagatgaccgctcatacaaaagccagtacctcaacaacggaccgcagagaattggccggaagtataagaaagtgcgatttatggcctatacagacgaaacctttaagacaagggaggccatccagcatgagagtgggattttgggacctcttctttacggcgaagttggtgataccctcctcatcatcttcaagaatcaagcttctcgcccctataacatttacccacacgggatcactgacgttaggcctttgtatagcagaagacttcccaaaggcgtgaagcatctcaaagacttccccattttgccaggcgagatctttaagtacaaatggaccgtcacagtggaagatggaccgactaaatcagaccctcgatgccttacgcggtactattcctccttcgtgaatatggagagagatttggcaagcggactcataggaccactcctcatctgttacaaggaatctgtagaccagaggggtaaccagattatgagtgataaacgcaatgtgatcctttttagcgtcttcgacgagaaccggtcctggtacttgaccgagaatatacaaaggttccttcccaaccccgcaggcgttcagttggaagaccctgagtttcaggccagcaatattatgcactcaatcaacggctatgtgtttgatagtctccagctttctgtttgcctccatgaagtagcctattggtacatcttgtcaattggtgctcaaacagacttcctctccgtcttcttctccggctacacctttaagcacaagatggtgtatgaggacactctcacactctttccattttctggagaaaccgtgttcatgagcatggagaatccaggcctttggatcttgggttgccacaacagtgattttcgcaatcggggaatgactgctctcctcaaagtcagcagctgtgataagaacacaggcgactattacgaagattcttacgaggacataagtgcctactttgactccaagaataacgccattgagcccagatcattctcccagaatcctcccgtgcttaaaaggcatcagcgcgaaatcaccagaactactcttcagtctgatcaagaggagattgactatgacgacaccataagcgtggaaatgaagaaggaggatttcgatatctatgacgaagatgagaaccagtctccgcggagctttcagaagaagacgcgacactacttcattgcagcagtcgaaaggctttgggactacggtatgtcatcatcccctcatgtgttgcgcaatagagctcagagtggaagtgttccacagttcaagaaagtcgtctttcaagagtttacagatggcagcttcacacagcctctctatcggggcgagcttaacgaacatttgggactccttggtccctatatccgagccgaagtggaggacaacattatggttacctttaggaatcaagcctctcgcccctacagcttctactcctccctcatcagttatgaggaggatcagagacaaggcgctgaaccacggaagaactttgtgaaaccgaatgagacgaagacctacttctggaaagtacagcaccacatggcccccacaaaagacgaattcgattgcaaagcatgggcgtatttttcagacgttgacttggagaaagatgtacattcaggacttattggtcctttgttggtgtgtcacactaacactctcaatccagcccatggcaggcaggtgacagtccaggaattcgctcttttctttaccatctttgatgagaccaagtcctggtacttcacggaaaacatggagcgcaattgcagagccccctgtaacatacagatggaggaccctacctttaaggaaaattatcggttccacgcaatcaacggatacattatggatacactccctggccttgtgatggctcaggaccaacgaatcaggtggtacctcctcagcatgggttctaatgagaacatacactccattcacttttcaggacatgtgttcactgtccggaagaaagaagagtataagatggccctctacaatttgtatccaggcgtgtttgagaccgttgaaatgcttccctctaaagctggcatctggagagtagagtgcttgatcggagaacatcttcacgcaggtatgagcaccttgttcctcgtgtacagcaacaaatgtcagaccccacttggcatggccagtggacacattcgcgactttcagatcacagcatctggccagtatggacaatgggccccaaagttggctcgcctccattactccggtagcataaatgcgtggtccactaaagaacctttcagctggattaaggtcgatcttcttgcccccatgatcatccacggcattaagacacagggagcgaggcagaaattctcctccctctacatctcacagttcattattatgtatagtttggacggcaagaagtggcaaacttatagaggtaacagtactggaacagacatggtgttcttcggcaacgttgatagctctggcatcaaacacaacatctttaatcctcccataatagctcggtacatcagattgcatccgacccactacagcattaggagtacactccgaatggagcttatgggttgcgacttgaattcctgttcaatgccactcggaatggagtctaaagccatctctgatgcacagataaccgccagtagctactttacgaacatgtttgctacgtggtcaccctctaaggcaaggcttcatttgcaaggccggtctaatgcctggagacctcaggtgaacaacccgaaagaatggctccaggtggactttcagaagaccatgaaagtaacaggtgtcactactcagggagttaagtccttggatactagcatgtatgtgaaggagttccttatttcctcatcacaagatggccaccagtggaccctcttctttcagaatggtaaggtcaaagtgtttcagggcaatcaagacagcttcacacccgtggtgaacagtcttgatcctccactcttgacacgataccttcgaatccatccacagtcttgggagcaccagattgcattgcgcatggaagtacttggatgcgaggctcaggacctctac

SEQ ID NO: 1086 - protein, 1457 aa, synthetic construct
  REGION 1..1457: note = Variant of human B-domain deleted Factor VIII
MQIELSTCFFLCLLRFCFSATRRYYLGAVELSWDYMQSDLGELPVDARFPPRVPKSFPFNTSVVYKKTLFVEFTDHLFNIAKPRPPWMGLLGPTIQAEVYDTVVITLKNMASHPVSLHAVGVSYWKASEGAEYDDQTSQREKEDDKVFPGGSHTYVWQVLKENGPMASDPPCLTYSYLSHVDLVKDLNSGLIGALLVCREGSLAKEKTQTRHKFILLFAVFDEGKSWHSETKNSLMQDRDAASARAWPKMHTVNGYVNRTLPGLIGCHRKSVYWHVIGMGTTPEVHSIFLEGHTFLVRNHRQASLGISPITFLTAQTLLMDLGQFLLFCHIPSHQHDGMEAYVKVDSCPEEPQLRMKNNEEAEDYDDDLTDSEMDVVRFDDDNSPSIIQARSVAKKHPKTWVHYIAAEEEDWDYAPLVLAPDDRSYKSQYLNNGPQRIGRKYKKVRFMAYTDETFKTREAIQHESGILGPLLYGEVGDTLLIIFKNQASRPYNIYPHGITDVRPLYSRRLPKGVKHLKDFPILPGEIFKYKWTVTVEDGPTKSDPRCLTRYYSSFVNMERDLASGLIGPLLICYKESVDQRGNQIMSDKRNVILFSVFDENRSWYLTENIQRFLPNPAGVQLEDPEFQASNIMHSINGYVFDSLQLSVCLHEVAYWYILSIGAQTDFLSVFFSGYTFKHKMVYEDTLTLFPFSGETVFMSMENPGLWILGCHNSDFRNRGMTALLKVSSCDKNTGDYYEDSYEDISAYFDSKNNAIEPRSFSQNPPVLKRHQREITRTTLQSDQEEIDYDDTISVEMKKEDFDIYDEDENQSPRSFQKKTRHYFIAAVERLWDYGMSSSPHVLRNRAQSGSVPQFKKVVFQEFTDGSFTQPLYRGELNEHLGLLGPYIRAEVEDNIMVTFRNQASRPYSFYSSLISYEEDQRQGAEPRKNFVKPNETKTYFWKVQHHMAPTKDEFDCKAWAYFSDVDLEKDVHSGLIGPLLVCHTNTLNPAHGRQVTVQEFALFFTIFDETKSWYFTENMERNCRAPCNIQMEDPTFKENYRFHAINGYIMDTLPGLVMAQDQRIRWYLLSMGSNENIHSIHFSGHVFTVRKKEEYKMALYNLYPGVFETVEMLPSKAGIWRVECLIGEHLHAGMSTLFLVYSNKCQTPLGMASGHIRDFQITASGQYGQWAPKLARLHYSGSINAWSTKEPFSWIKVDLLAPMIIHGIKTQGARQKFSSLYISQFIIMYSLDGKKWQTYRGNSTGTDMVFFGNVDSSGIKHNIFNPPIIARYIRLHPTHYSIRSTLRMELMGCDLNSCSMPLGMESKAISDAQITASSYFTNMFATWSPSKARLHLQGRSNAWRPQVNNPKEWLQVDFQKTMKVTGVTTQGVKSLDTSMYVKEFLISSSQDGHQWTLFFQNGKVKVFQGNQDSFTPVVNSLDPPLLTRYLRIHPQSWEHQIALRMEVLGCEAQDLY

SEQ ID NO: 1087 - DNA, 4371 bp, synthetic construct
  misc_feature 1..4371: note = Variant of human B-domain deleted Factor VIII
  source 1..4371: mol_type = other DNA
atgcagattgaactgtctacctgcttcttcctctgtttgctgaggttctgctttagcgccactagacggtactaccttggcgctgtggagctgtcctgggactatatgcagagtgatttgggagagcttcccgtcgacgcacgatttcctcctcgcgttccaaagtcatttccctttaacacaagcgtgggttacaagaagacgctcttcgtcgaattcaccgatcacctgttcaatatcgccaaacccagaccaccatggatgggtcttttggggcctaccatacaagcggaggtgtatgacacagttgttatcactctcaagaacatggcttctcatccggtaagtcttcacgcagtgggcgtgtcctactggaaagcttcagaaggagccgagtatgatgatcagacatcccagagggagaaagaagacgacaaggtatttccaggtgggtctcatacctatgtgtggcaagtgctcaaagagaatggccctatggcaagcgatccgccgtgtttgacttacagctacctttcacacgttgacctcgtcaaggacctcaactccgggttgattggagccttgttggtatgcagggaaggatctcttgccaaagagaagacacagaccctccacaagtttatccttctctttgctgtgttcgatgagggcaaaagttggcatagcgaaacgaagaattccctcatgcaggatcgcgacgcagccagcgccagagcttggcccaagatgcacactgtgaacggatatgtcaataggacgcttcctggcttgattgggtgtcatcggaaaagtgtctactggcacgtgatcggaatggggacaacaccagaggtccactccatatttctcgaaggccataccttccttgttcgaaaccacagacaggcatccttggggatctctcccattacctttctcactgcccaaacgctccttatggacttgggtcagttccttctcttttgccatatcccgtcacaccagcatgatggtatggaagcttatgtgaaagtcgacagttgtcctgaggagccacagttgcgcatgaagaataatgaagaagccgaggattacgacgacgatctcaccgattctgagatggacgtggtgaggtttgatgacgacaactctccctccatcattcaagctcggagcgtggcgaagaaacaccccaagacttgggtccactatatagcggcggaagaggaggattgggattacgctcctcttgtattggcaccagatgaccgctcatacaaaagccagtacctcaacaacggaccgcagagaattggccggaagtataagaaagtgcgatttatggcctatacagacgaaacctttaagacaagggaggccatccagcatgagagtgggattttgggacctcttctttacggcgaagttggtgataccctcctcatcatcttcaagaatcaagcttctcgcccctataacatttacccacacgggatcactgacgttaggcctttgtatagcagaagacttcccaaaggcgtgaagcatctcaaagacttccccattttgccaggcgagatctttaagtacaaatggaccgtcacagtggaagatggaccgactaaatcagaccctcgatgccttacgcggtactattcctccttcgtgaatatggagagagatttggcaagcggactcataggaccactcctcatctgttacaaggaatctgtagaccagaggggtaaccagattatgagtgataaacgcaatgtgatcctttttagcgtcttcgacgagaaccggtcctggtacttgaccgagaatatacaaaggttccttcccaaccccgcaggcgttcagttggaagaccctgagtttcaggccagcaatattatgcactcaatcaacggctatgtgtttgatagtctccagctttctgtttgcctccatgaagtagcctattggtacatcttgtcaattggtgctcaaacagacttcctctccgtcttcttctccggctacacctttaagcacaagatggtgtatgaggacactctcacactctttccattttctggagaaaccgtgttcatgagcatggagaatccaggcctttggatcttgggttgccacaacagtgattttcgcaatcggggaatgactgctctcctcaaagtcagcagctgtgataagaacacaggcgactattacgaagattcttacgaggacataagtgcctactttgactccaagaataacgccattgagcccagatcattctcccagaatcctcccgtgcttaaaaggcatcagcgcgaaatcaccagaactactcttcagtctgatcaagaggagattgactatgacgacaccataagcgtggaaatgaagaaggaggatttcgatatctatgacgaagatgagaaccagtctccgcggagctttcagaagaagacgcgacactacttcattgcagcagtcgaaaggctttgggactacggtatgtcatcatcccctcatgtgttgcgcaatagagctcagagtggaagtgttccacagttcaagaaagtcgtctttcaagagtttacagatggcagcttcacacagcctctctatcggggcgagcttaacgaacatttgggactccttggtccctatatccgagccgaagtggaggacaacattatggttacctttaggaatcaagcctctcgcccctacagcttctactcctccctcatcagttatgaggaggatcagagacaaggcgctgaaccacggaagaactttgtgaaaccgaatgagacgaagacctacttctggaaagtacagcaccacatggcccccacaaaagacgaattcgattgcaaagcatgggcgtatttttcagacgttgacttggagaaagatgtacattcaggacttattggtcctttgttggtgtgtcacactaacactctcaatccagcccatggcaggcaggtgacagtccaggaattcgctcttttctttaccatctttgatgagaccaagtcctggtacttcacggaaaacatggagcgcaattgcagagccccctgtaacatacagatggaggaccctacctttaaggaaaattatcggttccacgcaatcaacggatacattatggatacactccctggccttgtgatggctcaggaccaacgaatcaggtggtacctcctcagcatgggttctaatgagaacatacactccattcacttttcaggacatgtgttcactgtccggaagaaagaagagtataagatggccctctacaatttgtatccaggcgtgtttgagaccgttgaaatgcttccctctaaagctggcatctggagagtagagtgcttgatcggagaacatcttcacgcaggtatgagcaccttgttcctcgtgtacagcaacaaatgtcagaccccacttggcatggccagtggacacattcgcgactttcagatcacagcatctggccagtatggacaatgggccccaaagttggctcgcctccattactccggtagcataaatgcgtggtccactaaagaacctttcagctggattaaggtcgatcttcttgcccccatgatcatccacggcattaagacacagggagcgaggcagaaattctcctccctctacatctcacagttcattattatgtatagtttggacggcaagaagtggcaaacttatagaggtaacagtactggaacagacatggtgttcttcggcaacgttgatagctctggcatcaaacacaacatctttaatcctcccataatagctcggtacatcagattgcatccgacccactacagcattaggagtacactccgaatggagcttatgggttgcgacttgaattcctgttcaatgccactcggaatggagtctaaagccatctctgatgcacagataaccgccagtagctactttacgaacatgtttgctacgtggtcaccctctaaggcaaggcttcatttgcaaggccggtctaatgcctggagacctcaggtgaacaacccgaaagaatggctccaggtggactttcagaagaccatgaaagtaacaggtgtcactactcagggagttaagtccttggatactagcatgtatgtgaaggagttccttatttcctcatcacaagatggccaccagtggaccctcttctttcagaatggtaaggtcaaagtgtttcagggcaatcaagacagcttcacacccgtggtgaacagtcttgatcctccactcttgacacgataccttcgaatccatccacagtcttgggagcaccagattgcattgcgcatggaagtacttggatgcgaggctcaggacctctac

SEQ ID NO: 1088 - protein, 1457 aa, synthetic construct
  REGION 1..1457: note = Variant of human B-domain deleted Factor VIII
MQIELSTCFFLCLLRFCFSATRRYYLGAVELSWDYMQSDLGELPVDARFPPRVPKSFPFNTSVGYKKTLFVEFTDHLFNIAKPRPPWMGLLGPTIQAEVYDTVVITLKNMASHPVSLHAVGVSYWKASEGAEYDDQTSQREKEDDKVFPGGSHTYVWQVLKENGPMASDPPCLTYSYLSHVDLVKDLNSGLIGALLVCREGSLAKEKTQTLHKFILLFAVFDEGKSWHSETKNSLMQDRDAASARAWPKMHTVNGYVNRTLPGLIGCHRKSVYWHVIGMGTTPEVHSIFLEGHTFLVRNHRQASLGISPITFLTAQTLLMDLGQFLLFCHIPSHQHDGMEAYVKVDSCPEEPQLRMKNNEEAEDYDDDLTDSEMDVVRFDDDNSPSIIQARSVAKKHPKTWVHYIAAEEEDWDYAPLVLAPDDRSYKSQYLNNGPQRIGRKYKKVRFMAYTDETFKTREAIQHESGILGPLLYGEVGDTLLIIFKNQASRPYNIYPHGITDVRPLYSRRLPKGVKHLKDFPILPGEIFKYKWTVTVEDGPTKSDPRCLTRYYSSFVNMERDLASGLIGPLLICYKESVDQRGNQIMSDKRNVILFSVFDENRSWYLTENIQRFLPNPAGVQLEDPEFQASNIMHSINGYVFDSLQLSVCLHEVAYWYILSIGAQTDFLSVFFSGYTFKHKMVYEDTLTLFPFSGETVFMSMENPGLWILGCHNSDFRNRGMTALLKVSSCDKNTGDYYEDSYEDISAYFDSKNNAIEPRSFSQNPPVLKRHQREITRTTLQSDQEEIDYDDTISVEMKKEDFDIYDEDENQSPRSFQKKTRHYFIAAVERLWDYGMSSSPHVLRNRAQSGSVPQFKKVVFQEFTDGSFTQPLYRGELNEHLGLLGPYIRAEVEDNIMVTFRNQASRPYSFYSSLISYEEDQRQGAEPRKNFVKPNETKTYFWKVQHHMAPTKDEFDCKAWAYFSDVDLEKDVHSGLIGPLLVCHTNTLNPAHGRQVTVQEFALFFTIFDETKSWYFTENMERNCRAPCNIQMEDPTFKENYRFHAINGYIMDTLPGLVMAQDQRIRWYLLSMGSNENIHSIHFSGHVFTVRKKEEYKMALYNLYPGVFETVEMLPSKAGIWRVECLIGEHLHAGMSTLFLVYSNKCQTPLGMASGHIRDFQITASGQYGQWAPKLARLHYSGSINAWSTKEPFSWIKVDLLAPMIIHGIKTQGARQKFSSLYISQFIIMYSLDGKKWQTYRGNSTGTDMVFFGNVDSSGIKHNIFNPPIIARYIRLHPTHYSIRSTLRMELMGCDLNSCSMPLGMESKAISDAQITASSYFTNMFATWSPSKARLHLQGRSNAWRPQVNNPKEWLQVDFQKTMKVTGVTTQGVKSLDTSMYVKEFLISSSQDGHQWTLFFQNGKVKVFQGNQDSFTPVVNSLDPPLLTRYLRIHPQSWEHQIALRMEVLGCEAQDLY

SEQ ID NO: 1089 - DNA, 4371 bp, synthetic construct
  misc_feature 1..4371: note = Variant of human B-domain deleted Factor VIII
  source 1..4371: mol_type = other DNA
atgcagattgaactgtctacctgcttcttcctctgtttgctgaggttctgctttagcgccactagacggtactaccttggcgctgtggagctgtcctgggactatatgcagagtgatttgggagagcttcccgtcgacgcacgatttcctcctcgcgttccaaagtcatttccctttaacacaagcgtggtgtacaagaagacgctcttcgtcgaattcaccgatcacctgttcaatatcgccaaacccagaccaccatggatgggtcttttggggcctaccatacaagcggaggtgtatgacacagttgttatcactctcaagaacatggcttctcatccggtaagtcttcacgcagtgggcgtgtcctactggaaagcttcagaaggagccgagtatgatgatcagacatcccagagggagaaagaagacgacaaggtatttccaggtgggtctcatacctatgtgtggcaagtgctcaaagagaatggccctatggcaagcgatccgccgtgtttgacttacagctacctttcacacgttgacctcgtcaaggacctcaactccgggttgattggagccttgttggtatgcagggaaggatctcttgccaaagagaagacacagaccctccacaagtttatccttctctttgctgtgttcgatgagggcaaaagttggcatagcgaaacgaagaattccctcatgcaggatcgcgacgcagccagcgccagagcttggcccaagatgcacactgtgaacggatatgtcaataggacgcttcctggcttgattgggtgtcatcggaaaagtgtctactggcacgtgatcggaatggggacaacaccagaggtccactccatatttctcgaaggccataccttccttgttcgaaaccacagacaggcatccttggggatctctcccattacctttctcactgcccaaacgctccttagggacttgggtcagttccttctcttttgccatatcccgtcacaccagcatgatggtatggaagcttatgtgaaagtcgacagttgtcctgaggagccacagttgcgcatgaagaataatgaagaagccgaggattacgacgacgatctcaccgattctgagatggacgtggtgaggtttgatgacgacaactctccctccatcattcaagctcggagcgtggcgaagaaacaccccaagacttgggtccactatatagcggcggaagaggaggattgggattacgctcctcttgtattggcaccagatgaccgctcatacaaaagccagtacctcaacaacggaccgcagagaattggccggaagtataagaaagtgcgatttatggcctatacagacgaaacctttaagacaagggaggccatccagcatgagagtgggattttgggacctcttctttacggcgaagttggtgataccctcctcatcatcttcaagaatcaagcttctcgcccctataacatttacccacacgggatcactgacgttaggcctttgtatagcagaagacttcccaaaggcgtgaagcatctcaaagacttccccattttgccaggcgagatctttaagtacaaatggaccgtcacagtggaagatggaccgactaaatcagaccctcgatgccttacgcggtactattcctccttcgtgaatatggagagagatttggcaagcggactcataggaccactcctcatctgttacaaggaatctgtagaccagaggggtaaccagattatgagtgataaacgcaatgtgatcctttttagcgtcttcgacgagaaccggtcctggtacttgaccgagaatatacaaaggttccttcccaaccccgcaggcgttcagttggaagaccctgagtttcaggccagcaatattatgcactcaatcaacggctatgtgtttgatagtctccagctttctgtttgcctccatgaagtagcctattggtacatcttgtcaattggtgctcaaacagacttcctctccgtcttcttctccggctacacctttaagcacaagatggtgtatgaggacactctcacactctttccattttctggagaaaccgtgttcatgagcatggagaatccaggcctttggatcttgggttgccacaacagtgattttcgcaatcggggaatgactgctctcctcaaagtcagcagctgtgataagaacacaggcgactattacgaagattcttacgaggacataagtgcctactttgactccaagaataacgccattgagcccagatcattctcccagaatcctcccgtgcttaaaaggcatcagcgcgaaatcaccagaactactcttcagtctgatcaagaggagattgactatgacgacaccataagcgtggaaatgaagaaggaggatttcgatatctatgacgaagatgagaaccagtctccgcggagctttcagaagaagacgcgacactacttcattgcagcagtcgaaaggctttgggactacggtatgtcatcatcccctcatgtgttgcgcaatagagctcagagtggaagtgttccacagttcaagaaagtcgtctttcaagagtttacagatggcagcttcacacagcctctctatcggggcgagcttaacgaacatttgggactccttggtccctatatccgagccgaagtggaggacaacattatggttacctttaggaatcaagcctctcgcccctacagcttctactcctccctcatcagttatgaggaggatcagagacaaggcgctgaaccacggaagaactttgtgaaaccgaatgagacgaagacctacttctggaaagtacagcaccacatggcccccacaaaagacgaattcgattgcaaagcatgggcgtatttttcagacgttgacttggagaaagatgtacattcaggacttattggtcctttgttggtgtgtcacactaacactctcaatccagcccatggcaggcaggtgacagtccaggaattcgctcttttctttaccatctttgatgagaccaagtcctggtacttcacggaaaacatggagcgcaattgcagagccccctgtaacatacagatggaggaccctacctttaaggaaaattatcggttccacgcaatcaacggatacattatggatacactccctggccttgtgatggctcaggaccaacgaatcaggtggtacctcctcagcatgggttctaatgagaacatacactccattcacttttcaggacatgtgttcactgtccggaagaaagaagagtataagatggccctctacaatttgtatccaggcgtgtttgagaccgttgaaatgcttccctctaaagctggcatctggagagtagagtgcttgatcggagaacatcttcacgcaggtatgagcaccttgttcctcgtgtacagcaacaaatgtcagaccccacttggcatggccagtggacacattcgcgactttcagatcacagcatctggccagtatggacaatgggccccaaagttggctcgcctccattactccggtagcataaatgcgtggtccactaaagaacctttcagctggattaaggtcgatcttcttgcccccatgatcatccacggcattaagacacagggagcgaggcagaaattctcctccctctacatctcacagttcattattatgtatagtttggacggcaagaagtggcaaacttatagaggtaacagtactggaacagacatggtgttcttcggcaacgttgatagctctggcatcaaacacaacatctttaatcctcccataatagctcggtacatcagattgcatccgacccactacagcattaggagtacactccgaatggagcttatgggttgcgacttgaattcctgttcaatgccactcggaatggagtctaaagccatctctgatgcacagataaccgccagtagctactttacgaacatgtttgctacgtggtcaccctctaaggcaaggcttcatttgcaaggccggtctaatgcctggagacctcaggtgaacaacccgaaagaatggctccaggtggactttcagaagaccatgaaagtaacaggtgtcactactcagggagttaagtccttggatactagcatgtatgtgaaggagttccttatttcctcatcacaagatggccaccagtggaccctcttctttcagaatggtaaggtcaaagtgtttcagggcaatcaagacagcttcacacccgtggtgaacagtcttgatcctccactcttgacacgataccttcgaatccatccacagtcttgggagcaccagattgcattgcgcatggaagtacttggatgcgaggctcaggacctctac

SEQ ID NO: 1090 - protein, 1457 aa, synthetic construct
  REGION 1..1457: note = Variant of human B-domain deleted Factor VIII
MQIELSTCFFLCLLRFCFSATRRYYLGAVELSWDYMQSDLGELPVDARFPPRVPKSFPFNTSVVYKKTLFVEFTDHLFNIAKPRPPWMGLLGPTIQAEVYDTVVITLKNMASHPVSLHAVGVSYWKASEGAEYDDQTSQREKEDDKVFPGGSHTYVWQVLKENGPMASDPPCLTYSYLSHVDLVKDLNSGLIGALLVCREGSLAKEKTQTLHKFILLFAVFDEGKSWHSETKNSLMQDRDAASARAWPKMHTVNGYVNRTLPGLIGCHRKSVYWHVIGMGTTPEVHSIFLEGHTFLVRNHRQASLGISPITFLTAQTLLRDLGQFLLFCHIPSHQHDGMEAYVKVDSCPEEPQLRMKNNEEAEDYDDDLTDSEMDVVRFDDDNSPSIIQARSVAKKHPKTWVHYIAAEEEDWDYAPLVLAPDDRSYKSQYLNNGPQRIGRKYKKVRFMAYTDETFKTREAIQHESGILGPLLYGEVGDTLLIIFKNQASRPYNIYPHGITDVRPLYSRRLPKGVKHLKDFPILPGEIFKYKWTVTVEDGPTKSDPRCLTRYYSSFVNMERDLASGLIGPLLICYKESVDQRGNQIMSDKRNVILFSVFDENRSWYLTENIQRFLPNPAGVQLEDPEFQASNIMHSINGYVFDSLQLSVCLHEVAYWYILSIGAQTDFLSVFFSGYTFKHKMVYEDTLTLFPFSGETVFMSMENPGLWILGCHNSDFRNRGMTALLKVSSCDKNTGDYYEDSYEDISAYFDSKNNAIEPRSFSQNPPVLKRHQREITRTTLQSDQEEIDYDDTISVEMKKEDFDIYDEDENQSPRSFQKKTRHYFIAAVERLWDYGMSSSPHVLRNRAQSGSVPQFKKVVFQEFTDGSFTQPLYRGELNEHLGLLGPYIRAEVEDNIMVTFRNQASRPYSFYSSLISYEEDQRQGAEPRKNFVKPNETKTYFWKVQHHMAPTKDEFDCKAWAYFSDVDLEKDVHSGLIGPLLVCHTNTLNPAHGRQVTVQEFALFFTIFDETKSWYFTENMERNCRAPCNIQMEDPTFKENYRFHAINGYIMDTLPGLVMAQDQRIRWYLLSMGSNENIHSIHFSGHVFTVRKKEEYKMALYNLYPGVFETVEMLPSKAGIWRVECLIGEHLHAGMSTLFLVYSNKCQTPLGMASGHIRDFQITASGQYGQWAPKLARLHYSGSINAWSTKEPFSWIKVDLLAPMIIHGIKTQGARQKFSSLYISQFIIMYSLDGKKWQTYRGNSTGTDMVFFGNVDSSGIKHNIFNPPIIARYIRLHPTHYSIRSTLRMELMGCDLNSCSMPLGMESKAISDAQITASSYFTNMFATWSPSKARLHLQGRSNAWRPQVNNPKEWLQVDFQKTMKVTGVTTQGVKSLDTSMYVKEFLISSSQDGHQWTLFFQNGKVKVFQGNQDSFTPVVNSLDPPLLTRYLRIHPQSWEHQIALRMEVLGCEAQDLY

SEQ ID NO: 1091 - DNA, 4371 bp, synthetic construct
  misc_feature 1..4371: note = Variant of human B-domain deleted Factor VIII
  source 1..4371: mol_type = other DNA
atgcagattgaactgtctacctgcttcttcctctgtttgctgaggttctgctttagcgccactagacggtactaccttggcgctgtggagctgtcctgggactatatgcagagtgatttgggagagcttcccgtcgacgcacgatttcctcctcgcgttccaaagtcatttccctttaacacaagcgtggtgtacaagaagacgctcttcgtcgaattcaccgatcacctgttcaatatcgccaaacccagaccaccatggatgggtcttttggggcctaccatacaagcggaggtgtatgacacagttgttatcactctcaagaacatggcttctcatccggtaagtcttcacgcagtgggcgtgtcctactggaaagcttcagaaggagccgagtatgatgatcagacatcccagagggagaaagaagacgacaaggtatttccaggtgggtctcatacctatgtgtggcaagtgctcaaagagaatggccctatggcaagcgatccgccgtgtttgacttacagctacctttcacacgttgacctcgtcaaggacctcaactccgggttgattggagccttgttggtatgcagggaaggatctcttgccaaagagaagacacagaccctccacaagtttatccttctctttgctgtgttcgatgagggcaaaagttggcatagcgaaacgaagaattccctcatgcaggatcgcgacgcagccagcgccagagcttggcccaagatgcacactgtgaacggatatgtcaataggacgcttcctggcttgattgggtgtcatcggaaaagtgtctactggcacgtgatcggaatggggacaacaccagaggtccactccatatttctcgaaggccataccttccttgttcgaaaccacagacaggcatccttggggatctctcccattacctttctcactgcccaaacgctccttatggacttgggtcagttccttctcttttgccatatcccgtcacaccagcatgatggtatggaagcttatgtgaaagtcgacagttgtcctgaggagccacagttgcgcatgaagaataatgaagaagccgaggattacgacgacgatctcaccgattctgagatggacgtggtgaggtttgatgacgacaactctccctccatcattcaagctcggagcgtggcgaagaaacaccccaagacttgggtccactatatagcggcggaagaggaggattgggattacgctcctcttgtattggcaccagatgaccgctcatacaaaagccagtacctcaacaacggaccgcagagaattggccggaagtataagaaagtgcgatttatggcctatacagacgaaacctttaagacaagggaggccatccagcatgagagtgggattttgggacctcttctttacggcgaagttggtgataccctcctcatcatcttcaagaatcaagcttctcgcccctataacatttacccacacgggatcactgacgttaggcctttgtatagcagaagacttcccaaaggcgtgaagcatctcaaagacttccccattttgccaggcgagatctttaagtacaaatggtatgtcacagtggaagatggaccgactaaatcagaccctcgatgccttacgcggtactattcctccttcgtgaatatggagagagatttggcaagcggactcataggaccactcctcatctgttacaaggaatctgtagaccagaggggtaaccagattatgagtgataaacgcaatgtgatcctttttagcgtcttcgacgagaaccggtcctggtacttgaccgagaatatacaaaggttccttcccaaccccgcaggcgttcagttggaagaccctgagtttcaggccagcaatattatgcactcaatcaacggctatgtgtttgatagtctccagctttctgtttgcctccatgaagtagcctattggtacatcttgtcaattggtgctcaaacagacttcctctccgtcttcttctccggctacacctttaagcacaagatggtgtatgaggacactctcacactctttccattttctggagaaaccgtgttcatgagcatggagaatccaggcctttggatcttgggttgccacaacagtgattttcgcaatcggggaatgactgctctcctcaaagtcagcagctgtgataagaacacaggcgactattacgaagattcttacgaggacataagtgcctactttgactccaagaataacgccattgagcccagatcattctcccagaatcctcccgtgcttaaaaggcatcagcgcgaaatcaccagaactactcttcagtctgatcaagaggagattgactatgacgacaccataagcgtggaaatgaagaaggaggatttcgatatctatgacgaagatgagaaccagtctccgcggagctttcagaagaagacgcgacactacttcattgcagcagtcgaaaggctttgggactacggtatgtcatcatcccctcatgtgttgcgcaatagagctcagagtggaagtgttccacagttcaagaaagtcgtctttcaagagtttacagatggcagcttcacacagcctctctatcggggcgagcttaacgaacatttgggactccttggtccctatatccgagccgaagtggaggacaacattatggttacctttaggaatcaagcctctcgcccctacagcttctactcctccctcatcagttatgaggaggatcagagacaaggcgctgaaccacggaagaactttgtgaaaccgaatgagacgaagacctacttctggaaagtacagcaccacatggcccccacaaaagacgaattcgattgcaaagcatgggcgtatttttcagacgttgacttggagaaagatgtacattcaggacttattggtcctttgttggtgtgtcacactaacactctcaatccagcccatggcaggcaggtgacagtccaggaattcgctcttttctttaccatctttgatgagaccaagtcctggtacttcacggaaaacatggagcgcaattgcagagccccctgtaacatacagatggaggaccctacctttaaggaaaattatcggttccacgcaatcaacggatacattatggatacactccctggccttgtgatggctcaggaccaacgaatcaggtggtacctcctcagcatgggttctaatgagaacatacactccattcacttttcaggacatgtgttcactgtccggaagaaagaagagtataagatggccctctacaatttgtatccaggcgtgtttgagaccgttgaaatgcttccctctaaagctggcatctggagagtagagtgcttgatcggagaacatcttcacgcaggtatgagcaccttgttcctcgtgtacagcaacaaatgtcagaccccacttggcatggccagtggacacattcgcgactttcagatcacagcatctggccagtatggacaatgggccccaaagttggctcgcctccattactccggtagcataaatgcgtggtccactaaagaacctttcagctggattaaggtcgatcttcttgcccccatgatcatccacggcattaagacacagggagcgaggcagaaattctcctccctctacatctcacagttcattattatgtatagtttggacggcaagaagtggcaaacttatagaggtaacagtactggaacagacatggtgttcttcggcaacgttgatagctctggcatcaaacacaacatctttaatcctcccataatagctcggtacatcagattgcatccgacccactacagcattaggagtacactccgaatggagcttatgggttgcgacttgaattcctgttcaatgccactcggaatggagtctaaagccatctctgatgcacagataaccgccagtagctactttacgaacatgtttgctacgtggtcaccctctaaggcaaggcttcatttgcaaggccggtctaatgcctggagacctcaggtgaacaacccgaaagaatggctccaggtggactttcagaagaccatgaaagtaacaggtgtcactactcagggagttaagtccttggatactagcatgtatgtgaaggagttccttatttcctcatcacaagatggccaccagtggaccctcttctttcagaatggtaaggtcaaagtgtttcagggcaatcaagacagcttcacacccgtggtgaacagtcttgatcctccactcttgacacgataccttcgaatccatccacagtcttgggagcaccagattgcattgcgcatggaagtacttggatgcgaggctcaggacctctac

SEQ ID NO: 1092 - protein, 1457 aa, synthetic construct
  REGION 1..1457: note = Variant of human B-domain deleted Factor VIII
MQIELSTCFFLCLLRFCFSATRRYYLGAVELSWDYMQSDLGELPVDARFPPRVPKSFPFNTSVVYKKTLFVEFTDHLFNIAKPRPPWMGLLGPTIQAEVYDTVVITLKNMASHPVSLHAVGVSYWKASEGAEYDDQTSQREKEDDKVFPGGSHTYVWQVLKENGPMASDPPCLTYSYLSHVDLVKDLNSGLIGALLVCREGSLAKEKTQTLHKFILLFAVFDEGKSWHSETKNSLMQDRDAASARAWPKMHTVNGYVNRTLPGLIGCHRKSVYWHVIGMGTTPEVHSIFLEGHTFLVRNHRQASLGISPITFLTAQTLLMDLGQFLLFCHIPSHQHDGMEAYVKVDSCPEEPQLRMKNNEEAEDYDDDLTDSEMDVVRFDDDNSPSIIQARSVAKKHPKTWVHYIAAEEEDWDYAPLVLAPDDRSYKSQYLNNGPQRIGRKYKKVRFMAYTDETFKTREAIQHESGILGPLLYGEVGDTLLIIFKNQASRPYNIYPHGITDVRPLYSRRLPKGVKHLKDFPILPGEIFKYKWYVTVEDGPTKSDPRCLTRYYSSFVNMERDLASGLIGPLLICYKESVDQRGNQIMSDKRNVILFSVFDENRSWYLTENIQRFLPNPAGVQLEDPEFQASNIMHSINGYVFDSLQLSVCLHEVAYWYILSIGAQTDFLSVFFSGYTFKHKMVYEDTLTLFPFSGETVFMSMENPGLWILGCHNSDFRNRGMTALLKVSSCDKNTGDYYEDSYEDISAYFDSKNNAIEPRSFSQNPPVLKRHQREITRTTLQSDQEEIDYDDTISVEMKKEDFDIYDEDENQSPRSFQKKTRHYFIAAVERLWDYGMSSSPHVLRNRAQSGSVPQFKKVVFQEFTDGSFTQPLYRGELNEHLGLLGPYIRAEVEDNIMVTFRNQASRPYSFYSSLISYEEDQRQGAEPRKNFVKPNETKTYFWKVQHHMAPTKDEFDCKAWAYFSDVDLEKDVHSGLIGPLLVCHTNTLNPAHGRQVTVQEFALFFTIFDETKSWYFTENMERNCRAPCNIQMEDPTFKENYRFHAINGYIMDTLPGLVMAQDQRIRWYLLSMGSNENIHSIHFSGHVFTVRKKEEYKMALYNLYPGVFETVEMLPSKAGIWRVECLIGEHLHAGMSTLFLVYSNKCQTPLGMASGHIRDFQITASGQYGQWAPKLARLHYSGSINAWSTKEPFSWIKVDLLAPMIIHGIKTQGARQKFSSLYISQFIIMYSLDGKKWQTYRGNSTGTDMVFFGNVDSSGIKHNIFNPPIIARYIRLHPTHYSIRSTLRMELMGCDLNSCSMPLGMESKAISDAQITASSYFTNMFATWSPSKARLHLQGRSNAWRPQVNNPKEWLQVDFQKTMKVTGVTTQGVKSLDTSMYVKEFLISSSQDGHQWTLFFQNGKVKVFQGNQDSFTPVVNSLDPPLLTRYLRIHPQSWEHQIALRMEVLGCEAQDLY

SEQ ID NO: 1093 - DNA, 4371 bp, synthetic construct
  misc_feature 1..4371: note = Variant of human B-domain deleted Factor VIII
  source 1..4371: mol_type = other DNA
atgcagattgaactgtctacctgcttcttcctctgtttgctgaggttctgctttagcgccactagacggtactaccttggcgctgtggagctgtcctgggactatatgcagagtgatttgggagagcttcccgtcgacgcacgatttcctcctcgcgttccaaagtcatttccctttaacacaagcgtggtgtacaagaagacgctcttcgtcgaattcaccgatcacctgttcaatatcgccaaacccagaccaccatggatgggtcttttggggcctaccatacaagcggaggtgtatgacacagttgttatcactctcaagaacatggcttctcatccggtaagtcttcacgcagtgggcgtgtcctactggaaagcttcagaaggagccgagtatgatgatcagacatcccagagggagaaagaagacgacaaggtatttccaggtgggtctcatacctatgtgtggcaagtgctcaaagagaatggccctatggcaagcgatccgccgtgtttgacttacagctacctttcacacgttgacctcgtcaaggacctcaactccgggttgattggagccttgttggtatgcagggaaggatctcttgccaaagagaagacacagaccctccacaagtttatccttctctttgctgtgttcgatgagggcaaaagttggcatagcgaaacgaagaattccctcatgcaggatcgcgacgcagccagcgccagagcttggcccaagatgcacactgtgaacggatatgtcaataggacgcttcctggcttgattgggtgtcatcggaaaagtgtctactggcacgtgatcggaatggggacaacaccagaggtccactccatatttctcgaaggccataccttccttgttcgaaaccacagacaggcatccttggggatctctcccattacctttctcactgcccaaacgctccttatggacttgggtcagttccttctcttttgccatatcccgtcacaccagcatgatggtatggaagcttatgtgaaagtcgacagttgtcctgaggagccacagttgcgcatgaagaataatgaagaagccgaggattacgacgacgatctcaccgattctgagatggacgtggtgaggtttgatgacgacaactctccctccatcattcaagctcggagcgtggcgaagaaacaccccaagacttgggtccactatatagcggcggaagaggaggattgggattacgctcctcttgtattggcaccagatgaccgctcatacaaaagccagtacctcaacaacggaccgcagagaattggccggaagtataagaaagtgcgatttatggcctatacagacgaaacctttaagacaagggaggccatccagcatgagagtgggattttgggacctcttctttacggcgaagttggtgataccctcctcatcatcttcaagaatcaagcttctcgcccctataacatttacccacacgggatcactgacgttaggcctttgtatagcagaagacttcccaaaggcgtgaagcatctcaaagacttccccattttgccaggcgagatctttaagtacaaatggaccgtcacagtggaagatggaccgactaaatcagaccctcgatgccttacgcggtactattcctccttcgtgaatatggagagagatttggcaagcggactcataggaccactcctcatctgttacaaggaatctgtagaccagaggggtaaccagattatgagtgataaacgcaatgtgatcctttttagcgtcttcgacgagaaccggtcctggtacttgaccgagaatatacaaaggttccttcccaaccccgcaggcgttcagttggaagaccctgagtttcaggccagcaatattatgcactcaatcaacggctatgtgtttgatagtctccagctttctgtttgcctccatgaagtagcctattggtacatcttgtcaattggtgctcaaacagacttcctctccgtcttcttctccggctacacctttaagcacaagatggtgtatgaggacactctcacactctttccattttctggagaaaccgtgttcatgagcatggagaatccaggcctttggatcttgggttgccacaacagtgattttcgcaatcggggaatgactgctctcctcaaagtcagcagctgtgataagaacacaggcgactattacgaagattcttacgaggacataagtgcctactttgactccaagaataacgccattgagcccagatcattctcccagaatcctcccgtgcttaaaaggcatcagcgcgaaatcaccagaactactcttcagtctgatcaagaggagattgactatgacgacaccataagcgtggaaatgaagaaggaggatttcgatatctatgacgaagatgagaaccagtctccgcggagctttcagaagaagacgcgacactacttcattgcagcagtcgaaaggctttgggactacggtatgtcatcatcccctcatgtgttgcgcaatagagctcagagtggaagtgttccacagttcaagaaagtcgtctttcaagagtttacagatggcagcttcacacagcctctctatcggggcgagcttaacgaacatttgggactccttggtccctatatccgagccgaagtggaggacaacattatggttacctttaggaatcaagcctctcgcccctacagcttctactcctccgttatcagttatgaggaggatcagagacaaggcgctgaaccacggaagaactttgtgaaaccgaatgagacgaagacctacttctggaaagtacagcaccacatggcccccacaaaagacgaattcgattgcaaagcatgggcgtatttttcagacgttgacttggagaaagatgtacattcaggacttattggtcctttgttggtgtgtcacactaacactctcaatccagcccatggcaggcaggtgacagtccaggaattcgctcttttctttaccatctttgatgagaccaagtcctggtacttcacggaaaacatggagcgcaattgcagagccccctgtaacatacagatggaggaccctacctttaaggaaaattatcggttccacgcaatcaacggatacattatggatacactccctggccttgtgatggctcaggaccaacgaatcaggtggtacctcctcagcatgggttctaatgagaacatacactccattcacttttcaggacatgtgttcactgtccggaagaaagaagagtataagatggccctctacaatttgtatccaggcgtgtttgagaccgttgaaatgcttccctctaaagctggcatctggagagtagagtgcttgatcggagaacatcttcacgcaggtatgagcaccttgttcctcgtgtacagcaacaaatgtcagaccccacttggcatggccagtggacacattcgcgactttcagatcacagcatctggccagtatggacaatgggccccaaagttggctcgcctccattactccggtagcataaatgcgtggtccactaaagaacctttcagctggattaaggtcgatcttcttgcccccatgatcatccacggcattaagacacagggagcgaggcagaaattctcctccctctacatctcacagttcattattatgtatagtttggacggcaagaagtggcaaacttatagaggtaacagtactggaacagacatggtgttcttcggcaacgttgatagctctggcatcaaacacaacatctttaatcctcccataatagctcggtacatcagattgcatccgacccactacagcattaggagtacactccgaatggagcttatgggttgcgacttgaattcctgttcaatgccactcggaatggagtctaaagccatctctgatgcacagataaccgccagtagctactttacgaacatgtttgctacgtggtcaccctctaaggcaaggcttcatttgcaaggccggtctaatgcctggagacctcaggtgaacaacccgaaagaatggctccaggtggactttcagaagaccatgaaagtaacaggtgtcactactcagggagttaagtccttggatactagcatgtatgtgaaggagttccttatttcctcatcacaagatggccaccagtggaccctcttctttcagaatggtaaggtcaaagtgtttcagggcaatcaagacagcttcacacccgtggtgaacagtcttgatcctccactcttgacacgataccttcgaatccatccacagtcttgggagcaccagattgcattgcgcatggaagtacttggatgcgaggctcaggacctctac

SEQ ID NO: 1094 - protein, 1457 aa, synthetic construct
  REGION 1..1457: note = Variant of human B-domain deleted Factor VIII
MQIELSTCFFLCLLRFCFSATRRYYLGAVELSWDYMQSDLGELPVDARFPPRVPKSFPFNTSVVYKKTLFVEFTDHLFNIAKPRPPWMGLLGPTIQAEVYDTVVITLKNMASHPVSLHAVGVSYWKASEGAEYDDQTSQREKEDDKVFPGGSHTYVWQVLKENGPMASDPPCLTYSYLSHVDLVKDLNSGLIGALLVCREGSLAKEKTQTLHKFILLFAVFDEGKSWHSETKNSLMQDRDAASARAWPKMHTVNGYVNRTLPGLIGCHRKSVYWHVIGMGTTPEVHSIFLEGHTFLVRNHRQASLGISPITFLTAQTLLMDLGQFLLFCHIPSHQHDGMEAYVKVDSCPEEPQLRMKNNEEAEDYDDDLTDSEMDVVRFDDDNSPSIIQARSVAKKHPKTWVHYIAAEEEDWDYAPLVLAPDDRSYKSQYLNNGPQRIGRKYKKVRFMAYTDETFKTREAIQHESGILGPLLYGEVGDTLLIIFKNQASRPYNIYPHGITDVRPLYSRRLPKGVKHLKDFPILPGEIFKYKWTVTVEDGPTKSDPRCLTRYYSSFVNMERDLASGLIGPLLICYKESVDQRGNQIMSDKRNVILFSVFDENRSWYLTENIQRFLPNPAGVQLEDPEFQASNIMHSINGYVFDSLQLSVCLHEVAYWYILSIGAQTDFLSVFFSGYTFKHKMVYEDTLTLFPFSGETVFMSMENPGLWILGCHNSDFRNRGMTALLKVSSCDKNTGDYYEDSYEDISAYFDSKNNAIEPRSFSQNPPVLKRHQREITRTTLQSDQEEIDYDDTISVEMKKEDFDIYDEDENQSPRSFQKKTRHYFIAAVERLWDYGMSSSPHVLRNRAQSGSVPQFKKVVFQEFTDGSFTQPLYRGELNEHLGLLGPYIRAEVEDNIMVTFRNQASRPYSFYSSVISYEEDQRQGAEPRKNFVKPNETKTYFWKVQHHMAPTKDEFDCKAWAYFSDVDLEKDVHSGLIGPLLVCHTNTLNPAHGRQVTVQEFALFFTIFDETKSWYFTENMERNCRAPCNIQMEDPTFKENYRFHAINGYIMDTLPGLVMAQDQRIRWYLLSMGSNENIHSIHFSGHVFTVRKKEEYKMALYNLYPGVFETVEMLPSKAGIWRVECLIGEHLHAGMSTLFLVYSNKCQTPLGMASGHIRDFQITASGQYGQWAPKLARLHYSGSINAWSTKEPFSWIKVDLLAPMIIHGIKTQGARQKFSSLYISQFIIMYSLDGKKWQTYRGNSTGTDMVFFGNVDSSGIKHNIFNPPIIARYIRLHPTHYSIRSTLRMELMGCDLNSCSMPLGMESKAISDAQITASSYFTNMFATWSPSKARLHLQGRSNAWRPQVNNPKEWLQVDFQKTMKVTGVTTQGVKSLDTSMYVKEFLISSSQDGHQWTLFFQNGKVKVFQGNQDSFTPVVNSLDPPLLTRYLRIHPQSWEHQIALRMEVLGCEAQDLY

SEQ ID NO: 1095 - DNA, 4371 bp, synthetic construct
  misc_feature 1..4371: note = Variant of human B-domain deleted Factor VIII
  source 1..4371: mol_type = other DNA
atgcagattgaactgtctacctgcttcttcctctgtttgctgagggtgtgctttagcgccactagacggtactaccttggcgctgtggagctgtcctgggactatatgcagagtgatttgggagagcttcccgtcgacgcacgatttcctcctcgcgttccaaagtcatttccctttaacacaagcgtggtgtacaagaagacgctcttcgtcgaattcaccgatcacctgttcaatatcgccaaacccagaccaccatggatgggtcttttggggcctaccatacaagcggaggtgtatgacacagttgttatcactctcaagaacatggcttctcatccggtaagtcttcacgcagtgggcgtgtcctactggaaagcttcagaaggagccgagtatgatgatcagacatcccagagggagaaagaagacgacaaggtatttccaggtgggtctcatacctatgtgtggcaagtgctcaaagagaatggccctatggcaagcgatccgccgtgtttgacttacagctacctttcacacgttgacctcgtcaaggacctcaactccgggttgattggagccttgttggtatgcagggaaggatctcttgccaaagagaagacacagaccctccacaagtttatccttctctttgctgtgttcgatgagggcaaaagttggcatagcgaaacgaagaattccctcatgcaggatcgcgacgcagccagcgccagagcttggcccaagatgcacactgtgaacggatatgtcaataggacgcttcctggcttgattgggtgtcatcggaaaagtgtctactggcacgtgatcggaatggggacaacaccagaggtccactccatatttctcgaaggccataccttccttgttcgaaaccacagacaggcatccttggggatctctcccattacctttctcactgcccaaacgctccttatggacttgggtcagttccttctcttttgccatatcccgtcacaccagcatgatggtatggaagcttatgtgaaagtcgacagttgtcctgaggagccacagttgcgcatgaagaataatgaagaagccgaggattacgacgacgatctcaccgattctgagatggacgtggtgaggtttgatgacgacaactctccctccatcattcaagctcggagcgtggcgaagaaacaccccaagacttgggtccactatatagcggcggaagaggaggattgggattacgctcctcttgtattggcaccagatgaccgctcatacaaaagccagtacctcaacaacggaccgcagagaattggccggaagtataagaaagtgcgatttatggcctatacagacgaaacctttaagacaagggaggccatccagcatgagagtgggattttgggacctcttctttacggcgaagttggtgataccctcctcatcatcttcaagaatcaagcttctcgcccctataacatttacccacacgggatcactgacgttaggcctttgtatagcagaagacttcccaaaggcgtgaagcatctcaaagacttccccattttgccaggcgagatctttaagtacaaatggaccgtcacagtggaagatggaccgactaaatcagaccctcgatgccttacgcggtactattcctccttcgtgaatatggagagagatttggcaagcggactcataggaccactcctcatctgttacaaggaatctgtagaccagaggggtaaccagattatgagtgataaacgcaatgtgatcctttttagcgtcttcgacgagaaccggtcctggtacttgaccgagaatatacaaaggttccttcccaaccccgcaggcgttcagttggaagaccctgagtttcaggccagcaatattatgcactcaatcaacggctatgtgtttgatagtctccagctttctgtttgcctccatgaagtagcctattggtacatcttgtcaattggtgctcaaacagacttcctctccgtcttcttctccggctacacctttaagcacaagatggtgtatgaggacactctcacactctttccattttctggagaaaccgtgttcatgagcatggagaatccaggcctttggatcttgggttgccacaacagtgattttcgcaatcggggaatgactgctctcctcaaagtcagcagctgtgataagaacacaggcgactattacgaagattcttacgaggacataagtgcctactttgactccaagaataacgccattgagcccagatcattctcccagaatcctcccgtgcttaaaaggcatcagcgcgaaatcaccagaactactcttcagtctgatcaagaggagattgactatgacgacaccataagcgtggaaatgaagaaggaggatttcgatatctatgacgaagatgagaaccagtctccgcggagctttcagaagaagacgcgacactacttcattgcagcagtcgaaaggctttgggactacggtatgtcatcatcccctcatgtgttgcgcaatagagctcagagtggaagtgttccacagttcaagaaagtcgtctttcaagagtttacagatggcagcttcacacagcctctctatcggggcgagcttaacgaacatttgggactccttggtccctatatccgagccgaagtggaggacaacattatggttacctttaggaatcaagcctctcgcccctacagcttctactcctccctcatcagttatgaggaggatcagagacaaggcgctgaaccacggaagaactttgtgaaaccgaatgagacgaagacctacttctggaaagtacagcaccacatggcccccacaaaagacgaattcgattgcaaagcatgggcgtatttttcagacgttgacttggagaaagatgtacattcaggacttattggtcctttgttggtgtgtcacactaacactctcaatccagcccatggcaggcaggtgacagtccaggaattcgctcttttctttaccatctttgatgagaccaagtcctggtacttcacggaaaacatggagcgcaattgcagagccccctgtaacatacagatggaggaccctacctttaaggaaaattatcggttccacgcaatcaacggatacattatggatacactccctggccttgtgatggctcaggaccaacgaatcaggtggtacctcctcagcatgggttctaatgagaacatacactccattcacttttcaggacatgtgttcactgtccggaagaaagaagagtataagatggccctctacaatttgtatccaggcgtgtttgagaccgttgaaatgcttccctctaaagctggcatctggagagtagagtgcttgatcggagaacatcttcacgcaggtatgagcaccttgttcctcgtgtacagcaacaaatgtcagaccccacttggcatggccagtggacacattcgcgactttcagatcacagcatctggccagtatggacaatgggccccaaagttggctcgcctccattactccggtagcataaatgcgtggtccactaaagaacctttcagctggattaaggtcgatcttcttgcccccatgatcatccacggcattaagacacagggagcgaggcagaaattctcctccctctacatctcacagttcattattatgtatagtttggacggcaagaagtggcaaacttatagaggtaacagtactggaacagacatggtgttcttcggcaacgttgatagctctggcatcaaacacaacatctttaatcctcccataatagctcggtacatcagattgcatccgacccactacagcattaggagtacactccgaatggagcttatgggttgcgacttgaattcctgttcaatgccactcggaatggagtctaaagccatctctgatgcacagataaccgccagtagctactttacgaacatgtttgctacgtggtcaccctctaaggcaaggcttcatttgcaaggccggtctaatgcctggagacctcaggtgaacaacccgaaagaatggctccaggtggactttcagaagaccatgaaagtaacaggtgtcactactcagggagttaagtccttggatactagcatgtatgtgaaggagttccttatttcctcatcacaagatggccaccagtggaccctcttctttcagaatggtaaggtcaaagtgtttcagggcaatcaagacagcttcacacccgtggtgaacagtcttgatcctccactcttgacacgataccttcgaatccatccacagtcttgggagcaccagattgcattgcgcatggaagtacttggatgcgaggctcaggacctctac

SEQ ID NO: 1096 - protein, 1457 aa, synthetic construct
  REGION 1..1457: note = Variant of human B-domain deleted Factor VIII
MQIELSTCFFLCLLRVCFSATRRYYLGAVELSWDYMQSDLGELPVDARFPPRVPKSFPFNTSVVYKKTLFVEFTDHLFNIAKPRPPWMGLLGPTIQAEVYDTVVITLKNMASHPVSLHAVGVSYWKASEGAEYDDQTSQREKEDDKVFPGGSHTYVWQVLKENGPMASDPPCLTYSYLSHVDLVKDLNSGLIGALLVCREGSLAKEKTQTLHKFILLFAVFDEGKSWHSETKNSLMQDRDAASARAWPKMHTVNGYVNRTLPGLIGCHRKSVYWHVIGMGTTPEVHSIFLEGHTFLVRNHRQASLGISPITFLTAQTLLMDLGQFLLFCHIPSHQHDGMEAYVKVDSCPEEPQLRMKNNEEAEDYDDDLTDSEMDVVRFDDDNSPSIIQARSVAKKHPKTWVHYIAAEEEDWDYAPLVLAPDDRSYKSQYLNNGPQRIGRKYKKVRFMAYTDETFKTREAIQHESGILGPLLYGEVGDTLLIIFKNQASRPYNIYPHGITDVRPLYSRRLPKGVKHLKDFPILPGEIFKYKWTVTVEDGPTKSDPRCLTRYYSSFVNMERDLASGLIGPLLICYKESVDQRGNQIMSDKRNVILFSVFDENRSWYLTENIQRFLPNPAGVQLEDPEFQASNIMHSINGYVFDSLQLSVCLHEVAYWYILSIGAQTDFLSVFFSGYTFKHKMVYEDTLTLFPFSGETVFMSMENPGLWILGCHNSDFRNRGMTALLKVSSCDKNTGDYYEDSYEDISAYFDSKNNAIEPRSFSQNPPVLKRHQREITRTTLQSDQEEIDYDDTISVEMKKEDFDIYDEDENQSPRSFQKKTRHYFIAAVERLWDYGMSSSPHVLRNRAQSGSVPQFKKVVFQEFTDGSFTQPLYRGELNEHLGLLGPYIRAEVEDNIMVTFRNQASRPYSFYSSLISYEEDQRQGAEPRKNFVKPNETKTYFWKVQHHMAPTKDEFDCKAWAYFSDVDLEKDVHSGLIGPLLVCHTNTLNPAHGRQVTVQEFALFFTIFDETKSWYFTENMERNCRAPCNIQMEDPTFKENYRFHAINGYIMDTLPGLVMAQDQRIRWYLLSMGSNENIHSIHFSGHVFTVRKKEEYKMALYNLYPGVFETVEMLPSKAGIWRVECLIGEHLHAGMSTLFLVYSNKCQTPLGMASGHIRDFQITASGQYGQWAPKLARLHYSGSINAWSTKEPFSWIKVDLLAPMIIHGIKTQGARQKFSSLYISQFIIMYSLDGKKWQTYRGNSTGTDMVFFGNVDSSGIKHNIFNPPIIARYIRLHPTHYSIRSTLRMELMGCDLNSCSMPLGMESKAISDAQITASSYFTNMFATWSPSKARLHLQGRSNAWRPQVNNPKEWLQVDFQKTMKVTGVTTQGVKSLDTSMYVKEFLISSSQDGHQWTLFFQNGKVKVFQGNQDSFTPVVNSLDPPLLTRYLRIHPQSWEHQIALRMEVLGCEAQDLY

SEQ ID NO: 1097 - DNA, 4371 bp, synthetic construct
  misc_feature 1..4371: note = Variant of human B-domain deleted Factor VIII
  source 1..4371: mol_type = other DNA
atgcagattgaactgtctacctgcttcttcctctgtttgctgaggttctgctttagcgccactagacggtactaccttggcgctgtggagctgtcctgggactatatgcagagtgatttgggagagcttcccgtcgacgcacgatttcctcctcgcgttccaaagtcatttccctttaacacaagcgtggtgtacaagaagacgctcttcgtcgaattcaccgatcacctgttcaatatcgccaaacccagaccaccatggatgggtcttttggggcctaccatacaagcggaggtgtatgacacagttgttatcactctcaagaacatggcttctcatccggtaagtcttcacgcagtgggcgtgtcctactggaaagcttcagaaggagccgagtatgatgatcagacatcccagagggagaaagaagacgacaaggtatttccaggtgggtctcatacctatgtgtggcaagtgctcaaagagaatggccctatggcaagcgatccgccgtgtttgacttacagctacctttcacacgttgacctcgtcaaggacctcaactccgggttgattggagccttgttggtatgcagggaaggatctcttgccaaagagaagacacagaccctccacaagtttatccttctctttgctgtgttcgatgagggcaaaagttggcatagcgaaacgaagaattccctcatgcaggatcgcgacgcagccagcgccagagcttggcccaagatgcacactgtgaacggatatgtcaataggacgcttcctggcttgattgggtgtcatcggaaaagtgtctactggcacgtgatcggaatggggacaacaccagaggtccactccatatttctcgaaggccataccttccttgttcgaaaccacagacaggcatccttggggatctctcccattacctttctcactgcccaaacgctccttatggacttgggtcagttccttctcttttgccatatcccgtcacaccagcatgatggtatggaagcttatgtgaaagtcgacagttgtcctgaggagccacagttgcgcatgaagaataatgaagaagccgaggattacgacgacgatctcaccgattctgagatggacgtggtgaggtttgatgacgacaactctccctccatcattcaagctcggagcgtggcgaagaaacaccccaagacttgggtccactatatagcggcggaagaggaggattgggattacgctcctcttgtattggcaccagatgaccgctcatacaaaagccagtacctcaacaacggaccgcagagaattggccggaagtataagaaagtgcgatttatggcctatacagacgaaacctttaagacaagggaggccatccagcatgagagtgggattttgggacctcttctttacggcgaagttggtgataccctcctcatcatcttcaagaatcaagcttctcgcccctataacatttacccacacgggatcactgacgttaggcctttgtatagcagaagacttcccaaaggcgtgaagcatctcaaagacttccccattttgccaggcgagatctttaagtacaaatggaccgtcacagtggaagatggaccgactaaatcagaccctcgatgccttacgcggtactattcctccttcgtgaatatggagagagatttggcaagcggactcataggaccactcctcatctgttacaaggaatctgtagaccagaggggtaaccagattatgagtgataaacgcaatgtgatcctttttagcgtcttcgacgagaaccggtcctggtacttgaccgagaatatacaaaggttccttcccaaccccgcaggcgttcagttggaagaccctgagtttcaggccagcaatattatgcactcaatcaacggctatgtgtttgatagtctccagctttctgtttgcctccatgaagtagcctattggtacatcttgtcaattggtgctcaaacagacttcctctccgtcttcttctccggctacacctttaagcacaagatggtgtatgaggacactctcacactctttccattttctggagaaaccgtgttcatgagcatggagaatccaggcctttggatcttgggttgccacaacagtgattttcgcaatcggggaatgactgctctcctcaaagtcagcagctgtgataagaacacaggcgactattacgaagattcttacgaggacataagtgcctactttgactccaagaataacgccattgagcccagatcattctcccagaatcctcccgtgcttaaaaggcatcagcgcgaaatcaccagaactactcttcagtctgatcaagaggagattgactatgacgacaccataagcgtggaaatgaagaaggaggatttcgatatctatgacgaagatgagaaccagtctccgcggagctttcagaagaagacgcgacactacttcattgcagcagtcgaaaggctttgggactacggtatgtcatcatcccctcatgtgttgcgcaatagagctcagagtggaagtgttccacagttcaagaaagtcgtctttcaagagtttacagatggcagcttcacacagcctctctatcggggcgagcttaacgaacatttgggactccttggtccctatatccgagccgaagtggaggacaacattatggttacctttaggaatcaagcctctcgcccctacagcttctactcctccctcatcagttatgaggaggatcagagacaaggcgctgaaccacggaagaactttgtgaaaccgaatgagacgaagacctacttctggaaagtacagcaccacatggcccccacaaaagacgaattcgattgcaaagcatgggcgtatttttcagacgttgacttggagaaagatgtacattcaggacttattggtcctttgttggtgtgtcacactaacactctcaatccagcccatggcaggcaggtgacagtccaggaattcgctcttttctttaccatctttgatgagaccaagtcctggtacttcacggaaaacatggagcgcaattgcagagccccctgtaacatacagatggaggaccctacctttaaggaaaattatcggttccacgcaatcaacggatacattatggatacactccctggccttgtgatggctcaggaccaacgaatcaggtggtacctcctcagcatgggttctaatgagaacatacactccattcacttttcaggacatgtgttcactgtccggaagaaagaagagtataagatggccctctacaatttgtatccaggcgtgtttgagaccgttgaaatgcttccctctaaagctggcatctggagagtagagtgcttgatcggagaacatcttcacgcaggtatgagcaccttgttcctcgtgtacagcaacaaatgtcagaccccacttggcatggccagtggacacattcgcgactttcagatcacagcatctggccagtatggacaatgggccccaaagttggctcgcctccattactccggtagcataaatgcgtggtccactaaagaacctttcagctggattaaggtcgatcttcttgcccccatgatcatccacggcattaagacacagggagcgaggcagaaattctcctccctctacatctcacagttcattattatgtatagtttggacggcaagaagtggcaaacttatagaggtaacagtactggaacagacatggtgttcttcggcaacgttgatagctctggcatcaaacacaacatctttaatcctcccataatagctcggtacatcagattgcatccgacccactacagcgagaggagtacactccgaatggagcttatgggttgcgacttgaattcctgttcaatgccactcggaatggagtctaaagccatctctgatgcacagataaccgccagtagctactttacgaacatgtttgctacgtggtcaccctctaaggcaaggcttcatttgcaaggccggtctaatgcctggagacctcaggtgaacaacccgaaagaatggctccaggtggactttcagaagaccatgaaagtaacaggtgtcactactcagggagttaagtccttggatactagcatgtatgtgaaggagttccttatttcctcatcacaagatggccaccagtggaccctcttctttcagaatggtaaggtcaaagtgtttcagggcaatcaagacagcttcacacccgtggtgaacagtcttgatcctccactcttgacacgataccttcgaatccatccacagtcttgggagcaccagattgcattgcgcatggaagtacttggatgcgaggctcaggacctctac

SEQ ID NO: 1098 - protein, 1457 aa, synthetic construct
  REGION 1..1457: note = Variant of human B-domain deleted Factor VIII
MQIELSTCFFLCLLRFCFSATRRYYLGAVELSWDYMQSDLGELPVDARFPPRVPKSFPFNTSVVYKKTLFVEFTDHLFNIAKPRPPWMGLLGPTIQAEVYDTVVITLKNMASHPVSLHAVGVSYWKASEGAEYDDQTSQREKEDDKVFPGGSHTYVWQVLKENGPMASDPPCLTYSYLSHVDLVKDLNSGLIGALLVCREGSLAKEKTQTLHKFILLFAVFDEGKSWHSETKNSLMQDRDAASARAWPKMHTVNGYVNRTLPGLIGCHRKSVYWHVIGMGTTPEVHSIFLEGHTFLVRNHRQASLGISPITFLTAQTLLMDLGQFLLFCHIPSHQHDGMEAYVKVDSCPEEPQLRMKNNEEAEDYDDDLTDSEMDVVRFDDDNSPSIIQARSVAKKHPKTWVHYIAAEEEDWDYAPLVLAPDDRSYKSQYLNNGPQRIGRKYKKVRFMAYTDETFKTREAIQHESGILGPLLYGEVGDTLLIIFKNQASRPYNIYPHGITDVRPLYSRRLPKGVKHLKDFPILPGEIFKYKWTVTVEDGPTKSDPRCLTRYYSSFVNMERDLASGLIGPLLICYKESVDQRGNQIMSDKRNVILFSVFDENRSWYLTENIQRFLPNPAGVQLEDPEFQASNIMHSINGYVFDSLQLSVCLHEVAYWYILSIGAQTDFLSVFFSGYTFKHKMVYEDTLTLFPFSGETVFMSMENPGLWILGCHNSDFRNRGMTALLKVSSCDKNTGDYYEDSYEDISAYFDSKNNAIEPRSFSQNPPVLKRHQREITRTTLQSDQEEIDYDDTISVEMKKEDFDIYDEDENQSPRSFQKKTRHYFIAAVERLWDYGMSSSPHVLRNRAQSGSVPQFKKVVFQEFTDGSFTQPLYRGELNEHLGLLGPYIRAEVEDNIMVTFRNQASRPYSFYSSLISYEEDQRQGAEPRKNFVKPNETKTYFWKVQHHMAPTKDEFDCKAWAYFSDVDLEKDVHSGLIGPLLVCHTNTLNPAHGRQVTVQEFALFFTIFDETKSWYFTENMERNCRAPCNIQMEDPTFKENYRFHAINGYIMDTLPGLVMAQDQRIRWYLLSMGSNENIHSIHFSGHVFTVRKKEEYKMALYNLYPGVFETVEMLPSKAGIWRVECLIGEHLHAGMSTLFLVYSNKCQTPLGMASGHIRDFQITASGQYGQWAPKLARLHYSGSINAWSTKEPFSWIKVDLLAPMIIHGIKTQGARQKFSSLYISQFIIMYSLDGKKWQTYRGNSTGTDMVFFGNVDSSGIKHNIFNPPIIARYIRLHPTHYSERSTLRMELMGCDLNSCSMPLGMESKAISDAQITASSYFTNMFATWSPSKARLHLQGRSNAWRPQVNNPKEWLQVDFQKTMKVTGVTTQGVKSLDTSMYVKEFLISSSQDGHQWTLFFQNGKVKVFQGNQDSFTPVVNSLDPPLLTRYLRIHPQSWEHQIALRMEVLGCEAQDLY

SEQ ID NO: 1099 - DNA, 4371 bp, synthetic construct
  misc_feature 1..4371: note = Variant of human B-domain deleted Factor VIII
  source 1..4371: mol_type = other DNA
atgcagattgaactgtctacctgcttcttcctctgtttgctgaggttctgctttagcgccactagacggtactaccttggcgctgtggagctgtcctgggactatatgcagagtgatttgggagagcttcccgtcgacgcacgatttcctcctcgcgttccaaagtcatttccctttaacacaagcgtggtgtacaagaagacgctcttcgtcgaattcaccgatcacctgttcaatatcgccaaacccagaccaccatggatgggtcttttggggcctaccatacaagcggaggtgtatgacacagttgttatcactctcaagaacatggcttctcatccggtaagtcttcacgcagtgggcgtgtcctactggaaagcttcagaaggagccgagtatgatgatcagacatcccagagggagaaagaagacgacaaggtatttccaggtgggtctcatacctatgtgtggcaagtgctcaaagagaatggccctatggcaagcgatccgccgtgtttgacttacagctacctttcacacgttgacctcgtcaaggacctcaactccgggttgattggagccttgttggtatgcagggaaggatctcttgccaaagagaagacacagaccctccacaagtttatccttctctttgctgtgttcgatgagggcaaaagttggcatagcgaaacgaagaattccctcatgcaggatcgcgacgcagccagcgccagagcttggcccaagatgcacactgtgaacggatatgtcaataggacgcttcctggcttgattgggtgtcatcggaaaagtgtctactggcacgtgatcggaatggggacaacaccagaggtccactccatatttctcgaaggccataccttccttgttcgaaaccacagacaggcatccttggggatctctcccattacctttctcactgcccaaacgctccttatggacttgggtcagttccttctcttttgccatatcccgtcacaccagcatgatggtatggaagcttatgtgaaagtcgacagttgtcctgaggagccacagttgcgcatgaagaataatgaagaagccgaggattacgacgacgatctcaccgattctgagatggacgtggtgaggtttgatgacgacaactctccctccatcattcaagctcggagcgtggcgaagaaacaccccaagacttgggtccactatatagcggcggaagaggaggattgggattacgctcctcttgtattggcaccagatgaccgctcatacaaaagccagtacctcaacaacggaccgcagagaattggccggaagtataagaaagtgcgatttatggcctatacagacgaaacctttaagacaagggaggccatccagcatgagagtgggattttgggacctcttctttacggcgaagttggtgataccctcctcatcatcttcaagaatcaagcttctcgcccctataacatttacccacacgggatcactgacgttaggcctttgtatagcagaagacttcccaaaggcgtgaagcatctcaaagacttccccattttgccaggcgagatctttaagtacaaatggaccgtcacaatggaagatggaccgactaaatcagaccctcgatgccttacgcggtactattcctccttcgtgaatatggagagagatttggcaagcggactcataggaccactcctcatctgttacaaggaatctgtagaccagaggggtaaccagattatgagtgataaacgcaatgtgatcctttttagcgtcttcgacgagaaccggtcctggtacttgaccgagaatatacaaaggttccttcccaaccccgcaggcgttcagttggaagaccctgagtttcaggccagcaatattatgcactcaatcaacggctatgtgtttgatagtctccagctttctgtttgcctccatgaagtagcctattggtacatcttgtcaattggtgctcaaacagacttcctctccgtcttcttctccggctacacctttaagcacaagatggtgtatgaggacactctcacactctttccattttctggagaaaccgtgttcatgagcatggagaatccaggcctttggatcttgggttgccacaacagtgattttcgcaatcggggaatgactgctctcctcaaagtcagcagctgtgataagaacacaggcgactattacgaagattcttacgaggacataagtgcctactttgactccaagaataacgccattgagcccagatcattctcccagaatcctcccgtgcttaaaaggcatcagcgcgaaatcaccagaactactcttcagtctgatcaagaggagattgactatgacgacaccataagcgtggaaatgaagaaggaggatttcgatatctatgacgaagatgagaaccagtctccgcggagctttcagaagaagacgcgacactacttcattgcagcagtcgaaaggctttgggactacggtatgtcatcatcccctcatgtgttgcgcaatagagctcagagtggaagtgttccacagttcaagaaagtcgtctttcaagagtttacagatggcagcttcacacagcctctctatcggggcgagcttaacgaacatttgggactccttggtccctatatccgagccgaagtggaggacaacattatggttacctttaggaatcaagcctctcgcccctacagcttctactcctccctcatcagttatgaggaggatcagagacaaggcgctgaaccacggaagaactttgtgaaaccgaatgagacgaagacctacttctggaaagtacagcaccacatggcccccacaaaagacgaattcgattgcaaagcatgggcgtatttttcagacgttgacttggagaaagatgtacattcaggacttattggtcctttgttggtgtgtcacactaacactctcaatccagcccatggcaggcaggtgacagtccaggaattcgctcttttctttaccatctttgatgagaccaagtcctggtacttcacggaaaacatggagcgcaattgcagagccccctgtaacatacagatggaggaccctacctttaaggaaaattatcggttccacgcaatcaacggatacattatggatacactccctggccttgtgatggctcaggaccaacgaatcaggtggtacctcctcagcatgggttctaatgagaacatacactccattcacttttcaggacatgtgttcactgtccggaagaaagaagagtataagatggccctctacaatttgtatccaggcgtgtttgagaccgttgaaatgcttccctctaaagctggcatctggagagtagagtgcttgatcggagaacatcttcacgcaggtatgagcaccttgttcctcgtgtacagcaacaaatgtcagaccccacttggcatggccagtggacacattcgcgactttcagatcacagcatctggccagtatggacaatgggccccaaagttggctcgcctccattactccggtagcataaatgcgtggtccactaaagaacctttcagctggattaaggtcgatcttcttgcccccatgatcatccacggcattaagacacagggagcgaggcagaaattctcctccctctacatctcacagttcattattatgtatagtttggacggcaagaagtggcaaacttatagaggtaacagtactggaacagacatggtgttcttcggcaacgttgatagctctggcatcaaacacaacatctttaatcctcccataatagctcggtacatcagattgcatccgacccactacagcattaggagtacactccgaatggagcttatgggttgcgacttgaattcctgttcaatgccactcggaatggagtctaaagccatctctgatgcacagataaccgccagtagctactttacgaacatgtttgctacgtggtcaccctctaaggcaaggcttcatttgcaaggccggtctaatgcctggagacctcaggtgaacaacccgaaagaatggctccaggtggactttcagaagaccatgaaagtaacaggtgtcactactcagggagttaagtccttggatactagcatgtatgtgaaggagttccttatttcctcatcacaagatggccaccagtggaccctcttctttcagaatggtaaggtcaaagtgtttcagggcaatcaagacagcttcacacccgtggtgaacagtcttgatcctccactcttgacacgataccttcgaatccatccacagtcttgggagcaccagattgcattgcgcatggaagtacttggatgcgaggctcaggacctctac

SEQ ID NO: 1100 - protein, 1457 aa, synthetic construct
  REGION 1..1457: note = Variant of human B-domain deleted Factor VIII
MQIELSTCFFLCLLRFCFSATRRYYLGAVELSWDYMQSDLGELPVDARFPPRVPKSFPFNTSVVYKKTLFVEFTDHLFNIAKPRPPWMGLLGPTIQAEVYDTVVITLKNMASHPVSLHAVGVSYWKASEGAEYDDQTSQREKEDDKVFPGGSHTYVWQVLKENGPMASDPPCLTYSYLSHVDLVKDLNSGLIGALLVCREGSLAKEKTQTLHKFILLFAVFDEGKSWHSETKNSLMQDRDAASARAWPKMHTVNGYVNRTLPGLIGCHRKSVYWHVIGMGTTPEVHSIFLEGHTFLVRNHRQASLGISPITFLTAQTLLMDLGQFLLFCHIPSHQHDGMEAYVKVDSCPEEPQLRMKNNEEAEDYDDDLTDSEMDVVRFDDDNSPSIIQARSVAKKHPKTWVHYIAAEEEDWDYAPLVLAPDDRSYKSQYLNNGPQRIGRKYKKVRFMAYTDETFKTREAIQHESGILGPLLYGEVGDTLLIIFKNQASRPYNIYPHGITDVRPLYSRRLPKGVKHLKDFPILPGEIFKYKWTVTMEDGPTKSDPRCLTRYYSSFVNMERDLASGLIGPLLICYKESVDQRGNQIMSDKRNVILFSVFDENRSWYLTENIQRFLPNPAGVQLEDPEFQASNIMHSINGYVFDSLQLSVCLHEVAYWYILSIGAQTDFLSVFFSGYTFKHKMVYEDTLTLFPFSGETVFMSMENPGLWILGCHNSDFRNRGMTALLKVSSCDKNTGDYYEDSYEDISAYFDSKNNAIEPRSFSQNPPVLKRHQREITRTTLQSDQEEIDYDDTISVEMKKEDFDIYDEDENQSPRSFQKKTRHYFIAAVERLWDYGMSSSPHVLRNRAQSGSVPQFKKVVFQEFTDGSFTQPLYRGELNEHLGLLGPYIRAEVEDNIMVTFRNQASRPYSFYSSLISYEEDQRQGAEPRKNFVKPNETKTYFWKVQHHMAPTKDEFDCKAWAYFSDVDLEKDVHSGLIGPLLVCHTNTLNPAHGRQVTVQEFALFFTIFDETKSWYFTENMERNCRAPCNIQMEDPTFKENYRFHAINGYIMDTLPGLVMAQDQRIRWYLLSMGSNENIHSIHFSGHVFTVRKKEEYKMALYNLYPGVFETVEMLPSKAGIWRVECLIGEHLHAGMSTLFLVYSNKCQTPLGMASGHIRDFQITASGQYGQWAPKLARLHYSGSINAWSTKEPFSWIKVDLLAPMIIHGIKTQGARQKFSSLYISQFIIMYSLDGKKWQTYRGNSTGTDMVFFGNVDSSGIKHNIFNPPIIARYIRLHPTHYSIRSTLRMELMGCDLNSCSMPLGMESKAISDAQITASSYFTNMFATWSPSKARLHLQGRSNAWRPQVNNPKEWLQVDFQKTMKVTGVTTQGVKSLDTSMYVKEFLISSSQDGHQWTLFFQNGKVKVFQGNQDSFTPVVNSLDPPLLTRYLRIHPQSWEHQIALRMEVLGCEAQDLY

SEQ ID NO: 1101 - DNA, 4371 bp, synthetic construct
  misc_feature 1..4371: note = Variant of human B-domain deleted Factor VIII
  source 1..4371: mol_type = other DNA
atgcagattgaactgtctacctgcttcttcctctgtttgctgaggttctgctttagcgccactagacggtactaccttggcgctgtggagctgtcctgggactatatgcagagtgatttgggagagcttcccgtcgacgcacgatttcctcctcgcgttccaaagtcatttccctttaacacaagcgtggtgtacaagaagacgctcttcgtcgaattcaccgatcacctgttcaatatcgccaaacccagaccaccatggatgggtcttttggggcctaccatacaagcggaggtgtatgacacagttgttatcactctcaagaacatggcttctcatccggtaagtcttcacgcagtgggcgtgtcctactggaaagcttcagaaggagccgagtatgatgatcagacatcccagagggagaaagaagacgacaaggtatttccaggtgggtctcatacctatgtgtggcaagtgctcaaagagaatggccctatggcaagcgatccgccgtgtttgacttacagctacctttcacacgttgacctcgtcaaggacctcaactccgggttgattggagccttgttggtatgcagggaaggatctcttgccaaagagaagacacagaccctccacaagtttatccttctctttgctgtgttcgatgagggcaaaagttggcatagcgaaacgaagaattccctcatgcaggatcgcgacgcagccagcgccagagcttggcccaagatgcacactgtgaacggatatgtcaataggacgcttcctggcttgattgggtgtcatcggaaaagtgtctactggcacgtgatcggaatggggacaacaccagaggtccactccatatttctcgaaggccataccttccttgttcgaaaccacagacaggcatccttggggatctctcccattaccctgctcactgcccaaacgctccttatggacttgggtcagttccttctcttttgccatatcccgtcacaccagcatgatggtatggaagcttatgtgaaagtcgacagttgtcctgaggagccacagttgcgcatgaagaataatgaagaagccgaggattacgacgacgatctcaccgattctgagatggacgtggtgaggtttgatgacgacaactctccctccatcattcaagctcggagcgtggcgaagaaacaccccaagacttgggtccactatatagcggcggaagaggaggattgggattacgctcctcttgtattggcaccagatgaccgctcatacaaaagccagtacctcaacaacggaccgcagagaattggccggaagtataagaaagtgcgatttatggcctatacagacgaaacctttaagacaagggaggccatccagcatgagagtgggattttgggacctcttctttacggcgaagttggtgataccctcctcatcatcttcaagaatcaagcttctcgcccctataacatttacccacacgggatcactgacgttaggcctttgtatagcagaagacttcccaaaggcgtgaagcatctcaaagacttccccattttgccaggcgagatctttaagtacaaatggaccgtcacagtggaagatggaccgactaaatcagaccctcgatgccttacgcggtactattcctccttcgtgaatatggagagagatttggcaagcggactcataggaccactcctcatctgttacaaggaatctgtagaccagaggggtaaccagattatgagtgataaacgcaatgtgatcctttttagcgtcttcgacgagaaccggtcctggtacttgaccgagaatatacaaaggttccttcccaaccccgcaggcgttcagttggaagaccctgagtttcaggccagcaatattatgcactcaatcaacggctatgtgtttgatagtctccagctttctgtttgcctccatgaagtagcctattggtacatcttgtcaattggtgctcaaacagacttcctctccgtcttcttctccggctacacctttaagcacaagatggtgtatgaggacactctcacactctttccattttctggagaaaccgtgttcatgagcatggagaatccaggcctttggatcttgggttgccacaacagtgattttcgcaatcggggaatgactgctctcctcaaagtcagcagctgtgataagaacacaggcgactattacgaagattcttacgaggacataagtgcctactttgactccaagaataacgccattgagcccagatcattctcccagaatcctcccgtgcttaaaaggcatcagcgcgaaatcaccagaactactcttcagtctgatcaagaggagattgactatgacgacaccataagcgtggaaatgaagaaggaggatttcgatatctatgacgaagatgagaaccagtctccgcggagctttcagaagaagacgcgacactacttcattgcagcagtcgaaaggctttgggactacggtatgtcatcatcccctcatgtgttgcgcaatagagctcagagtggaagtgttccacagttcaagaaagtcgtctttcaagagtttacagatggcagcttcacacagcctctctatcggggcgagcttaacgaacatttgggactccttggtccctatatccgagccgaagtggaggacaacattatggttacctttaggaatcaagcctctcgcccctacagcttctactcctccctcatcagttatgaggaggatcagagacaaggcgctgaaccacggaagaactttgtgaaaccgaatgagacgaagacctacttctggaaagtacagcaccacatggcccccacaaaagacgaattcgattgcaaagcatgggcgtatttttcagacgttgacttggagaaagatgtacattcaggacttattggtcctttgttggtgtgtcacactaacactctcaatccagcccatggcaggcaggtgacagtccaggaattcgctcttttctttaccatctttgatgagaccaagtcctggtacttcacggaaaacatggagcgcaattgcagagccccctgtaacatacagatggaggaccctacctttaaggaaaattatcggttccacgcaatcaacggatacattatggatacactccctggccttgtgatggctcaggaccaacgaatcaggtggtacctcctcagcatgggttctaatgagaacatacactccattcacttttcaggacatgtgttcactgtccggaagaaagaagagtataagatggccctctacaatttgtatccaggcgtgtttgagaccgttgaaatgcttccctctaaagctggcatctggagagtagagtgcttgatcggagaacatcttcacgcaggtatgagcaccttgttcctcgtgtacagcaacaaatgtcagaccccacttggcatggccagtggacacattcgcgactttcagatcacagcatctggccagtatggacaatgggccccaaagttggctcgcctccattactccggtagcataaatgcgtggtccactaaagaacctttcagctggattaaggtcgatcttcttgcccccatgatcatccacggcattaagacacagggagcgaggcagaaattctcctccctctacatctcacagttcattattatgtatagtttggacggcaagaagtggcaaacttatagaggtaacagtactggaacagacatggtgttcttcggcaacgttgatagctctggcatcaaacacaacatctttaatcctcccataatagctcggtacatcagattgcatccgacccactacagcattaggagtacactccgaatggagcttatgggttgcgacttgaattcctgttcaatgccactcggaatggagtctaaagccatctctgatgcacagataaccgccagtagctactttacgaacatgtttgctacgtggtcaccctctaaggcaaggcttcatttgcaaggccggtctaatgcctggagacctcaggtgaacaacccgaaagaatggctccaggtggactttcagaagaccatgaaagtaacaggtgtcactactcagggagttaagtccttggatactagcatgtatgtgaaggagttccttatttcctcatcacaagatggccaccagtggaccctcttctttcagaatggtaaggtcaaagtgtttcagggcaatcaagacagcttcacacccgtggtgaacagtcttgatcctccactcttgacacgataccttcgaatccatccacagtcttgggagcaccagattgcattgcgcatggaagtacttggatgcgaggctcaggacctctac

SEQ ID NO: 1102 - protein, 1457 aa, synthetic construct
  REGION 1..1457: note = Variant of human B-domain deleted Factor VIII
MQIELSTCFFLCLLRFCFSATRRYYLGAVELSWDYMQSDLGELPVDARFPPRVPKSFPFNTSVVYKKTLFVEFTDHLFNIAKPRPPWMGLLGPTIQAEVYDTVVITLKNMASHPVSLHAVGVSYWKASEGAEYDDQTSQREKEDDKVFPGGSHTYVWQVLKENGPMASDPPCLTYSYLSHVDLVKDLNSGLIGALLVCREGSLAKEKTQTLHKFILLFAVFDEGKSWHSETKNSLMQDRDAASARAWPKMHTVNGYVNRTLPGLIGCHRKSVYWHVIGMGTTPEVHSIFLEGHTFLVRNHRQASLGISPITLLTAQTLLMDLGQFLLFCHIPSHQHDGMEAYVKVDSCPEEPQLRMKNNEEAEDYDDDLTDSEMDVVRFDDDNSPSIIQARSVAKKHPKTWVHYIAAEEEDWDYAPLVLAPDDRSYKSQYLNNGPQRIGRKYKKVRFMAYTDETFKTREAIQHESGILGPLLYGEVGDTLLIIFKNQASRPYNIYPHGITDVRPLYSRRLPKGVKHLKDFPILPGEIFKYKWTVTVEDGPTKSDPRCLTRYYSSFVNMERDLASGLIGPLLICYKESVDQRGNQIMSDKRNVILFSVFDENRSWYLTENIQRFLPNPAGVQLEDPEFQASNIMHSINGYVFDSLQLSVCLHEVAYWYILSIGAQTDFLSVFFSGYTFKHKMVYEDTLTLFPFSGETVFMSMENPGLWILGCHNSDFRNRGMTALLKVSSCDKNTGDYYEDSYEDISAYFDSKNNAIEPRSFSQNPPVLKRHQREITRTTLQSDQEEIDYDDTISVEMKKEDFDIYDEDENQSPRSFQKKTRHYFIAAVERLWDYGMSSSPHVLRNRAQSGSVPQFKKVVFQEFTDGSFTQPLYRGELNEHLGLLGPYIRAEVEDNIMVTFRNQASRPYSFYSSLISYEEDQRQGAEPRKNFVKPNETKTYFWKVQHHMAPTKDEFDCKAWAYFSDVDLEKDVHSGLIGPLLVCHTNTLNPAHGRQVTVQEFALFFTIFDETKSWYFTENMERNCRAPCNIQMEDPTFKENYRFHAINGYIMDTLPGLVMAQDQRIRWYLLSMGSNENIHSIHFSGHVFTVRKKEEYKMALYNLYPGVFETVEMLPSKAGIWRVECLIGEHLHAGMSTLFLVYSNKCQTPLGMASGHIRDFQITASGQYGQWAPKLARLHYSGSINAWSTKEPFSWIKVDLLAPMIIHGIKTQGARQKFSSLYISQFIIMYSLDGKKWQTYRGNSTGTDMVFFGNVDSSGIKHNIFNPPIIARYIRLHPTHYSIRSTLRMELMGCDLNSCSMPLGMESKAISDAQITASSYFTNMFATWSPSKARLHLQGRSNAWRPQVNNPKEWLQVDFQKTMKVTGVTTQGVKSLDTSMYVKEFLISSSQDGHQWTLFFQNGKVKVFQGNQDSFTPVVNSLDPPLLTRYLRIHPQSWEHQIALRMEVLGCEAQDLY

SEQ ID NO: 1103 - DNA, 4371 bp, synthetic construct
  misc_feature 1..4371: note = Variant of human B-domain deleted Factor VIII
  source 1..4371: mol_type = other DNA
atgcagattgaactgtctacctgcttcttcctctgtttgctgaggttctgctttagcgccactagacggtactaccttggcgctgtggagctgtcctgggactatatgcagagtgatttgggagagcttcccgtcgacgcacgatttcctcctcgcgttccaaagtcatttccctttaacacaagcgtggtgtacaagaagacgctcttcgtcgaattcaccgatcacctgttcaatatcgccaaacccagaccaccatggatgggtcttttggggcctaccatacaagcggaggtgtatgacacagttgttatcactctcaagaacatggcttctcatccggtaagtcttcacgcagtgggcgtgtcctactggaaagcttcagaaggagccgagtatgatgatcagacatcccagagggagaaagaagacgacaaggtatttccaggtgggtctcatacctatgtgtggcaagtgctcaaagagaatggccctatggcaagcgatccgccgtgtttgacttacagctacctttcacacgttgacctcgtcaaggacctcaactccgggttgattggagccttgttggtatgcagggaaggatctcttgccaaagagaagacacagaccctccacaagtttatccttctctttgctgtgttcgatgagggcaaaagttggcatagcgaaacgaagaattccctcatgcaggatcgcgacgcagccagcgccagagcttggcccaagatgcacactgtgaacggatatgtcaataggacgcttcctggcttgattgggtgtcatcggaaaagtgtctactggcacgtgatcggaatggggacaacaccagaggtccactccatatttctcgaaggccataccttccttgttcgaaaccacagacaggcatccttggggatctctcccattacctttctcactgcccaaacgctccttatggacttgggtcagttccttctcttttgccatatcccgtcacaccagcatgatggtatggaagcttatgtgaaagtcgacagttgtcctgaggagccacagttgcgcatgaagaataatgaagaagccgaggattacgacgacgatctcaccgattctgagatggacgtggtgaggtttgatgacgacaactctccctccatcattcaagctcggagcgtggcgaagaaacaccccaagacttgggtccactatatagcggcggaagaggaggattgggattacgctcctcttgtattggcaccagatgaccgctcatacaaaagccagtacctcaacaacggaccgcagagaattggccggaagtataagaaagtgcgatttatggcctatacagacgaaacctttaagacaagggaggccatccagcatgagagtgggattttgggacctcttctttacggcgaagttggtgataccctcctcatcatcttcaagaatcaagcttctcgcccctataacatttacccacacgggatcactgacgttaggcctttgtatagcagaagacttcccaaaggcgtgaagcatctcaaagacttccccattttgccaggcgagatctttaagtacaaatggaccgtcacagtggaagatggaccgactaaatcagaccctcgatgccttacgcggtactattcctccttcgtgaatatggagagagatttggcaagcggactcataggaccactcctcatctgttacaaggaatctgtagaccagaggggtaaccagattatgagtgataaacgcaatgtgatcctttttagcgtcttcgacgagaaccggtcctggtacttgaccgagaatatacaaaggttccttcccaaccccgcaggcgttcagttggaagaccctgagtttcaggccagcaatattatgcactcaatcaacggctatgtgtttgatagtctccagctttctgtttgcctccatgaagtagcctattggtacatcttgtcaattggtgctcaaacagacttcctctccgtcttcttctccggctacacctttaagcacaagaatgtgtatgaggacactctcacactctttccattttctggagaaaccgtgttcatgagcatggagaatccaggcctttggatcttgggttgccacaacagtgattttcgcaatcggggaatgactgctctcctcaaagtcagcagctgtgataagaacacaggcgactattacgaagattcttacgaggacataagtgcctactttgactccaagaataacgccattgagcccagatcattctcccagaatcctcccgtgcttaaaaggcatcagcgcgaaatcaccagaactactcttcagtctgatcaagaggagattgactatgacgacaccataagcgtggaaatgaagaaggaggatttcgatatctatgacgaagatgagaaccagtctccgcggagctttcagaagaagacgcgacactacttcattgcagcagtcgaaaggctttgggactacggtatgtcatcatcccctcatgtgttgcgcaatagagctcagagtggaagtgttccacagttcaagaaagtcgtctttcaagagtttacagatggcagcttcacacagcctctctatcggggcgagcttaacgaacatttgggactccttggtccctatatccgagccgaagtggaggacaacattatggttacctttaggaatcaagcctctcgcccctacagcttctactcctccctcatcagttatgaggaggatcagagacaaggcgctgaaccacggaagaactttgtgaaaccgaatgagacgaagacctacttctggaaagtacagcaccacatggcccccacaaaagacgaattcgattgcaaagcatgggcgtatttttcagacgttgacttggagaaagatgtacattcaggacttattggtcctttgttggtgtgtcacactaacactctcaatccagcccatggcaggcaggtgacagtccaggaattcgctcttttctttaccatctttgatgagaccaagtcctggtacttcacggaaaacatggagcgcaattgcagagccccctgtaacatacagatggaggaccctacctttaaggaaaattatcggttccacgcaatcaacggatacattatggatacactccctggccttgtgatggctcaggaccaacgaatcaggtggtacctcctcagcatgggttctaatgagaacatacactccattcacttttcaggacatgtgttcactgtccggaagaaagaagagtataagatggccctctacaatttgtatccaggcgtgtttgagaccgttgaaatgcttccctctaaagctggcatctggagagtagagtgcttgatcggagaacatcttcacgcaggtatgagcaccttgttcctcgtgtacagcaacaaatgtcagaccccacttggcatggccagtggacacattcgcgactttcagatcacagcatctggccagtatggacaatgggccccaaagttggctcgcctccattactccggtagcataaatgcgtggtccactaaagaacctttcagctggattaaggtcgatcttcttgcccccatgatcatccacggcattaagacacagggagcgaggcagaaattctcctccctctacatctcacagttcattattatgtatagtttggacggcaagaagtggcaaacttatagaggtaacagtactggaacagacatggtgttcttcggcaacgttgatagctctggcatcaaacacaacatctttaatcctcccataatagctcggtacatcagattgcatccgacccactacagcattaggagtacactccgaatggagcttatgggttgcgacttgaattcctgttcaatgccactcggaatggagtctaaagccatctctgatgcacagataaccgccagtagctactttacgaacatgtttgctacgtggtcaccctctaaggcaaggcttcatttgcaaggccggtctaatgcctggagacctcaggtgaacaacccgaaagaatggctccaggtggactttcagaagaccatgaaagtaacaggtgtcactactcagggagttaagtccttggatactagcatgtatgtgaaggagttccttatttcctcatcacaagatggccaccagtggaccctcttctttcagaatggtaaggtcaaagtgtttcagggcaatcaagacagcttcacacccgtggtgaacagtcttgatcctccactcttgacacgataccttcgaatccatccacagtcttgggagcaccagattgcattgcgcatggaagtacttggatgcgaggctcaggacctctac

SEQ ID NO: 1104 - protein, 1457 aa, synthetic construct
  REGION 1..1457: note = Variant of human B-domain deleted Factor VIII
MQIELSTCFFLCLLRFCFSATRRYYLGAVELSWDYMQSDLGELPVDARFPPRVPKSFPFNTSVVYKKTLFVEFTDHLFNIAKPRPPWMGLLGPTIQAEVYDTVVITLKNMASHPVSLHAVGVSYWKASEGAEYDDQTSQREKEDDKVFPGGSHTYVWQVLKENGPMASDPPCLTYSYLSHVDLVKDLNSGLIGALLVCREGSLAKEKTQTLHKFILLFAVFDEGKSWHSETKNSLMQDRDAASARAWPKMHTVNGYVNRTLPGLIGCHRKSVYWHVIGMGTTPEVHSIFLEGHTFLVRNHRQASLGISPITFLTAQTLLMDLGQFLLFCHIPSHQHDGMEAYVKVDSCPEEPQLRMKNNEEAEDYDDDLTDSEMDVVRFDDDNSPSIIQARSVAKKHPKTWVHYIAAEEEDWDYAPLVLAPDDRSYKSQYLNNGPQRIGRKYKKVRFMAYTDETFKTREAIQHESGILGPLLYGEVGDTLLIIFKNQASRPYNIYPHGITDVRPLYSRRLPKGVKHLKDFPILPGEIFKYKWTVTVEDGPTKSDPRCLTRYYSSFVNMERDLASGLIGPLLICYKESVDQRGNQIMSDKRNVILFSVFDENRSWYLTENIQRFLPNPAGVQLEDPEFQASNIMHSINGYVFDSLQLSVCLHEVAYWYILSIGAQTDFLSVFFSGYTFKHKNVYEDTLTLFPFSGETVFMSMENPGLWILGCHNSDFRNRGMTALLKVSSCDKNTGDYYEDSYEDISAYFDSKNNAIEPRSFSQNPPVLKRHQREITRTTLQSDQEEIDYDDTISVEMKKEDFDIYDEDENQSPRSFQKKTRHYFIAAVERLWDYGMSSSPHVLRNRAQSGSVPQFKKVVFQEFTDGSFTQPLYRGELNEHLGLLGPYIRAEVEDNIMVTFRNQASRPYSFYSSLISYEEDQRQGAEPRKNFVKPNETKTYFWKVQHHMAPTKDEFDCKAWAYFSDVDLEKDVHSGLIGPLLVCHTNTLNPAHGRQVTVQEFALFFTIFDETKSWYFTENMERNCRAPCNIQMEDPTFKENYRFHAINGYIMDTLPGLVMAQDQRIRWYLLSMGSNENIHSIHFSGHVFTVRKKEEYKMALYNLYPGVFETVEMLPSKAGIWRVECLIGEHLHAGMSTLFLVYSNKCQTPLGMASGHIRDFQITASGQYGQWAPKLARLHYSGSINAWSTKEPFSWIKVDLLAPMIIHGIKTQGARQKFSSLYISQFIIMYSLDGKKWQTYRGNSTGTDMVFFGNVDSSGIKHNIFNPPIIARYIRLHPTHYSIRSTLRMELMGCDLNSCSMPLGMESKAISDAQITASSYFTNMFATWSPSKARLHLQGRSNAWRPQVNNPKEWLQVDFQKTMKVTGVTTQGVKSLDTSMYVKEFLISSSQDGHQWTLFFQNGKVKVFQGNQDSFTPVVNSLDPPLLTRYLRIHPQSWEHQIALRMEVLGCEAQDLY

SEQ ID NO: 1105 - DNA, 4371 bp, synthetic construct
  misc_feature 1..4371: note = Variant of human B-domain deleted Factor VIII
  source 1..4371: mol_type = other DNA
atgcagattgaactgtctacctgcttcttcctctgtttgctgaggttctgctttagcgccactagacggtactaccttggcgctgtggagctgtcctgggactatatgcagagtgatttgggagagcttcccgtcgacgcacgatttcctcctcgcgttccaaagtcatttccctttaacacaagcgtggtgtacaagaagacgctcttcgtcgaattcaccgatcacctgttcaatatcgccaaacccagaccaccatggatgggtcttttggggcctaccatacaagcggaggtgtatgacacagttgttatcactctcaagaacatggcttctcatccggtaagtcttcacgcagtgggcgtgtcctactggaaagcttcagaaggagccgagtatgatgatcagacatcccagagggagaaagaagacgacaaggtatttccaggtgggtctcatacctatgtgtggcaagtgctcaaagagaatggccctatggcaagcgatccgccgtgtttgacttacagctacctttcacacgttgacctcgtcaaggacctcaactccgggttgattggagccttgttggtatgcagggaaggatctcttgccaaagagaagacacagaccctccacaagtttatccttctctttgctgtgttcgatgagggcaaaagttggcatagcgaaacgaagaattccctcatgcaggatcgcgacgcagccagcgccagagcttggcccaagatgcacactgtgaacggatatgtcaataggacgcttcctggcttgattgggtgtcatcggaaaagtgtctactggcacgtgatcggaatggggacaacaccagaggtccactccatatttctcgaaggccataccttccttgttcgaaaccacagacaggcatccttggggatctctcccattacctttctcactgcccaaacgctccttatggacttgggtcagttccttctcttttgccatatcccgtcacaccagcatgatggtatggaagcttatgtgaaagtcgacagttgtcctgaggagccacagttgcgcatgaagaataatgaagaagccgaggattacgacgacgatctcaccgattctgagatggacgtggtgaggtttgatgacgacaactctccctccatcattcaagctcggagcgtggcgaagaaacaccccaagacttgggtccactatatagcggcggaagaggaggattgggattacgctcctcttgtattggcaccagatgaccgctcatacaaaagccagtacctcaacaacggaccgcagagaattggccggaagtataagaaagtgcgatttatggcctatacagacgaaacctttaagacaagggaggccatccagcatgagagtgggattttgggacctcttctttacggcgaagttggtgataccctcctcatcatcttcaagaatcaagcttctcgcccctataacatttacccacacgggatcactgacgttaggcctttgtatagcagaagacttcccaaaggcgtgaagcatctcaaagacttccccattttgccaggcgagatctttaagtacaaatggaccgtcacagtggaagatggaccgactaaatcagaccctcgatgccttacgcggtactattcctccttcgtgaatatggagagagatttggcaagcggactcataggaccactcctcatctgttacaaggaatctgtagaccagaggggtaaccagattatgagtgataaacgcaatgtgatcctttttagcgtcttcgacgagaaccggtcctggtacttgaccgagaatatacaaaggttccttcccaaccccgcaggcgttcagttggaagaccctgagtttcaggccagcaatattatgcactcaatcaacggctatgtgtttgatagtctccagctttctgtttgcctccatgaagtagcctattggtacatcttgtcaattggtgctcaaacagacttcctctccgtcttcttctccggctacacctttaagcacaagatggtgtatgaggacactctcacactctttccattttctggagaaaccgtgttcatgagcatggagaatccaggcctttggatcttgggttgccacaacagtgattttcgcaatcggggaatgactgctctcctcaaagtcagcagctgtgataagaacacaggcgactattacgaagattcttacgaggacataagtgcctactttgactccaagaataacgccattgagcccagatcattctcccagaatcctcccgtgcttaaaaggcatcagcgcgaaatcaccagaactactcttcagtctgatcaagaggagattgactatgacgacaccataagcgtggaaatgaagaaggaggatttcgatatctatgacgaagatgagaaccagtctccgcggagctttcagaagaagacgcgacactacttcattgcagcagtcgaaaggctttgggactacggtatgtcaacgtcccctcatgtgttgcgcaatagagctcagagtggaagtgttccacagttcaagaaagtcgtctttcaagagtttacagatggcagcttcacacagcctctctatcggggcgagcttaacgaacatttgggactccttggtccctatatccgagccgaagtggaggacaacattatggttacctttaggaatcaagcctctcgcccctacagcttctactcctccctcatcagttatgaggaggatcagagacaaggcgctgaaccacggaagaactttgtgaaaccgaatgagacgaagacctacttctggaaagtacagcaccacatggcccccacaaaagacgaattcgattgcaaagcatgggcgtatttttcagacgttgacttggagaaagatgtacattcaggacttattggtcctttgttggtgtgtcacactaacactctcaatccagcccatggcaggcaggtgacagtccaggaattcgctcttttctttaccatctttgatgagaccaagtcctggtacttcacggaaaacatggagcgcaattgcagagccccctgtaacatacagatggaggaccctacctttaaggaaaattatcggttccacgcaatcaacggatacattatggatacactccctggccttgtgatggctcaggaccaacgaatcaggtggtacctcctcagcatgggttctaatgagaacatacactccattcacttttcaggacatgtgttcactgtccggaagaaagaagagtataagatggccctctacaatttgtatccaggcgtgtttgagaccgttgaaatgcttccctctaaagctggcatctggagagtagagtgcttgatcggagaacatcttcacgcaggtatgagcaccttgttcctcgtgtacagcaacaaatgtcagaccccacttggcatggccagtggacacattcgcgactttcagatcacagcatctggccagtatggacaatgggccccaaagttggctcgcctccattactccggtagcataaatgcgtggtccactaaagaacctttcagctggattaaggtcgatcttcttgcccccatgatcatccacggcattaagacacagggagcgaggcagaaattctcctccctctacatctcacagttcattattatgtatagtttggacggcaagaagtggcaaacttatagaggtaacagtactggaacagacatggtgttcttcggcaacgttgatagctctggcatcaaacacaacatctttaatcctcccataatagctcggtacatcagattgcatccgacccactacagcattaggagtacactccgaatggagcttatgggttgcgacttgaattcctgttcaatgccactcggaatggagtctaaagccatctctgatgcacagataaccgccagtagctactttacgaacatgtttgctacgtggtcaccctctaaggcaaggcttcatttgcaaggccggtctaatgcctggagacctcaggtgaacaacccgaaagaatggctccaggtggactttcagaagaccatgaaagtaacaggtgtcactactcagggagttaagtccttggatactagcatgtatgtgaaggagttccttatttcctcatcacaagatggccaccagtggaccctcttctttcagaatggtaaggtcaaagtgtttcagggcaatcaagacagcttcacacccgtggtgaacagtcttgatcctccactcttgacacgataccttcgaatccatccacagtcttgggagcaccagattgcattgcgcatggaagtacttggatgcgaggctcaggacctctac

SEQ ID NO: 1106 - protein, 1457 aa, synthetic construct
  REGION 1..1457: note = Variant of human B-domain deleted Factor VIII
MQIELSTCFFLCLLRFCFSATRRYYLGAVELSWDYMQSDLGELPVDARFPPRVPKSFPFNTSVVYKKTLFVEFTDHLFNIAKPRPPWMGLLGPTIQAEVYDTVVITLKNMASHPVSLHAVGVSYWKASEGAEYDDQTSQREKEDDKVFPGGSHTYVWQVLKENGPMASDPPCLTYSYLSHVDLVKDLNSGLIGALLVCREGSLAKEKTQTLHKFILLFAVFDEGKSWHSETKNSLMQDRDAASARAWPKMHTVNGYVNRTLPGLIGCHRKSVYWHVIGMGTTPEVHSIFLEGHTFLVRNHRQASLGISPITFLTAQTLLMDLGQFLLFCHIPSHQHDGMEAYVKVDSCPEEPQLRMKNNEEAEDYDDDLTDSEMDVVRFDDDNSPSIIQARSVAKKHPKTWVHYIAAEEEDWDYAPLVLAPDDRSYKSQYLNNGPQRIGRKYKKVRFMAYTDETFKTREAIQHESGILGPLLYGEVGDTLLIIFKNQASRPYNIYPHGITDVRPLYSRRLPKGVKHLKDFPILPGEIFKYKWTVTVEDGPTKSDPRCLTRYYSSFVNMERDLASGLIGPLLICYKESVDQRGNQIMSDKRNVILFSVFDENRSWYLTENIQRFLPNPAGVQLEDPEFQASNIMHSINGYVFDSLQLSVCLHEVAYWYILSIGAQTDFLSVFFSGYTFKHKMVYEDTLTLFPFSGETVFMSMENPGLWILGCHNSDFRNRGMTALLKVSSCDKNTGDYYEDSYEDISAYFDSKNNAIEPRSFSQNPPVLKRHQREITRTTLQSDQEEIDYDDTISVEMKKEDFDIYDEDENQSPRSFQKKTRHYFIAAVERLWDYGMSTSPHVLRNRAQSGSVPQFKKVVFQEFTDGSFTQPLYRGELNEHLGLLGPYIRAEVEDNIMVTFRNQASRPYSFYSSLISYEEDQRQGAEPRKNFVKPNETKTYFWKVQHHMAPTKDEFDCKAWAYFSDVDLEKDVHSGLIGPLLVCHTNTLNPAHGRQVTVQEFALFFTIFDETKSWYFTENMERNCRAPCNIQMEDPTFKENYRFHAINGYIMDTLPGLVMAQDQRIRWYLLSMGSNENIHSIHFSGHVFTVRKKEEYKMALYNLYPGVFETVEMLPSKAGIWRVECLIGEHLHAGMSTLFLVYSNKCQTPLGMASGHIRDFQITASGQYGQWAPKLARLHYSGSINAWSTKEPFSWIKVDLLAPMIIHGIKTQGARQKFSSLYISQFIIMYSLDGKKWQTYRGNSTGTDMVFFGNVDSSGIKHNIFNPPIIARYIRLHPTHYSIRSTLRMELMGCDLNSCSMPLGMESKAISDAQITASSYFTNMFATWSPSKARLHLQGRSNAWRPQVNNPKEWLQVDFQKTMKVTGVTTQGVKSLDTSMYVKEFLISSSQDGHQWTLFFQNGKVKVFQGNQDSFTPVVNSLDPPLLTRYLRIHPQSWEHQIALRMEVLGCEAQDLY

SEQ ID NO: 1107 - DNA, 4371 bp, synthetic construct
  misc_feature 1..4371: note = Variant of human B-domain deleted Factor VIII
  source 1..4371: mol_type = other DNA
atgcagattgaactgtctacctgcttcttcctctgtttgctgaggttctgctttagcgccactagacggtactaccttggcgctgtggagctgtcctgggactatatgcagagtgatttgggagagcttcccgtcgacgcacgatttcctcctcgcgttccaaagtcatttccctttaacacaagcgtggtgtacaagaagacgctcttcgtcgaattcaccgatcacctgttcaatatcgccaaacccagaccaccatggatgggtcttttggggcctaccatacaagcggaggtgtatgacacagttgttatcactctcaagaacatggcttctcatccggtaagtcttcacgcagtgggcgtgtcctactggaaagcttcagaaggagccgagtatgatgatcagacatcccagagggagaaagaagacgacaaggtatttccaggtgggtctcatacctatgtgtggcaagtgctcaaagagaatggccctatggcaagcgatccgccgtgtttgacttacagctacctttcacacgttgacctcgtcaaggacctcaactccgggttgattggagccttgttggtatgcagggaaggatctcttgccaaagagaagacacagaccctccacaagtttatccttctctttgctgtgttcgatgagggcaaaagttggcatagcgaaacgaagaattccctcatgcaggatcgcgacgcagccagcgccagagcttggcccaagatgcacactgtgaacggatatgtcaataggacgcttcctggcttgattgggtgtcatcggaaaagtgtctactggcacgtgatcggaatggggacaacaccagaggtccactccatatttctcgaaggccataccttccttgttcgaaaccacagacaggcatccttggggatctctcccattacctttctcactgcccaaacgctccttatggacttgggtcagttccttctcttttgccatatcccgtcacaccagcatgatggtatggaagcttatgtgaaagtcgacagttgtcctgaggagccacagttgcgcatgaagaataatgaagaagccgaggattacgacgacgatctcaccgattctgagatggacgtggtgaggtttgatgacgacaactctccctccatcattcaagctcggagcgtggcgaagaaacaccccaagacttgggtccactatatagcggcggaagaggaggattgggattacgctcctcttgtattggcaccagatgaccgctcatacaaaagccagtacctcaacaacggaccgcagagaattggccggaagtataagaaagtgcgatttatggcctatacagacgaaacctttaagacaagggaggccatccagcatgagagtgggattttgggacctcttctttacggcgaagttggtgataccctcctcatcatcttcaagaatcaagcttctcgcccctataacatttacccacacgggatcactgacgttaggcctttgtatagcagaagacttcccaaaggcgtgaagcatctcaaagacttccccattttgccaggcgagatctttaagtacaaatggaccgtcacacgggaagatggaccgactaaatcagaccctcgatgccttacgcggtactattcctccttcgtgaatatggagagagatttggcaagcggactcataggaccactcctcatctgttacaaggaatctgtagaccagaggggtaaccagattatgagtgataaacgcaatgtgatcctttttagcgtcttcgacgagaaccggtcctggtacttgaccgagaatatacaaaggttccttcccaaccccgcaggcgttcagttggaagaccctgagtttcaggccagcaatattatgcactcaatcaacggctatgtgtttgatagtctccagctttctgtttgcctccatgaagtagcctattggtacatcttgtcaattggtgctcaaacagacttcctctccgtcttcttctccggctacacctttaagcacaagatggtgtatgaggacactctcacactctttccattttctggagaaaccgtgttcatgagcatggagaatccaggcctttggatcttgggttgccacaacagtgattttcgcaatcggggaatgactgctctcctcaaagtcagcagctgtgataagaacacaggcgactattacgaagattcttacgaggacataagtgcctactttgactccaagaataacgccattgagcccagatcattctcccagaatcctcccgtgcttaaaaggcatcagcgcgaaatcaccagaactactcttcagtctgatcaagaggagattgactatgacgacaccataagcgtggaaatgaagaaggaggatttcgatatctatgacgaagatgagaaccagtctccgcggagctttcagaagaagacgcgacactacttcattgcagcagtcgaaaggctttgggactacggtatgtcatcatcccctcatgtgttgcgcaatagagctcagagtggaagtgttccacagttcaagaaagtcgtctttcaagagtttacagatggcagcttcacacagcctctctatcggggcgagcttaacgaacatttgggactccttggtccctatatccgagccgaagtggaggacaacattatggttacctttaggaatcaagcctctcgcccctacagcttctactcctccctcatcagttatgaggaggatcagagacaaggcgctgaaccacggaagaactttgtgaaaccgaatgagacgaagacctacttctggaaagtacagcaccacatggcccccacaaaagacgaattcgattgcaaagcatgggcgtatttttcagacgttgacttggagaaagatgtacattcaggacttattggtcctttgttggtgtgtcacactaacactctcaatccagcccatggcaggcaggtgacagtccaggaattcgctcttttctttaccatctttgatgagaccaagtcctggtacttcacggaaaacatggagcgcaattgcagagccccctgtaacatacagatggaggaccctacctttaaggaaaattatcggttccacgcaatcaacggatacattatggatacactccctggccttgtgatggctcaggaccaacgaatcaggtggtacctcctcagcatgggttctaatgagaacatacactccattcacttttcaggacatgtgttcactgtccggaagaaagaagagtataagatggccctctacaatttgtatccaggcgtgtttgagaccgttgaaatgcttccctctaaagctggcatctggagagtagagtgcttgatcggagaacatcttcacgcaggtatgagcaccttgttcctcgtgtacagcaacaaatgtcagaccccacttggcatggccagtggacacattcgcgactttcagatcacagcatctggccagtatggacaatgggccccaaagttggctcgcctccattactccggtagcataaatgcgtggtccactaaagaacctttcagctggattaaggtcgatcttcttgcccccatgatcatccacggcattaagacacagggagcgaggcagaaattctcctccctctacatctcacagttcattattatgtatagtttggacggcaagaagtggcaaacttatagaggtaacagtactggaacagacatggtgttcttcggcaacgttgatagctctggcatcaaacacaacatctttaatcctcccataatagctcggtacatcagattgcatccgacccactacagcattaggagtacactccgaatggagcttatgggttgcgacttgaattcctgttcaatgccactcggaatggagtctaaagccatctctgatgcacagataaccgccagtagctactttacgaacatgtttgctacgtggtcaccctctaaggcaaggcttcatttgcaaggccggtctaatgcctggagacctcaggtgaacaacccgaaagaatggctccaggtggactttcagaagaccatgaaagtaacaggtgtcactactcagggagttaagtccttggatactagcatgtatgtgaaggagttccttatttcctcatcacaagatggccaccagtggaccctcttctttcagaatggtaaggtcaaagtgtttcagggcaatcaagacagcttcacacccgtggtgaacagtcttgatcctccactcttgacacgataccttcgaatccatccacagtcttgggagcaccagattgcattgcgcatggaagtacttggatgcgaggctcaggacctctac

SEQ ID NO: 1108 - protein, 1457 aa, synthetic construct
  REGION 1..1457: note = Variant of human B-domain deleted Factor VIII
MQIELSTCFFLCLLRFCFSATRRYYLGAVELSWDYMQSDLGELPVDARFPPRVPKSFPFNTSVVYKKTLFVEFTDHLFNIAKPRPPWMGLLGPTIQAEVYDTVVITLKNMASHPVSLHAVGVSYWKASEGAEYDDQTSQREKEDDKVFPGGSHTYVWQVLKENGPMASDPPCLTYSYLSHVDLVKDLNSGLIGALLVCREGSLAKEKTQTLHKFILLFAVFDEGKSWHSETKNSLMQDRDAASARAWPKMHTVNGYVNRTLPGLIGCHRKSVYWHVIGMGTTPEVHSIFLEGHTFLVRNHRQASLGISPITFLTAQTLLMDLGQFLLFCHIPSHQHDGMEAYVKVDSCPEEPQLRMKNNEEAEDYDDDLTDSEMDVVRFDDDNSPSIIQARSVAKKHPKTWVHYIAAEEEDWDYAPLVLAPDDRSYKSQYLNNGPQRIGRKYKKVRFMAYTDETFKTREAIQHESGILGPLLYGEVGDTLLIIFKNQASRPYNIYPHGITDVRPLYSRRLPKGVKHLKDFPILPGEIFKYKWTVTREDGPTKSDPRCLTRYYSSFVNMERDLASGLIGPLLICYKESVDQRGNQIMSDKRNVILFSVFDENRSWYLTENIQRFLPNPAGVQLEDPEFQASNIMHSINGYVFDSLQLSVCLHEVAYWYILSIGAQTDFLSVFFSGYTFKHKMVYEDTLTLFPFSGETVFMSMENPGLWILGCHNSDFRNRGMTALLKVSSCDKNTGDYYEDSYEDISAYFDSKNNAIEPRSFSQNPPVLKRHQREITRTTLQSDQEEIDYDDTISVEMKKEDFDIYDEDENQSPRSFQKKTRHYFIAAVERLWDYGMSSSPHVLRNRAQSGSVPQFKKVVFQEFTDGSFTQPLYRGELNEHLGLLGPYIRAEVEDNIMVTFRNQASRPYSFYSSLISYEEDQRQGAEPRKNFVKPNETKTYFWKVQHHMAPTKDEFDCKAWAYFSDVDLEKDVHSGLIGPLLVCHTNTLNPAHGRQVTVQEFALFFTIFDETKSWYFTENMERNCRAPCNIQMEDPTFKENYRFHAINGYIMDTLPGLVMAQDQRIRWYLLSMGSNENIHSIHFSGHVFTVRKKEEYKMALYNLYPGVFETVEMLPSKAGIWRVECLIGEHLHAGMSTLFLVYSNKCQTPLGMASGHIRDFQITASGQYGQWAPKLARLHYSGSINAWSTKEPFSWIKVDLLAPMIIHGIKTQGARQKFSSLYISQFIIMYSLDGKKWQTYRGNSTGTDMVFFGNVDSSGIKHNIFNPPIIARYIRLHPTHYSIRSTLRMELMGCDLNSCSMPLGMESKAISDAQITASSYFTNMFATWSPSKARLHLQGRSNAWRPQVNNPKEWLQVDFQKTMKVTGVTTQGVKSLDTSMYVKEFLISSSQDGHQWTLFFQNGKVKVFQGNQDSFTPVVNSLDPPLLTRYLRIHPQSWEHQIALRMEVLGCEAQDLY

SEQ ID NO: 1109 - DNA, 4371 bp, synthetic construct
  misc_feature 1..4371: note = Variant of human B-domain deleted Factor VIII
  source 1..4371: mol_type = other DNA
atgcagattgaactgtctacctgcttcttcctctgtttgctggggttctgctttagcgccactagacggtactaccttggcgctgtggagctgtcctgggactatatgcagagtgatttgggagagcttcccgtcgacgcacgatttcctcctcgcgttccaaagtcatttccctttaacacaagcgtggtgtacaagaagacgctcttcgtcgaattcaccgatcacctgttcaatatcgccaaacccagaccaccatggatgggtcttttggggcctaccatacaagcggaggtgtatgacacagttgttatcactctcaagaacatggcttctcatccggtaagtcttcacgcagtgggcgtgtcctactggaaagcttcagaaggagccgagtatgatgatcagacatcccagagggagaaagaagacgacaaggtatttccaggtgggtctcatacctatgtgtggcaagtgctcaaagagaatggccctatggcaagcgatccgccgtgtttgacttacagctacctttcacacgttgacctcgtcaaggacctcaactccgggttgattggagccttgttggtatgcagggaaggatctcttgccaaagagaagacacagaccctccacaagtttatccttctctttgctgtgttcgatgagggcaaaagttggcatagcgaaacgaagaattccctcatgcaggatcgcgacgcagccagcgccagagcttggcccaagatgcacactgtgaacggatatgtcaataggacgcttcctggcttgattgggtgtcatcggaaaagtgtctactggcacgtgatcggaatggggacaacaccagaggtccactccatatttctcgaaggccataccttccttgttcgaaaccacagacaggcatccttggggatctctcccattacctttctcactgcccaaacgctccttatggacttgggtcagttccttctcttttgccatatcccgtcacaccagcatgatggtatggaagcttatgtgaaagtcgacagttgtcctgaggagccacagttgcgcatgaagaataatgaagaagccgaggattacgacgacgatctcaccgattctgagatggacgtggtgaggtttgatgacgacaactctccctccatcattcaagctcggagcgtggcgaagaaacaccccaagacttgggtccactatatagcggcggaagaggaggattgggattacgctcctcttgtattggcaccagatgaccgctcatacaaaagccagtacctcaacaacggaccgcagagaattggccggaagtataagaaagtgcgatttatggcctatacagacgaaacctttaagacaagggaggccatccagcatgagagtgggattttgggacctcttctttacggcgaagttggtgataccctcctcatcatcttcaagaatcaagcttctcgcccctataacatttacccacacgggatcactgacgttaggcctttgtatagcagaagacttcccaaaggcgtgaagcatctcaaagacttccccattttgccaggcgagatctttaagtacaaatggaccgtcacagtggaagatggaccgactaaatcagaccctcgatgccttacgcggtactattcctccttcgtgaatatggagagagatttggcaagcggactcataggaccactcctcatctgttacaaggaatctgtagaccagaggggtaaccagattatgagtgataaacgcaatgtgatcctttttagcgtcttcgacgagaaccggtcctggtacttgaccgagaatatacaaaggttccttcccaaccccgcaggcgttcagttggaagaccctgagtttcaggccagcaatattatgcactcaatcaacggctatgtgtttgatagtctccagctttctgtttgcctccatgaagtagcctattggtacatcttgtcaattggtgctcaaacagacttcctctccgtcttcttctccggctacacctttaagcacaagatggtgtatgaggacactctcacactctttccattttctggagaaaccgtgttcatgagcatggagaatccaggcctttggatcttgggttgccacaacagtgattttcgcaatcggggaatgactgctctcctcaaagtcagcagctgtgataagaacacaggcgactattacgaagattcttacgaggacataagtgcctactttgactccaagaataacgccattgagcccagatcattctcccagaatcctcccgtgcttaaaaggcatcagcgcgaaatcaccagaactactcttcagtctgatcaagaggagattgactatgacgacaccataagcgtggaaatgaagaaggaggatttcgatatctatgacgaagatgagaaccagtctccgcggagctttcagaagaagacgcgacactacttcattgcagcagtcgaaaggctttgggactacggtatgtcatcatcccctcatgtgttgcgcaatagagctcagagtggaagtgttccacagttcaagaaagtcgtctttcaagagtttacagatggcagcttcacacagcctctctatcggggcgagcttaacgaacatttgggactccttggtccctatatccgagccgaagtggaggacaacattatggttacctttaggaatcaagcctctcgcccctacagcttctactcctccctcatcagttatgaggaggatcagagacaaggcgctgaaccacggaagaactttgtgaaaccgaatgagacgaagacctacttctggaaagtacagcaccacatggcccccacaaaagacgaattcgattgcaaagcatgggcgtatttttcagacgttgacttggagaaagatgtacattcaggacttattggtcctttgttggtgtgtcacactaacactctcaatccagcccatggcaggcaggtgacagtccaggaattcgctcttttctttaccatctttgatgagaccaagtcctggtacttcacggaaaacatggagcgcaattgcagagccccctgtaacatacagatggaggaccctacctttaaggaaaattatcggttccacgcaatcaacggatacattatggatacactccctggccttgtgatggctcaggaccaacgaatcaggtggtacctcctcagcatgggttctaatgagaacatacactccattcacttttcaggacatgtgttcactgtccggaagaaagaagagtataagatggccctctacaatttgtatccaggcgtgtttgagaccgttgaaatgcttccctctaaagctggcatctggagagtagagtgcttgatcggagaacatcttcacgcaggtatgagcaccttgttcctcgtgtacagcaacaaatgtcagaccccacttggcatggccagtggacacattcgcgactttcagatcacagcatctggccagtatggacaatgggccccaaagttggctcgcctccattactccggtagcataaatgcgtggtccactaaagaacctttcagctggattaaggtcgatcttcttgcccccatgatcatccacggcattaagacacagggagcgaggcagaaattctcctccctctacatctcacagttcattattatgtatagtttggacggcaagaagtggcaaacttatagaggtaacagtactggaacagacatggtgttcttcggcaacgttgatagctctggcatcaaacacaacatctttaatcctcccataatagctcggtacatcagattgcatccgacccactacagcattaggagtacactccgaatggagcttatgggttgcgacttgaattcctgttcaatgccactcggaatggagtctaaagccatctctgatgcacagataaccgccagtagctactttacgaacatgtttgctacgtggtcaccctctaaggcaaggcttcatttgcaaggccggtctaatgcctggagacctcaggtgaacaacccgaaagaatggctccaggtggactttcagaagaccatgaaagtaacaggtgtcactactcagggagttaagtccttggatactagcatgtatgtgaaggagttccttatttcctcatcacaagatggccaccagtggaccctcttctttcagaatggtaaggtcaaagtgtttcagggcaatcaagacagcttcacacccgtggtgaacagtcttgatcctccactcttgacacgataccttcgaatccatccacagtcttgggagcaccagattgcattgcgcatggaagtacttggatgcgaggctcaggacctctac

SEQ ID NO: 1110 - protein, 1457 aa, synthetic construct
  REGION 1..1457: note = Variant of human B-domain deleted Factor VIII
MQIELSTCFFLCLLGFCFSATRRYYLGAVELSWDYMQSDLGELPVDARFPPRVPKSFPFNTSVVYKKTLFVEFTDHLFNIAKPRPPWMGLLGPTIQAEVYDTVVITLKNMASHPVSLHAVGVSYWKASEGAEYDDQTSQREKEDDKVFPGGSHTYVWQVLKENGPMASDPPCLTYSYLSHVDLVKDLNSGLIGALLVCREGSLAKEKTQTLHKFILLFAVFDEGKSWHSETKNSLMQDRDAASARAWPKMHTVNGYVNRTLPGLIGCHRKSVYWHVIGMGTTPEVHSIFLEGHTFLVRNHRQASLGISPITFLTAQTLLMDLGQFLLFCHIPSHQHDGMEAYVKVDSCPEEPQLRMKNNEEAEDYDDDLTDSEMDVVRFDDDNSPSIIQARSVAKKHPKTWVHYIAAEEEDWDYAPLVLAPDDRSYKSQYLNNGPQRIGRKYKKVRFMAYTDETFKTREAIQHESGILGPLLYGEVGDTLLIIFKNQASRPYNIYPHGITDVRPLYSRRLPKGVKHLKDFPILPGEIFKYKWTVTVEDGPTKSDPRCLTRYYSSFVNMERDLASGLIGPLLICYKESVDQRGNQIMSDKRNVILFSVFDENRSWYLTENIQRFLPNPAGVQLEDPEFQASNIMHSINGYVFDSLQLSVCLHEVAYWYILSIGAQTDFLSVFFSGYTFKHKMVYEDTLTLFPFSGETVFMSMENPGLWILGCHNSDFRNRGMTALLKVSSCDKNTGDYYEDSYEDISAYFDSKNNAIEPRSFSQNPPVLKRHQREITRTTLQSDQEEIDYDDTISVEMKKEDFDIYDEDENQSPRSFQKKTRHYFIAAVERLWDYGMSSSPHVLRNRAQSGSVPQFKKVVFQEFTDGSFTQPLYRGELNEHLGLLGPYIRAEVEDNIMVTFRNQASRPYSFYSSLISYEEDQRQGAEPRKNFVKPNETKTYFWKVQHHMAPTKDEFDCKAWAYFSDVDLEKDVHSGLIGPLLVCHTNTLNPAHGRQVTVQEFALFFTIFDETKSWYFTENMERNCRAPCNIQMEDPTFKENYRFHAINGYIMDTLPGLVMAQDQRIRWYLLSMGSNENIHSIHFSGHVFTVRKKEEYKMALYNLYPGVFETVEMLPSKAGIWRVECLIGEHLHAGMSTLFLVYSNKCQTPLGMASGHIRDFQITASGQYGQWAPKLARLHYSGSINAWSTKEPFSWIKVDLLAPMIIHGIKTQGARQKFSSLYISQFIIMYSLDGKKWQTYRGNSTGTDMVFFGNVDSSGIKHNIFNPPIIARYIRLHPTHYSIRSTLRMELMGCDLNSCSMPLGMESKAISDAQITASSYFTNMFATWSPSKARLHLQGRSNAWRPQVNNPKEWLQVDFQKTMKVTGVTTQGVKSLDTSMYVKEFLISSSQDGHQWTLFFQNGKVKVFQGNQDSFTPVVNSLDPPLLTRYLRIHPQSWEHQIALRMEVLGCEAQDLY

SEQ ID NO: 1111 - DNA, 4371 bp, synthetic construct
  misc_feature 1..4371: note = Variant of human B-domain deleted Factor VIII
  source 1..4371: mol_type = other DNA
atgcagattgaactgtctacctgcttcttcctctgtttgctgaggttctgctttagcgccactagacggtactaccttggcgctgtggagctgtcctgggactatatgcagagtgatttgggagagcttcccgtcgacgcacgatttcctcctcgcgttccaaagtcatttccctttaacacaagcgtggtgtacaagaagacgctcttcgtcgaattcaccgatcacctgttcaatatcgccaaacccagaccaccatggatgggtcttttggggcctaccatacaagcggaggtgtatgacacagttgttatcactctcaagaacatggcttctcatccggtaagtcttcacgcagtgggcgtgtcctactggaaagcttcagaaggagccgagtatgatgatcagacatcccagagggagaaagaagacgacaaggtatttccaggtgggtctcatacctatgtgtggcaagtgctcaaagagaatggccctatggcaagcgatccgccgtgtttgacttacagctacctttcacacgttgacctcgtcaaggacctcaactccgggttgattggagccttgttggtatgcagggaaggatctcttgccaaagagaagacacagaccctccacaagtttatccttctctttgctgtgttcgatgagggcaaaagttggcatagcgaaacgaagaattccctcatgcaggatcgcgacgcagccagcgccagagcttggcccaagatgcacactgtgaacggatatgtcaataggacgcttcctggcttgattgggtgtcatcggaaaagtgtctactggcacgtgatcggaatggggacaacaccagaggtccactccatatttctcgaaggccataccttccttgttcgaaaccacagacaggcatccttggggatctctcccattacctttctcactgcccaaacgctccttatggacttgggtcagttccttctcttttgccatatcccgtcacaccagcatgatggtatggaagcttatgtgaaagtcgacagttgtcctgaggagccacagttgcgcatgaagaataatgaagaagccgaggattacgacgacgatctcaccgattctgagatggacgtggtgaggtttgatgacgacaactctccctccatcattcaagctcggagcgtggcgaagaaacaccccaagacttgggtccactatatagcggcggaagaggaggattgggattacgctcctcttgtattggcaccagatgaccgctcatacaaaagccagtacctcaacaacggaccgcagagaattggccggaagtataagaaagtgcgatttatggcctatacagacgaaacctttaagacaagggaggccatccagcatgagagtgggattttgggacctcttctttacggcgaagttggtgataccctcctcatcatcttcaagaatcaagcttctcgcccctataacatttacccacacgggatcactgacgttaggcctttgtatagcagaagacttcccaaaggcgtgaagcatctcaaagacttccccattttgccaggcgagatctttaagtacaaatggaccgtcacaccggaagatggaccgactaaatcagaccctcgatgccttacgcggtactattcctccttcgtgaatatggagagagatttggcaagcggactcataggaccactcctcatctgttacaaggaatctgtagaccagaggggtaaccagattatgagtgataaacgcaatgtgatcctttttagcgtcttcgacgagaaccggtcctggtacttgaccgagaatatacaaaggttccttcccaaccccgcaggcgttcagttggaagaccctgagtttcaggccagcaatattatgcactcaatcaacggctatgtgtttgatagtctccagctttctgtttgcctccatgaagtagcctattggtacatcttgtcaattggtgctcaaacagacttcctctccgtcttcttctccggctacacctttaagcacaagatggtgtatgaggacactctcacactctttccattttctggagaaaccgtgttcatgagcatggagaatccaggcctttggatcttgggttgccacaacagtgattttcgcaatcggggaatgactgctctcctcaaagtcagcagctgtgataagaacacaggcgactattacgaagattcttacgaggacataagtgcctactttgactccaagaataacgccattgagcccagatcattctcccagaatcctcccgtgcttaaaaggcatcagcgcgaaatcaccagaactactcttcagtctgatcaagaggagattgactatgacgacaccataagcgtggaaatgaagaaggaggatttcgatatctatgacgaagatgagaaccagtctccgcggagctttcagaagaagacgcgacactacttcattgcagcagtcgaaaggctttgggactacggtatgtcatcatcccctcatgtgttgcgcaatagagctcagagtggaagtgttccacagttcaagaaagtcgtctttcaagagtttacagatggcagcttcacacagcctctctatcggggcgagcttaacgaacatttgggactccttggtccctatatccgagccgaagtggaggacaacattatggttacctttaggaatcaagcctctcgcccctacagcttctactcctccctcatcagttatgaggaggatcagagacaaggcgctgaaccacggaagaactttgtgaaaccgaatgagacgaagacctacttctggaaagtacagcaccacatggcccccacaaaagacgaattcgattgcaaagcatgggcgtatttttcagacgttgacttggagaaagatgtacattcaggacttattggtcctttgttggtgtgtcacactaacactctcaatccagcccatggcaggcaggtgacagtccaggaattcgctcttttctttaccatctttgatgagaccaagtcctggtacttcacggaaaacatggagcgcaattgcagagccccctgtaacatacagatggaggaccctacctttaaggaaaattatcggttccacgcaatcaacggatacattatggatacactccctggccttgtgatggctcaggaccaacgaatcaggtggtacctcctcagcatgggttctaatgagaacatacactccattcacttttcaggacatgtgttcactgtccggaagaaagaagagtataagatggccctctacaatttgtatccaggcgtgtttgagaccgttgaaatgcttccctctaaagctggcatctggagagtagagtgcttgatcggagaacatcttcacgcaggtatgagcaccttgttcctcgtgtacagcaacaaatgtcagaccccacttggcatggccagtggacacattcgcgactttcagatcacagcatctggccagtatggacaatgggccccaaagttggctcgcctccattactccggtagcataaatgcgtggtccactaaagaacctttcagctggattaaggtcgatcttcttgcccccatgatcatccacggcattaagacacagggagcgaggcagaaattctcctccctctacatctcacagttcattattatgtatagtttggacggcaagaagtggcaaacttatagaggtaacagtactggaacagacatggtgttcttcggcaacgttgatagctctggcatcaaacacaacatctttaatcctcccataatagctcggtacatcagattgcatccgacccactacagcattaggagtacactccgaatggagcttatgggttgcgacttgaattcctgttcaatgccactcggaatggagtctaaagccatctctgatgcacagataaccgccagtagctactttacgaacatgtttgctacgtggtcaccctctaaggcaaggcttcatttgcaaggccggtctaatgcctggagacctcaggtgaacaacccgaaagaatggctccaggtggactttcagaagaccatgaaagtaacaggtgtcactactcagggagttaagtccttggatactagcatgtatgtgaaggagttccttatttcctcatcacaagatggccaccagtggaccctcttctttcagaatggtaaggtcaaagtgtttcagggcaatcaagacagcttcacacccgtggtgaacagtcttgatcctccactcttgacacgataccttcgaatccatccacagtcttgggagcaccagattgcattgcgcatggaagtacttggatgcgaggctcaggacctctac

SEQ ID NO: 1112 - protein, 1457 aa, synthetic construct
  REGION 1..1457: note = Variant of human B-domain deleted Factor VIII
MQIELSTCFFLCLLRFCFSATRRYYLGAVELSWDYMQSDLGELPVDARFPPRVPKSFPFNTSVVYKKTLFVEFTDHLFNIAKPRPPWMGLLGPTIQAEVYDTVVITLKNMASHPVSLHAVGVSYWKASEGAEYDDQTSQREKEDDKVFPGGSHTYVWQVLKENGPMASDPPCLTYSYLSHVDLVKDLNSGLIGALLVCREGSLAKEKTQTLHKFILLFAVFDEGKSWHSETKNSLMQDRDAASARAWPKMHTVNGYVNRTLPGLIGCHRKSVYWHVIGMGTTPEVHSIFLEGHTFLVRNHRQASLGISPITFLTAQTLLMDLGQFLLFCHIPSHQHDGMEAYVKVDSCPEEPQLRMKNNEEAEDYDDDLTDSEMDVVRFDDDNSPSIIQARSVAKKHPKTWVHYIAAEEEDWDYAPLVLAPDDRSYKSQYLNNGPQRIGRKYKKVRFMAYTDETFKTREAIQHESGILGPLLYGEVGDTLLIIFKNQASRPYNIYPHGITDVRPLYSRRLPKGVKHLKDFPILPGEIFKYKWTVTPEDGPTKSDPRCLTRYYSSFVNMERDLASGLIGPLLICYKESVDQRGNQIMSDKRNVILFSVFDENRSWYLTENIQRFLPNPAGVQLEDPEFQASNIMHSINGYVFDSLQLSVCLHEVAYWYILSIGAQTDFLSVFFSGYTFKHKMVYEDTLTLFPFSGETVFMSMENPGLWILGCHNSDFRNRGMTALLKVSSCDKNTGDYYEDSYEDISAYFDSKNNAIEPRSFSQNPPVLKRHQREITRTTLQSDQEEIDYDDTISVEMKKEDFDIYDEDENQSPRSFQKKTRHYFIAAVERLWDYGMSSSPHVLRNRAQSGSVPQFKKVVFQEFTDGSFTQPLYRGELNEHLGLLGPYIRAEVEDNIMVTFRNQASRPYSFYSSLISYEEDQRQGAEPRKNFVKPNETKTYFWKVQHHMAPTKDEFDCKAWAYFSDVDLEKDVHSGLIGPLLVCHTNTLNPAHGRQVTVQEFALFFTIFDETKSWYFTENMERNCRAPCNIQMEDPTFKENYRFHAINGYIMDTLPGLVMAQDQRIRWYLLSMGSNENIHSIHFSGHVFTVRKKEEYKMALYNLYPGVFETVEMLPSKAGIWRVECLIGEHLHAGMSTLFLVYSNKCQTPLGMASGHIRDFQITASGQYGQWAPKLARLHYSGSINAWSTKEPFSWIKVDLLAPMIIHGIKTQGARQKFSSLYISQFIIMYSLDGKKWQTYRGNSTGTDMVFFGNVDSSGIKHNIFNPPIIARYIRLHPTHYSIRSTLRMELMGCDLNSCSMPLGMESKAISDAQITASSYFTNMFATWSPSKARLHLQGRSNAWRPQVNNPKEWLQVDFQKTMKVTGVTTQGVKSLDTSMYVKEFLISSSQDGHQWTLFFQNGKVKVFQGNQDSFTPVVNSLDPPLLTRYLRIHPQSWEHQIALRMEVLGCEAQDLY

SEQ ID NO: 1113 - DNA, 4371 bp, synthetic construct
  misc_feature 1..4371: note = Variant of human B-domain deleted Factor VIII
  source 1..4371: mol_type = other DNA
atgcagattgaactgtctacctgcttcttcctctgtttgctgaggttctgctttagcgccactagacggtactaccttggcgctgtggagctgtcctgggactatatgcagagtgatttgggagagcttcccgtcgacgcacgatttcctcctcgcgttccaaagtcatttccctttaacacaagcgtggtgtacaagaagacgctcttcgtcgaattcaccgatcacctgttcaatatcgccaaacccagaccaccatggatgggtcttttggggcctaccatacaagcggaggtgtatgacacagttgttatcactctcaagaacatggcttctcatccggtaagtcttcacgcagtgggcgtgtcctactggaaagcttcagaaggagccgagtatgatgatcagacatcccagagggagaaagaagacgacaaggtatttccaggtgggtctcatacctatgtgtggcaagtgctcaaagagaatggccctatggcaagcgatccgccgtgtttgacttacagctacctttcacacgttgacctcgtcaaggacctcaactccgggttgattggagccttgttggtatgcagggaaggatctcttgccaaagagaagacacagaccctccacaagtttatccttctctttgctgtgttcgatgagggcaaaagttggcatagcgaaacgaagaattccctcatgcaggatcgcgacgcagccagcgccagagcttggcccaagatgcacactgtgaacggatatgtcaataggacgcttcctggcttgattgggtgtcatcggaaaagtgtctactggcacgtgatcggaatggggacaacaccagaggtccactccatatttctcgaaggccataccttccttgttcgaaaccacagacaggcatccttggggatctctcccattacctttctcactgcccaaacgctccttatggacttgggtcagttccttctcttttgccatatcccgtcacaccagcatgatggtatggaagcttatgtgaaagtcgacagttgtcctgaggagccacagttgcgcatgaagaataatgaagaagccgaggattacgacgacgatctcaccgattctgagatggacgtggtgaggtttgatgacgacaactctccctccatcattcaagctcggagcgtggcgaagaaacaccccaagacttgggtccactatatagcggcggaagaggaggattgggattacgctcctcttgtattggcaccagatgaccgctcatacaaaagccagtacctcaacaacggaccgcagagaattggccggaagtataagaaagtgcgatttatggcctatacagacgaaacctttaagacaagggaggccatccagcatgagagtgggattttgggacctcttctttacggcgaagttggtgataccctcctcatcatcttcaagaatcaagcttctcgcccctataacatttacccacacgggatcactgacgttaggcctttgtatagcagaagacttcccaaaggcgtgaagcatctcaaagacttccccattttgccaggcgagatctttaagtacaaatggaccgtcacagtggaagatggaccgactaaatcagaccctcgatgccttacgcggtactattcctccttcgtgaattgggagagagatttggcaagcggactcataggaccactcctcatctgttacaaggaatctgtagaccagaggggtaaccagattatgagtgataaacgcaatgtgatcctttttagcgtcttcgacgagaaccggtcctggtacttgaccgagaatatacaaaggttccttcccaaccccgcaggcgttcagttggaagaccctgagtttcaggccagcaatattatgcactcaatcaacggctatgtgtttgatagtctccagctttctgtttgcctccatgaagtagcctattggtacatcttgtcaattggtgctcaaacagacttcctctccgtcttcttctccggctacacctttaagcacaagatggtgtatgaggacactctcacactctttccattttctggagaaaccgtgttcatgagcatggagaatccaggcctttggatcttgggttgccacaacagtgattttcgcaatcggggaatgactgctctcctcaaagtcagcagctgtgataagaacacaggcgactattacgaagattcttacgaggacataagtgcctactttgactccaagaataacgccattgagcccagatcattctcccagaatcctcccgtgcttaaaaggcatcagcgcgaaatcaccagaactactcttcagtctgatcaagaggagattgactatgacgacaccataagcgtggaaatgaagaaggaggatttcgatatctatgacgaagatgagaaccagtctccgcggagctttcagaagaagacgcgacactacttcattgcagcagtcgaaaggctttgggactacggtatgtcatcatcccctcatgtgttgcgcaatagagctcagagtggaagtgttccacagttcaagaaagtcgtctttcaagagtttacagatggcagcttcacacagcctctctatcggggcgagcttaacgaacatttgggactccttggtccctatatccgagccgaagtggaggacaacattatggttacctttaggaatcaagcctctcgcccctacagcttctactcctccctcatcagttatgaggaggatcagagacaaggcgctgaaccacggaagaactttgtgaaaccgaatgagacgaagacctacttctggaaagtacagcaccacatggcccccacaaaagacgaattcgattgcaaagcatgggcgtatttttcagacgttgacttggagaaagatgtacattcaggacttattggtcctttgttggtgtgtcacactaacactctcaatccagcccatggcaggcaggtgacagtccaggaattcgctcttttctttaccatctttgatgagaccaagtcctggtacttcacggaaaacatggagcgcaattgcagagccccctgtaacatacagatggaggaccctacctttaaggaaaattatcggttccacgcaatcaacggatacattatggatacactccctggccttgtgatggctcaggaccaacgaatcaggtggtacctcctcagcatgggttctaatgagaacatacactccattcacttttcaggacatgtgttcactgtccggaagaaagaagagtataagatggccctctacaatttgtatccaggcgtgtttgagaccgttgaaatgcttccctctaaagctggcatctggagagtagagtgcttgatcggagaacatcttcacgcaggtatgagcaccttgttcctcgtgtacagcaacaaatgtcagaccccacttggcatggccagtggacacattcgcgactttcagatcacagcatctggccagtatggacaatgggccccaaagttggctcgcctccattactccggtagcataaatgcgtggtccactaaagaacctttcagctggattaaggtcgatcttcttgcccccatgatcatccacggcattaagacacagggagcgaggcagaaattctcctccctctacatctcacagttcattattatgtatagtttggacggcaagaagtggcaaacttatagaggtaacagtactggaacagacatggtgttcttcggcaacgttgatagctctggcatcaaacacaacatctttaatcctcccataatagctcggtacatcagattgcatccgacccactacagcattaggagtacactccgaatggagcttatgggttgcgacttgaattcctgttcaatgccactcggaatggagtctaaagccatctctgatgcacagataaccgccagtagctactttacgaacatgtttgctacgtggtcaccctctaaggcaaggcttcatttgcaaggccggtctaatgcctggagacctcaggtgaacaacccgaaagaatggctccaggtggactttcagaagaccatgaaagtaacaggtgtcactactcagggagttaagtccttggatactagcatgtatgtgaaggagttccttatttcctcatcacaagatggccaccagtggaccctcttctttcagaatggtaaggtcaaagtgtttcagggcaatcaagacagcttcacacccgtggtgaacagtcttgatcctccactcttgacacgataccttcgaatccatccacagtcttgggagcaccagattgcattgcgcatggaagtacttggatgcgaggctcaggacctctac

SEQ ID NO: 1114 - protein, 1457 aa, synthetic construct
  REGION 1..1457: note = Variant of human B-domain deleted Factor VIII
MQIELSTCFFLCLLRFCFSATRRYYLGAVELSWDYMQSDLGELPVDARFPPRVPKSFPFNTSVVYKKTLFVEFTDHLFNIAKPRPPWMGLLGPTIQAEVYDTVVITLKNMASHPVSLHAVGVSYWKASEGAEYDDQTSQREKEDDKVFPGGSHTYVWQVLKENGPMASDPPCLTYSYLSHVDLVKDLNSGLIGALLVCREGSLAKEKTQTLHKFILLFAVFDEGKSWHSETKNSLMQDRDAASARAWPKMHTVNGYVNRTLPGLIGCHRKSVYWHVIGMGTTPEVHSIFLEGHTFLVRNHRQASLGISPITFLTAQTLLMDLGQFLLFCHIPSHQHDGMEAYVKVDSCPEEPQLRMKNNEEAEDYDDDLTDSEMDVVRFDDDNSPSIIQARSVAKKHPKTWVHYIAAEEEDWDYAPLVLAPDDRSYKSQYLNNGPQRIGRKYKKVRFMAYTDETFKTREAIQHESGILGPLLYGEVGDTLLIIFKNQASRPYNIYPHGITDVRPLYSRRLPKGVKHLKDFPILPGEIFKYKWTVTVEDGPTKSDPRCLTRYYSSFVNWERDLASGLIGPLLICYKESVDQRGNQIMSDKRNVILFSVFDENRSWYLTENIQRFLPNPAGVQLEDPEFQASNIMHSINGYVFDSLQLSVCLHEVAYWYILSIGAQTDFLSVFFSGYTFKHKMVYEDTLTLFPFSGETVFMSMENPGLWILGCHNSDFRNRGMTALLKVSSCDKNTGDYYEDSYEDISAYFDSKNNAIEPRSFSQNPPVLKRHQREITRTTLQSDQEEIDYDDTISVEMKKEDFDIYDEDENQSPRSFQKKTRHYFIAAVERLWDYGMSSSPHVLRNRAQSGSVPQFKKVVFQEFTDGSFTQPLYRGELNEHLGLLGPYIRAEVEDNIMVTFRNQASRPYSFYSSLISYEEDQRQGAEPRKNFVKPNETKTYFWKVQHHMAPTKDEFDCKAWAYFSDVDLEKDVHSGLIGPLLVCHTNTLNPAHGRQVTVQEFALFFTIFDETKSWYFTENMERNCRAPCNIQMEDPTFKENYRFHAINGYIMDTLPGLVMAQDQRIRWYLLSMGSNENIHSIHFSGHVFTVRKKEEYKMALYNLYPGVFETVEMLPSKAGIWRVECLIGEHLHAGMSTLFLVYSNKCQTPLGMASGHIRDFQITASGQYGQWAPKLARLHYSGSINAWSTKEPFSWIKVDLLAPMIIHGIKTQGARQKFSSLYISQFIIMYSLDGKKWQTYRGNSTGTDMVFFGNVDSSGIKHNIFNPPIIARYIRLHPTHYSIRSTLRMELMGCDLNSCSMPLGMESKAISDAQITASSYFTNMFATWSPSKARLHLQGRSNAWRPQVNNPKEWLQVDFQKTMKVTGVTTQGVKSLDTSMYVKEFLISSSQDGHQWTLFFQNGKVKVFQGNQDSFTPVVNSLDPPLLTRYLRIHPQSWEHQIALRMEVLGCEAQDLY

SEQ ID NO: 1115 - DNA, 4371 bp, synthetic construct
  misc_feature 1..4371: note = Variant of human B-domain deleted Factor VIII
  source 1..4371: mol_type = other DNA
atgcagattgaactgtctacctgcttcttcctctgtttgctgaggttctgctttagcgccactagacggtactaccttggcgctgtggagctgtcctgggactatatgcagagtgatttgggagagcttcccgtcgacgcacgatttcctcctcgcgttccaaagtcatttccctttaacacaagcgtggtgtacaagaagacgctcttcgtcgaattcaccgatcacctgttcaatatcgccaaacccagaccaccatggatgggtcttttggggcctaccatacaagcggaggtgtatgacacagttgttatcactctcaagaacatggcttctcatccggtaagtcttcacgcagtgggcgtgtcctactggaaagcttcagaaggagccgagtatgatgatcagacatcccagagggagaaagaagacgacaaggtatttccaggtgggtctcatacctatgtgtggcaagtgctcaaagagaatggccctatggcaagcgatccgccgtgtttgacttacagctacctttcacacgttgacctcgtcaaggacctcaactccgggttgattggagccttgttggtatgcagggaaggatctcttgccaaagagaagacacagaccctccacaagtttatccttctctttgctgtgttcgatgagggcaaaagttggcatagcgaaacgaagaattccctcatgcaggatcgcgacgcagccagcgccagagcttggcccaagatgcacactgtgaacggatatgtcaataggacgcttcctggcttgattgggtgtcatcggaaaagtgtctactggcacgtgatcggaatggggacaacaccagaggtccactccatatttctcgaaggccataccttccttgttcgaaaccacagacaggcatccttggggatctctcccattacctttctcactgcccaaacgctccttatggacttgggtcagttccttctcttttgccatatcccgtcacaccagcatgatggtatggaagcttatgtgaaagtcgacagttgtcctgaggagccacagttgcgcatgaagaataatgaagaagccgaggattacgacgacgatctcaccgattctgagatggacgtggtgaggtttgatgacgacaactctccctccatcattcaagctcggagcgtggcgaagaaacaccccaagacttgggtccactatatagcggcggaagaggaggattgggattacgctcctcttgtattggcaccagatgaccgctcatacaaaagccagtacctcaacaacggaccgcagagaattggccggaagtataagaaagtgcgatttatggcctatacagacgaaacctttaagacaagggaggccatccagcatgagagtgggattttgggacctcttctttacggcgaagttggtgataccctcctcatcatcttcaagaatcaagcttctcgcccctataacatttacccacacgggatcactgacgttaggcctttgtatagcagaagacttcccaaaggcgtgaagcatctcaaagacttccccattttgccaggcgagatctttaagtacaaatggaccgtcacagtggaagatggaccgactaaatcagaccctcgatgccttacgcggtactattcctccttcgtgaatgaggagagagatttggcaagcggactcataggaccactcctcatctgttacaaggaatctgtagaccagaggggtaaccagattatgagtgataaacgcaatgtgatcctttttagcgtcttcgacgagaaccggtcctggtacttgaccgagaatatacaaaggttccttcccaaccccgcaggcgttcagttggaagaccctgagtttcaggccagcaatattatgcactcaatcaacggctatgtgtttgatagtctccagctttctgtttgcctccatgaagtagcctattggtacatcttgtcaattggtgctcaaacagacttcctctccgtcttcttctccggctacacctttaagcacaagatggtgtatgaggacactctcacactctttccattttctggagaaaccgtgttcatgagcatggagaatccaggcctttggatcttgggttgccacaacagtgattttcgcaatcggggaatgactgctctcctcaaagtcagcagctgtgataagaacacaggcgactattacgaagattcttacgaggacataagtgcctactttgactccaagaataacgccattgagcccagatcattctcccagaatcctcccgtgcttaaaaggcatcagcgcgaaatcaccagaactactcttcagtctgatcaagaggagattgactatgacgacaccataagcgtggaaatgaagaaggaggatttcgatatctatgacgaagatgagaaccagtctccgcggagctttcagaagaagacgcgacactacttcattgcagcagtcgaaaggctttgggactacggtatgtcatcatcccctcatgtgttgcgcaatagagctcagagtggaagtgttccacagttcaagaaagtcgtctttcaagagtttacagatggcagcttcacacagcctctctatcggggcgagcttaacgaacatttgggactccttggtccctatatccgagccgaagtggaggacaacattatggttacctttaggaatcaagcctctcgcccctacagcttctactcctccctcatcagttatgaggaggatcagagacaaggcgctgaaccacggaagaactttgtgaaaccgaatgagacgaagacctacttctggaaagtacagcaccacatggcccccacaaaagacgaattcgattgcaaagcatgggcgtatttttcagacgttgacttggagaaagatgtacattcaggacttattggtcctttgttggtgtgtcacactaacactctcaatccagcccatggcaggcaggtgacagtccaggaattcgctcttttctttaccatctttgatgagaccaagtcctggtacttcacggaaaacatggagcgcaattgcagagccccctgtaacatacagatggaggaccctacctttaaggaaaattatcggttccacgcaatcaacggatacattatggatacactccctggccttgtgatggctcaggaccaacgaatcaggtggtacctcctcagcatgggttctaatgagaacatacactccattcacttttcaggacatgtgttcactgtccggaagaaagaagagtataagatggccctctacaatttgtatccaggcgtgtttgagaccgttgaaatgcttccctctaaagctggcatctggagagtagagtgcttgatcggagaacatcttcacgcaggtatgagcaccttgttcctcgtgtacagcaacaaatgtcagaccccacttggcatggccagtggacacattcgcgactttcagatcacagcatctggccagtatggacaatgggccccaaagttggctcgcctccattactccggtagcataaatgcgtggtccactaaagaacctttcagctggattaaggtcgatcttcttgcccccatgatcatccacggcattaagacacagggagcgaggcagaaattctcctccctctacatctcacagttcattattatgtatagtttggacggcaagaagtggcaaacttatagaggtaacagtactggaacagacatggtgttcttcggcaacgttgatagctctggcatcaaacacaacatctttaatcctcccataatagctcggtacatcagattgcatccgacccactacagcattaggagtacactccgaatggagcttatgggttgcgacttgaattcctgttcaatgccactcggaatggagtctaaagccatctctgatgcacagataaccgccagtagctactttacgaacatgtttgctacgtggtcaccctctaaggcaaggcttcatttgcaaggccggtctaatgcctggagacctcaggtgaacaacccgaaagaatggctccaggtggactttcagaagaccatgaaagtaacaggtgtcactactcagggagttaagtccttggatactagcatgtatgtgaaggagttccttatttcctcatcacaagatggccaccagtggaccctcttctttcagaatggtaaggtcaaagtgtttcagggcaatcaagacagcttcacacccgtggtgaacagtcttgatcctccactcttgacacgataccttcgaatccatccacagtcttgggagcaccagattgcattgcgcatggaagtacttggatgcgaggctcaggacctctac

SEQ ID NO: 1116 - protein, 1457 aa, synthetic construct
  REGION 1..1457: note = Variant of human B-domain deleted Factor VIII
MQIELSTCFFLCLLRFCFSATRRYYLGAVELSWDYMQSDLGELPVDARFPPRVPKSFPFNTSVVYKKTLFVEFTDHLFNIAKPRPPWMGLLGPTIQAEVYDTVVITLKNMASHPVSLHAVGVSYWKASEGAEYDDQTSQREKEDDKVFPGGSHTYVWQVLKENGPMASDPPCLTYSYLSHVDLVKDLNSGLIGALLVCREGSLAKEKTQTLHKFILLFAVFDEGKSWHSETKNSLMQDRDAASARAWPKMHTVNGYVNRTLPGLIGCHRKSVYWHVIGMGTTPEVHSIFLEGHTFLVRNHRQASLGISPITFLTAQTLLMDLGQFLLFCHIPSHQHDGMEAYVKVDSCPEEPQLRMKNNEEAEDYDDDLTDSEMDVVRFDDDNSPSIIQARSVAKKHPKTWVHYIAAEEEDWDYAPLVLAPDDRSYKSQYLNNGPQRIGRKYKKVRFMAYTDETFKTREAIQHESGILGPLLYGEVGDTLLIIFKNQASRPYNIYPHGITDVRPLYSRRLPKGVKHLKDFPILPGEIFKYKWTVTVEDGPTKSDPRCLTRYYSSFVNEERDLASGLIGPLLICYKESVDQRGNQIMSDKRNVILFSVFDENRSWYLTENIQRFLPNPAGVQLEDPEFQASNIMHSINGYVFDSLQLSVCLHEVAYWYILSIGAQTDFLSVFFSGYTFKHKMVYEDTLTLFPFSGETVFMSMENPGLWILGCHNSDFRNRGMTALLKVSSCDKNTGDYYEDSYEDISAYFDSKNNAIEPRSFSQNPPVLKRHQREITRTTLQSDQEEIDYDDTISVEMKKEDFDIYDEDENQSPRSFQKKTRHYFIAAVERLWDYGMSSSPHVLRNRAQSGSVPQFKKVVFQEFTDGSFTQPLYRGELNEHLGLLGPYIRAEVEDNIMVTFRNQASRPYSFYSSLISYEEDQRQGAEPRKNFVKPNETKTYFWKVQHHMAPTKDEFDCKAWAYFSDVDLEKDVHSGLIGPLLVCHTNTLNPAHGRQVTVQEFALFFTIFDETKSWYFTENMERNCRAPCNIQMEDPTFKENYRFHAINGYIMDTLPGLVMAQDQRIRWYLLSMGSNENIHSIHFSGHVFTVRKKEEYKMALYNLYPGVFETVEMLPSKAGIWRVECLIGEHLHAGMSTLFLVYSNKCQTPLGMASGHIRDFQITASGQYGQWAPKLARLHYSGSINAWSTKEPFSWIKVDLLAPMIIHGIKTQGARQKFSSLYISQFIIMYSLDGKKWQTYRGNSTGTDMVFFGNVDSSGIKHNIFNPPIIARYIRLHPTHYSIRSTLRMELMGCDLNSCSMPLGMESKAISDAQITASSYFTNMFATWSPSKARLHLQGRSNAWRPQVNNPKEWLQVDFQKTMKVTGVTTQGVKSLDTSMYVKEFLISSSQDGHQWTLFFQNGKVKVFQGNQDSFTPVVNSLDPPLLTRYLRIHPQSWEHQIALRMEVLGCEAQDLY

SEQ ID NO: 1117 - DNA, 4371 bp, synthetic construct
  misc_feature 1..4371: note = Variant of human B-domain deleted Factor VIII
  source 1..4371: mol_type = other DNA
atgcagattgaactgtctacctgcttcttcctctgtttgctgaggttctgctttagcgccactagacggtactaccttggcgctgtggagctgtcctgggactatatgcagagtgatttgggagagcttcccgtcgacgcacgatttcctcctcgcgttccaaagtcatttccctttaacacaagcgtggtgtacaagaagacgctcttcgtcgaattcaccgatcacctgttcaatatcgccaaacccagaccaccatggatgggtcttttggggcctaccatacaagcggaggtgtatgacacagttgttatcactctcaagaacatggcttctcatccggtaagtcttcacgcagtgggcgtgtcctactggaaagcttcagaaggagccgagtatgatgatcagacatcccagagggagaaagaagacgacaaggtatttccaggtgggtctcatacctatgtgtggcaagtgctcaaagagaatggccctatggcaagcgatccgccgtgtttgacttacagctacctttcacacgttgacctcgtcaaggacctcaactccgggttgattggagccttgttggtatgcagggaaggatctcttgccaaagagaagacacagaccctccacaagtttatccttctctttgctgtgttcgatgagggcaaaagttggcatagcgaaacgaagaattccctcatgcaggatcgcgacgcagccagcgccagagcttggcccaagatgcacactgtgaacggatatgtcaataggacgcttcctggcttgattgggtgtcatcggaaaagtgtctactggcacgtgatcggaatggggacaacaccagaggtccactccatatttctcgaaggccataccttccttgttcgaaaccacagacaggcatccttggggatctctcccattacctttctcactgcccaaacgctccttatggacttgggtcagttccttctcttttgccatatcccgtcacaccagcatgatggtatggaagcttatgtgaaagtcgacagttgtcctgaggagccacagttgcgcatgaagaataatgaagaagccgaggattacgacgacgatctcaccgattctgagatggacgtggtgaggtttgatgacgacaactctccctccatcattcaagctcggagcgtggcgaagaaacaccccaagacttgggtccactatatagcggcggaagaggaggattgggattacgctcctcttgtattggcaccagatgaccgctcatacaaaagccagtacctcaacaacggaccgcagagaattggccggaagtataagaaagtgcgatttatggcctatacagacgaaacctttaagacaagggaggccatccagcatgagagtgggattttgggacctcttctttacggcgaagttggtgataccctcctcatcatcttcaagaatcaagcttctcgcccctataacatttacccacacgggatcactgacgttaggcctttgtatagcagaagacttcccaaaggcgtgaagcatctcaaagacttccccattttgccaggcgagatctttaagtacaaatggaccgtcacagtggaagatggaccgactaaatcagaccctcgatgccttacgcggtactattcctccttcgtgaatatggagagagatttggcaagcggactcataggaccactcctcatctgttacaaggaatctgtagaccagaggggtaaccagattatgagtgataaacgcaatgtgatcctttttagcgtcttcgacgagaaccggtcctggtacttgaccgagaatatacaaaggttccttcccaaccccgcaggcgttcagttggaagaccctgagtttcaggccagcaatattatgcactcaatcaacggctatgtgtttgatagtctccagctttctgtttgcctccatgaagtagcctattggtacatcttgtcaattggtgctcaaacagacttcctctccgtcttcttctccggctacacctttaagcacaagatggtgtatgaggacactctcacactctttccattttctggagaaaccgtgttcatgagcatggagaatccaggcctttggatcttgggttgccacaacagtgattttcgcaatcggggaatgactgctctcctcaaagtcagcagctgtgataagaacacaggcgactattacgaagattcttacgaggacataagtgcctactttgactccaagaataacgccattgagcccagatcattctcccagaatcctcccgtgcttaaaaggcatcagcgcgaaatcaccagaactactcttcagtctgatcaagaggagattgactatgacgacaccataagcgtggaaatgaagaaggaggatttcgatatctatgacgaagatgagaaccagtctccgcggagctttcagaagaagacgcgacactacttcattgcagcagtcgaaaggctttgggactacggtatgtcatcatcccctcatgtgttgcgcaatagagctcagagtggaagtgttccacagttcaagaaagtcgtctttcaagagtttacagatggcagcttcacacagcctctctatcggggcgagcttaacgaacatttgggactccttggtccctatatccgagccgaagtggaggacaacattatggttacctttaggaatcaagcctctcgcccctacagcttctactcctccctcatcagttatgaggaggatcagagacaaggcgctgaaccacggaagaactttgtgaaaccgaatgagacgaagacctacttctggaaagtacagcaccacatggcccccacaaaagacgaattcgattgcaaagcatgggcgtatttttcagacgttgacttggagaaagatgtacattcaggacttattggtcctttgttggtgtgtcacactaacactctcaatccagcccatggcaggcaggtgacagtccaggaattcgctcttttctttaccatctttgatgagaccaagtcctggtacttcacggaaaacatggagcgcaattgcagagccccctgtaacatacagatggaggaccctacctttaaggaaaattatcggttccacgcaatcaacggatacattatggatacactccctggccttgtgatggctcaggaccaacgaatcaggtggtacctcctcagcatgggttctaatgagaacatacactccattcacttttcaggacatgtgttcactgtccggaagaaagaagagtataagatggccctctacaatttgtatccaggcgtgtttgagaccgttgaaatgcttccctctaaagctggcatctggagagtagagtgcttgatcggagaacatcttcacgcaggtatgagcaccttgttcctcgtgtacagcaacaaatgtcagaccccacttggcatggccagtggacacattcgcgactttcagatcacagcatctggccagtatggacaatgggccccaaagttggctcgcctccattactccggtagcataaatgcgtggtccactaaagaacctttcagctggattaaggtcgatcttcttgcccccatgatcatccacggcattaagacacagggagcgaggcagaaattctcctccctctacatctcacagttcattattatgtatagtttggacggcaagaagtggcaaacttatagaggtaacagtactggaacagacatggtgttcttcggcaacgttgatagctctggcatcaaacacaacatctttaatcctcccataatagctcggtacatcagattgcatccgacccactacagcattaggagtacactccgaatggagcttatgggttgcgacttgaattcctgttcaatgccactcggaatggagtctaaagccatctctgatgcacagataaccgccagtagctactttacgaacatgtttgctacgtggtcaccctctaaggcaaggcttcatttgcaaggccggtctaatgcctggagacctcaggtgaacaacccgaaagaatggctccaggtggactttcagaagaccatgaaagtaacaggtgtcactactcagggagttaagtccttggatactagcatgtatgtgaaggagttccttatttcctcatcacaagatggccaccagtggaccctcttctttcagaatggtaaggtcaaagtgtttcagggcaatcaagacagcttcacacccgtggtgaacagtcttgatcctccactctatacacgataccttcgaatccatccacagtcttgggagcaccagattgcattgcgcatggaagtacttggatgcgaggctcaggacctctac

SEQ ID NO: 1118 - protein, 1457 aa, synthetic construct
  REGION 1..1457: note = Variant of human B-domain deleted Factor VIII
MQIELSTCFFLCLLRFCFSATRRYYLGAVELSWDYMQSDLGELPVDARFPPRVPKSFPFNTSVVYKKTLFVEFTDHLFNIAKPRPPWMGLLGPTIQAEVYDTVVITLKNMASHPVSLHAVGVSYWKASEGAEYDDQTSQREKEDDKVFPGGSHTYVWQVLKENGPMASDPPCLTYSYLSHVDLVKDLNSGLIGALLVCREGSLAKEKTQTLHKFILLFAVFDEGKSWHSETKNSLMQDRDAASARAWPKMHTVNGYVNRTLPGLIGCHRKSVYWHVIGMGTTPEVHSIFLEGHTFLVRNHRQASLGISPITFLTAQTLLMDLGQFLLFCHIPSHQHDGMEAYVKVDSCPEEPQLRMKNNEEAEDYDDDLTDSEMDVVRFDDDNSPSIIQARSVAKKHPKTWVHYIAAEEEDWDYAPLVLAPDDRSYKSQYLNNGPQRIGRKYKKVRFMAYTDETFKTREAIQHESGILGPLLYGEVGDTLLIIFKNQASRPYNIYPHGITDVRPLYSRRLPKGVKHLKDFPILPGEIFKYKWTVTVEDGPTKSDPRCLTRYYSSFVNMERDLASGLIGPLLICYKESVDQRGNQIMSDKRNVILFSVFDENRSWYLTENIQRFLPNPAGVQLEDPEFQASNIMHSINGYVFDSLQLSVCLHEVAYWYILSIGAQTDFLSVFFSGYTFKHKMVYEDTLTLFPFSGETVFMSMENPGLWILGCHNSDFRNRGMTALLKVSSCDKNTGDYYEDSYEDISAYFDSKNNAIEPRSFSQNPPVLKRHQREITRTTLQSDQEEIDYDDTISVEMKKEDFDIYDEDENQSPRSFQKKTRHYFIAAVERLWDYGMSSSPHVLRNRAQSGSVPQFKKVVFQEFTDGSFTQPLYRGELNEHLGLLGPYIRAEVEDNIMVTFRNQASRPYSFYSSLISYEEDQRQGAEPRKNFVKPNETKTYFWKVQHHMAPTKDEFDCKAWAYFSDVDLEKDVHSGLIGPLLVCHTNTLNPAHGRQVTVQEFALFFTIFDETKSWYFTENMERNCRAPCNIQMEDPTFKENYRFHAINGYIMDTLPGLVMAQDQRIRWYLLSMGSNENIHSIHFSGHVFTVRKKEEYKMALYNLYPGVFETVEMLPSKAGIWRVECLIGEHLHAGMSTLFLVYSNKCQTPLGMASGHIRDFQITASGQYGQWAPKLARLHYSGSINAWSTKEPFSWIKVDLLAPMIIHGIKTQGARQKFSSLYISQFIIMYSLDGKKWQTYRGNSTGTDMVFFGNVDSSGIKHNIFNPPIIARYIRLHPTHYSIRSTLRMELMGCDLNSCSMPLGMESKAISDAQITASSYFTNMFATWSPSKARLHLQGRSNAWRPQVNNPKEWLQVDFQKTMKVTGVTTQGVKSLDTSMYVKEFLISSSQDGHQWTLFFQNGKVKVFQGNQDSFTPVVNSLDPPLYTRYLRIHPQSWEHQIALRMEVLGCEAQDLY

SEQ ID NO: 1119 - DNA, 4371 bp, synthetic construct
  misc_feature 1..4371: note = Variant of human B-domain deleted Factor VIII
  source 1..4371: mol_type = other DNA
atgcagattgaactgtctacctgcttcttcctctgtttgctgaggttctgctttagcgccactagacggtactaccttggcgctgtggagctgtcctgggactatatgcagagtgatttgggagagcttcccgtcgacgcacgatttcctcctcgcgttccaaagtcatttccctttaacacaagcgtggtgtacaagaagacgctcttcgtcgaattcaccgatcacctgttcaatatcgccaaacccagaccaccatggatgggtcttttggggcctaccatacaagcggaggtgtatgacacagttgttatcactctcaagaacatggcttctcatccggtaagtcttcacgcagtgggcgtgtcctactggaaagcttcagaaggagccgagtatgatgatcagacatcccagagggagaaagaagacgacaaggtatttccaggtgggtctcatacctatgtgtggcaagtgctcaaagagaatggccctatggcaagcgatccgccgtgtttgacttacagctacctttcacacgttgacctcgtcaaggacctcaactccgggttgattggagccttgttggtatgcagggaaggatctcttgccaaagagaagacacagaccctccacaagtttatccttctctttgctgtgttcgatgagggcaaaagttggcatagcgaaacgaagaattccctcatgcaggatcgcgacgcagccagcgccagagcttggcccaagatgcacactgtgaacggatatgtcaataggacgcttcctggcttgattgggtgtcatcggaaaagtgtctactggcacgtgatcggaatggggacaacaccagaggtccactccatatttctcgaaggccataccttccttgttcgaaaccacagacaggcatccttggggatctctcccattacctttctcactgcccaaacgctccttatggacttgggtcagttccttctcttttgccatatcccgtcacaccagcatgatggtatggaagcttatgtgaaagtcgacagttgtcctgaggagccacagttgcgcatgaagaataatgaagaagccgaggattacgacgacgatctcaccgattctgagatggacgtggtgaggtttgatgacgacaactctccctccatcattcaagctcggagcgtggcgaagaaacaccccaagacttgggtccactatatagcggcggaagaggaggattgggattacgctcctcttgtattggcaccagatgaccgctcatacaaaagccagtacctcaacaacggaccgcagagaattggccggaagtataagaaagtgcgatttatggcctatacagacgaaacctttaagacaagggaggccatccagcatgagagtgggattttgggacctcttctttacggcgaagttggtgataccctcctcatcatcttcaagaatcaagcttctcgcccctataacatttacccacacgggatcactgacgttaggcctttgtatagcagaagacttcccaaaggcgtgaagcatctcaaagacttccccattttgccaggcgagatctttaagtacaaatggaccgtcacagtggaagatggaccgactaaatcagaccctcgatgccttacgcggtactattcctccttcgtgaatatggagagagatttggcaagcggactcataggaccactcctcatctgttacaaggaatctgtagaccagaggggtaaccagattatgagtgataaacgcaatgtgatcctttttagcgtcttcgacgagaaccggtcctggtacttgaccgagaatatacaaaggttccttcccaaccccgcaggcgttcagttggaagaccctgagtttcaggccagcaatattatgcactcaatcaacggctatgtgtttgatagtctccagctttctgtttgcctccatgaagtagcctattggtacatcttgtcaattggtgctcaaacagacttcctctccgtcttcttctccggctacacctttaagcacaagatggtgtatgaggacactctcacactctttccattttctggagaaaccgtgttcatgagcatggagaatccaggcctttggatcttgggttgccacaacagtgattttcgcaatcggggaatgactgctctcctcaaagtcagcagctgtgataagaacacaggcgactattacgaagattcttacgaggacataagtgcctactttgactccaagaataacgccattgagcccagatcattctcccagaatcctcccgtgcttaaaaggcatcagcgcgaaatcaccagaactactcttcagtctgatcaagaggagattgactatgacgacaccataagcgtggaaatgaagaaggaggatttcgatatctatgacgaagatgagaaccagtctccgcggagctttcagaagaagacgcgacactacttcattgcagcagtcgaaaggctttgggactacggtatgtcatcaggtcctcatgtgttgcgcaatagagctcagagtggaagtgttccacagttcaagaaagtcgtctttcaagagtttacagatggcagcttcacacagcctctctatcggggcgagcttaacgaacatttgggactccttggtccctatatccgagccgaagtggaggacaacattatggttacctttaggaatcaagcctctcgcccctacagcttctactcctccctcatcagttatgaggaggatcagagacaaggcgctgaaccacggaagaactttgtgaaaccgaatgagacgaagacctacttctggaaagtacagcaccacatggcccccacaaaagacgaattcgattgcaaagcatgggcgtatttttcagacgttgacttggagaaagatgtacattcaggacttattggtcctttgttggtgtgtcacactaacactctcaatccagcccatggcaggcaggtgacagtccaggaattcgctcttttctttaccatctttgatgagaccaagtcctggtacttcacggaaaacatggagcgcaattgcagagccccctgtaacatacagatggaggaccctacctttaaggaaaattatcggttccacgcaatcaacggatacattatggatacactccctggccttgtgatggctcaggaccaacgaatcaggtggtacctcctcagcatgggttctaatgagaacatacactccattcacttttcaggacatgtgttcactgtccggaagaaagaagagtataagatggccctctacaatttgtatccaggcgtgtttgagaccgttgaaatgcttccctctaaagctggcatctggagagtagagtgcttgatcggagaacatcttcacgcaggtatgagcaccttgttcctcgtgtacagcaacaaatgtcagaccccacttggcatggccagtggacacattcgcgactttcagatcacagcatctggccagtatggacaatgggccccaaagttggctcgcctccattactccggtagcataaatgcgtggtccactaaagaacctttcagctggattaaggtcgatcttcttgcccccatgatcatccacggcattaagacacagggagcgaggcagaaattctcctccctctacatctcacagttcattattatgtatagtttggacggcaagaagtggcaaacttatagaggtaacagtactggaacagacatggtgttcttcggcaacgttgatagctctggcatcaaacacaacatctttaatcctcccataatagctcggtacatcagattgcatccgacccactacagcattaggagtacactccgaatggagcttatgggttgcgacttgaattcctgttcaatgccactcggaatggagtctaaagccatctctgatgcacagataaccgccagtagctactttacgaacatgtttgctacgtggtcaccctctaaggcaaggcttcatttgcaaggccggtctaatgcctggagacctcaggtgaacaacccgaaagaatggctccaggtggactttcagaagaccatgaaagtaacaggtgtcactactcagggagttaagtccttggatactagcatgtatgtgaaggagttccttatttcctcatcacaagatggccaccagtggaccctcttctttcagaatggtaaggtcaaagtgtttcagggcaatcaagacagcttcacacccgtggtgaacagtcttgatcctccactcttgacacgataccttcgaatccatccacagtcttgggagcaccagattgcattgcgcatggaagtacttggatgcgaggctcaggacctctac

SEQ ID NO: 1120 - protein, 1457 aa, synthetic construct
  REGION 1..1457: note = Variant of human B-domain deleted Factor VIII
MQIELSTCFFLCLLRFCFSATRRYYLGAVELSWDYMQSDLGELPVDARFPPRVPKSFPFNTSVVYKKTLFVEFTDHLFNIAKPRPPWMGLLGPTIQAEVYDTVVITLKNMASHPVSLHAVGVSYWKASEGAEYDDQTSQREKEDDKVFPGGSHTYVWQVLKENGPMASDPPCLTYSYLSHVDLVKDLNSGLIGALLVCREGSLAKEKTQTLHKFILLFAVFDEGKSWHSETKNSLMQDRDAASARAWPKMHTVNGYVNRTLPGLIGCHRKSVYWHVIGMGTTPEVHSIFLEGHTFLVRNHRQASLGISPITFLTAQTLLMDLGQFLLFCHIPSHQHDGMEAYVKVDSCPEEPQLRMKNNEEAEDYDDDLTDSEMDVVRFDDDNSPSIIQARSVAKKHPKTWVHYIAAEEEDWDYAPLVLAPDDRSYKSQYLNNGPQRIGRKYKKVRFMAYTDETFKTREAIQHESGILGPLLYGEVGDTLLIIFKNQASRPYNIYPHGITDVRPLYSRRLPKGVKHLKDFPILPGEIFKYKWTVTVEDGPTKSDPRCLTRYYSSFVNMERDLASGLIGPLLICYKESVDQRGNQIMSDKRNVILFSVFDENRSWYLTENIQRFLPNPAGVQLEDPEFQASNIMHSINGYVFDSLQLSVCLHEVAYWYILSIGAQTDFLSVFFSGYTFKHKMVYEDTLTLFPFSGETVFMSMENPGLWILGCHNSDFRNRGMTALLKVSSCDKNTGDYYEDSYEDISAYFDSKNNAIEPRSFSQNPPVLKRHQREITRTTLQSDQEEIDYDDTISVEMKKEDFDIYDEDENQSPRSFQKKTRHYFIAAVERLWDYGMSSGPHVLRNRAQSGSVPQFKKVVFQEFTDGSFTQPLYRGELNEHLGLLGPYIRAEVEDNIMVTFRNQASRPYSFYSSLISYEEDQRQGAEPRKNFVKPNETKTYFWKVQHHMAPTKDEFDCKAWAYFSDVDLEKDVHSGLIGPLLVCHTNTLNPAHGRQVTVQEFALFFTIFDETKSWYFTENMERNCRAPCNIQMEDPTFKENYRFHAINGYIMDTLPGLVMAQDQRIRWYLLSMGSNENIHSIHFSGHVFTVRKKEEYKMALYNLYPGVFETVEMLPSKAGIWRVECLIGEHLHAGMSTLFLVYSNKCQTPLGMASGHIRDFQITASGQYGQWAPKLARLHYSGSINAWSTKEPFSWIKVDLLAPMIIHGIKTQGARQKFSSLYISQFIIMYSLDGKKWQTYRGNSTGTDMVFFGNVDSSGIKHNIFNPPIIARYIRLHPTHYSIRSTLRMELMGCDLNSCSMPLGMESKAISDAQITASSYFTNMFATWSPSKARLHLQGRSNAWRPQVNNPKEWLQVDFQKTMKVTGVTTQGVKSLDTSMYVKEFLISSSQDGHQWTLFFQNGKVKVFQGNQDSFTPVVNSLDPPLLTRYLRIHPQSWEHQIALRMEVLGCEAQDLY

SEQ ID NO: 1121 - DNA, 4371 bp, synthetic construct
  misc_feature 1..4371: note = Variant of human B-domain deleted Factor VIII
  source 1..4371: mol_type = other DNA
atgcagattgaactgtctacctgcttcttcctctgtttgctgaggttctgcttgagcgctactagacggtactaccttggcgctgtggagctgtcctgggactatatgcagagtgatttgggagagcttcccgtcgacgcacgatttcctcctcgcgttccaaagtcatttccctttaacacaagcgtggtgtacaagaagacgctcttcgtcgaattcaccgatcacctgttcaatatcgccaaacccagaccaccatggatgggtcttttggggcctaccatacaagcggaggtgtatgacacagttgttatcactctcaagaacatggcttctcatccggtaagtcttcacgcagtgggcgtgtcctactggaaagcttcagaaggagccgagtatgatgatcagacatcccagagggagaaagaagacgacaaggtatttccaggtgggtctcatacctatgtgtggcaagtgctcaaagagaatggccctatggcaagcgatccgccgtgtttgacttacagctacctttcacacgttgacctcgtcaaggacctcaactccgggttgattggagccttgttggtatgcagggaaggatctcttgccaaagagaagacacagaccctccacaagtttatccttctctttgctgtgttcgatgagggcaaaagttggcatagcgaaacgaagaattccctcatgcaggatcgcgacgcagccagcgccagagcttggcccaagatgcacactgtgaacggatatgtcaataggacgcttcctggcttgattgggtgtcatcggaaaagtgtctactggcacgtgatcggaatggggacaacaccagaggtccactccatatttctcgaaggccataccttccttgttcgaaaccacagacaggcatccttggggatctctcccattacctttctcactgcccaaacgctccttatggacttgggtcagttccttctcttttgccatatcccgtcacaccagcatgatggtatggaagcttatgtgaaagtcgacagttgtcctgaggagccacagttgcgcatgaagaataatgaagaagccgaggattacgacgacgatctcaccgattctgagatggacgtggtgaggtttgatgacgacaactctccctccatcattcaagctcggagcgtggcgaagaaacaccccaagacttgggtccactatatagcggcggaagaggaggattgggattacgctcctcttgtattggcaccagatgaccgctcatacaaaagccagtacctcaacaacggaccgcagagaattggccggaagtataagaaagtgcgatttatggcctatacagacgaaacctttaagacaagggaggccatccagcatgagagtgggattttgggacctcttctttacggcgaagttggtgataccctcctcatcatcttcaagaatcaagcttctcgcccctataacatttacccacacgggatcactgacgttaggcctttgtatagcagaagacttcccaaaggcgtgaagcatctcaaagacttccccattttgccaggcgagatctttaagtacaaatggaccgtcacagtggaagatggaccgactaaatcagaccctcgatgccttacgcggtactattcctccttcgtgaatatggagagagatttggcaagcggactcataggaccactcctcatctgttacaaggaatctgtagaccagaggggtaaccagattatgagtgataaacgcaatgtgatcctttttagcgtcttcgacgagaaccggtcctggtacttgaccgagaatatacaaaggttccttcccaaccccgcaggcgttcagttggaagaccctgagtttcaggccagcaatattatgcactcaatcaacggctatgtgtttgatagtctccagctttctgtttgcctccatgaagtagcctattggtacatcttgtcaattggtgctcaaacagacttcctctccgtcttcttctccggctacacctttaagcacaagatggtgtatgaggacactctcacactctttccattttctggagaaaccgtgttcatgagcatggagaatccaggcctttggatcttgggttgccacaacagtgattttcgcaatcggggaatgactgctctcctcaaagtcagcagctgtgataagaacacaggcgactattacgaagattcttacgaggacataagtgcctactttgactccaagaataacgccattgagcccagatcattctcccagaatcctcccgtgcttaaaaggcatcagcgcgaaatcaccagaactactcttcagtctgatcaagaggagattgactatgacgacaccataagcgtggaaatgaagaaggaggatttcgatatctatgacgaagatgagaaccagtctccgcggagctttcagaagaagacgcgacactacttcattgcagcagtcgaaaggctttgggactacggtatgtcatcatcccctcatgtgttgcgcaatagagctcagagtggaagtgttccacagttcaagaaagtcgtctttcaagagtttacagatggcagcttcacacagcctctctatcggggcgagcttaacgaacatttgggactccttggtccctatatccgagccgaagtggaggacaacattatggttacctttaggaatcaagcctctcgcccctacagcttctactcctccctcatcagttatgaggaggatcagagacaaggcgctgaaccacggaagaactttgtgaaaccgaatgagacgaagacctacttctggaaagtacagcaccacatggcccccacaaaagacgaattcgattgcaaagcatgggcgtatttttcagacgttgacttggagaaagatgtacattcaggacttattggtcctttgttggtgtgtcacactaacactctcaatccagcccatggcaggcaggtgacagtccaggaattcgctcttttctttaccatctttgatgagaccaagtcctggtacttcacggaaaacatggagcgcaattgcagagccccctgtaacatacagatggaggaccctacctttaaggaaaattatcggttccacgcaatcaacggatacattatggatacactccctggccttgtgatggctcaggaccaacgaatcaggtggtacctcctcagcatgggttctaatgagaacatacactccattcacttttcaggacatgtgttcactgtccggaagaaagaagagtataagatggccctctacaatttgtatccaggcgtgtttgagaccgttgaaatgcttccctctaaagctggcatctggagagtagagtgcttgatcggagaacatcttcacgcaggtatgagcaccttgttcctcgtgtacagcaacaaatgtcagaccccacttggcatggccagtggacacattcgcgactttcagatcacagcatctggccagtatggacaatgggccccaaagttggctcgcctccattactccggtagcataaatgcgtggtccactaaagaacctttcagctggattaaggtcgatcttcttgcccccatgatcatccacggcattaagacacagggagcgaggcagaaattctcctccctctacatctcacagttcattattatgtatagtttggacggcaagaagtggcaaacttatagaggtaacagtactggaacagacatggtgttcttcggcaacgttgatagctctggcatcaaacacaacatctttaatcctcccataatagctcggtacatcagattgcatccgacccactacagcattaggagtacactccgaatggagcttatgggttgcgacttgaattcctgttcaatgccactcggaatggagtctaaagccatctctgatgcacagataaccgccagtagctactttacgaacatgtttgctacgtggtcaccctctaaggcaaggcttcatttgcaaggccggtctaatgcctggagacctcaggtgaacaacccgaaagaatggctccaggtggactttcagaagaccatgaaagtaacaggtgtcactactcagggagttaagtccttggatactagcatgtatgtgaaggagttccttatttcctcatcacaagatggccaccagtggaccctcttctttcagaatggtaaggtcaaagtgtttcagggcaatcaagacagcttcacacccgtggtgaacagtcttgatcctccactcttgacacgataccttcgaatccatccacagtcttgggagcaccagattgcattgcgcatggaagtacttggatgcgaggctcaggacctctac

SEQ ID NO: 1122 - protein, 1457 aa, synthetic construct
  REGION 1..1457: note = Variant of human B-domain deleted Factor VIII
MQIELSTCFFLCLLRFCLSATRRYYLGAVELSWDYMQSDLGELPVDARFPPRVPKSFPFNTSVVYKKTLFVEFTDHLFNIAKPRPPWMGLLGPTIQAEVYDTVVITLKNMASHPVSLHAVGVSYWKASEGAEYDDQTSQREKEDDKVFPGGSHTYVWQVLKENGPMASDPPCLTYSYLSHVDLVKDLNSGLIGALLVCREGSLAKEKTQTLHKFILLFAVFDEGKSWHSETKNSLMQDRDAASARAWPKMHTVNGYVNRTLPGLIGCHRKSVYWHVIGMGTTPEVHSIFLEGHTFLVRNHRQASLGISPITFLTAQTLLMDLGQFLLFCHIPSHQHDGMEAYVKVDSCPEEPQLRMKNNEEAEDYDDDLTDSEMDVVRFDDDNSPSIIQARSVAKKHPKTWVHYIAAEEEDWDYAPLVLAPDDRSYKSQYLNNGPQRIGRKYKKVRFMAYTDETFKTREAIQHESGILGPLLYGEVGDTLLIIFKNQASRPYNIYPHGITDVRPLYSRRLPKGVKHLKDFPILPGEIFKYKWTVTVEDGPTKSDPRCLTRYYSSFVNMERDLASGLIGPLLICYKESVDQRGNQIMSDKRNVILFSVFDENRSWYLTENIQRFLPNPAGVQLEDPEFQASNIMHSINGYVFDSLQLSVCLHEVAYWYILSIGAQTDFLSVFFSGYTFKHKMVYEDTLTLFPFSGETVFMSMENPGLWILGCHNSDFRNRGMTALLKVSSCDKNTGDYYEDSYEDISAYFDSKNNAIEPRSFSQNPPVLKRHQREITRTTLQSDQEEIDYDDTISVEMKKEDFDIYDEDENQSPRSFQKKTRHYFIAAVERLWDYGMSSSPHVLRNRAQSGSVPQFKKVVFQEFTDGSFTQPLYRGELNEHLGLLGPYIRAEVEDNIMVTFRNQASRPYSFYSSLISYEEDQRQGAEPRKNFVKPNETKTYFWKVQHHMAPTKDEFDCKAWAYFSDVDLEKDVHSGLIGPLLVCHTNTLNPAHGRQVTVQEFALFFTIFDETKSWYFTENMERNCRAPCNIQMEDPTFKENYRFHAINGYIMDTLPGLVMAQDQRIRWYLLSMGSNENIHSIHFSGHVFTVRKKEEYKMALYNLYPGVFETVEMLPSKAGIWRVECLIGEHLHAGMSTLFLVYSNKCQTPLGMASGHIRDFQITASGQYGQWAPKLARLHYSGSINAWSTKEPFSWIKVDLLAPMIIHGIKTQGARQKFSSLYISQFIIMYSLDGKKWQTYRGNSTGTDMVFFGNVDSSGIKHNIFNPPIIARYIRLHPTHYSIRSTLRMELMGCDLNSCSMPLGMESKAISDAQITASSYFTNMFATWSPSKARLHLQGRSNAWRPQVNNPKEWLQVDFQKTMKVTGVTTQGVKSLDTSMYVKEFLISSSQDGHQWTLFFQNGKVKVFQGNQDSFTPVVNSLDPPLLTRYLRIHPQSWEHQIALRMEVLGCEAQDLY

SEQ ID NO: 1123 - DNA, 4371 bp, synthetic construct
  misc_feature 1..4371: note = Variant of human B-domain deleted Factor VIII
  source 1..4371: mol_type = other DNA
atgcagattgaactgtctacctgcttcttcctctgtgggctgaggttctgctttagcgccactagacggtactaccttggcgctgtggagctgtcctgggactatatgcagagtgatttgggagagcttcccgtcgacgcacgatttcctcctcgcgttccaaagtcatttccctttaacacaagcgtggtgtacaagaagacgctcttcgtcgaattcaccgatcacctgttcaatatcgccaaacccagaccaccatggatgggtcttttggggcctaccatacaagcggaggtgtatgacacagttgttatcactctcaagaacatggcttctcatccggtaagtcttcacgcagtgggcgtgtcctactggaaagcttcagaaggagccgagtatgatgatcagacatcccagagggagaaagaagacgacaaggtatttccaggtgggtctcatacctatgtgtggcaagtgctcaaagagaatggccctatggcaagcgatccgccgtgtttgacttacagctacctttcacacgttgacctcgtcaaggacctcaactccgggttgattggagccttgttggtatgcagggaaggatctcttgccaaagagaagacacagaccctccacaagtttatccttctctttgctgtgttcgatgagggcaaaagttggcatagcgaaacgaagaattccctcatgcaggatcgcgacgcagccagcgccagagcttggcccaagatgcacactgtgaacggatatgtcaataggacgcttcctggcttgattgggtgtcatcggaaaagtgtctactggcacgtgatcggaatggggacaacaccagaggtccactccatatttctcgaaggccataccttccttgttcgaaaccacagacaggcatccttggggatctctcccattacctttctcactgcccaaacgctccttatggacttgggtcagttccttctcttttgccatatcccgtcacaccagcatgatggtatggaagcttatgtgaaagtcgacagttgtcctgaggagccacagttgcgcatgaagaataatgaagaagccgaggattacgacgacgatctcaccgattctgagatggacgtggtgaggtttgatgacgacaactctccctccatcattcaagctcggagcgtggcgaagaaacaccccaagacttgggtccactatatagcggcggaagaggaggattgggattacgctcctcttgtattggcaccagatgaccgctcatacaaaagccagtacctcaacaacggaccgcagagaattggccggaagtataagaaagtgcgatttatggcctatacagacgaaacctttaagacaagggaggccatccagcatgagagtgggattttgggacctcttctttacggcgaagttggtgataccctcctcatcatcttcaagaatcaagcttctcgcccctataacatttacccacacgggatcactgacgttaggcctttgtatagcagaagacttcccaaaggcgtgaagcatctcaaagacttccccattttgccaggcgagatctttaagtacaaatggaccgtcacagtggaagatggaccgactaaatcagaccctcgatgccttacgcggtactattcctccttcgtgaatatggagagagatttggcaagcggactcataggaccactcctcatctgttacaaggaatctgtagaccagaggggtaaccagattatgagtgataaacgcaatgtgatcctttttagcgtcttcgacgagaaccggtcctggtacttgaccgagaatatacaaaggttccttcccaaccccgcaggcgttcagttggaagaccctgagtttcaggccagcaatattatgcactcaatcaacggctatgtgtttgatagtctccagctttctgtttgcctccatgaagtagcctattggtacatcttgtcaattggtgctcaaacagacttcctctccgtcttcttctccggctacacctttaagcacaagatggtgtatgaggacactctcacactctttccattttctggagaaaccgtgttcatgagcatggagaatccaggcctttggatcttgggttgccacaacagtgattttcgcaatcggggaatgactgctctcctcaaagtcagcagctgtgataagaacacaggcgactattacgaagattcttacgaggacataagtgcctactttgactccaagaataacgccattgagcccagatcattctcccagaatcctcccgtgcttaaaaggcatcagcgcgaaatcaccagaactactcttcagtctgatcaagaggagattgactatgacgacaccataagcgtggaaatgaagaaggaggatttcgatatctatgacgaagatgagaaccagtctccgcggagctttcagaagaagacgcgacactacttcattgcagcagtcgaaaggctttgggactacggtatgtcatcatcccctcatgtgttgcgcaatagagctcagagtggaagtgttccacagttcaagaaagtcgtctttcaagagtttacagatggcagcttcacacagcctctctatcggggcgagcttaacgaacatttgggactccttggtccctatatccgagccgaagtggaggacaacattatggttacctttaggaatcaagcctctcgcccctacagcttctactcctccctcatcagttatgaggaggatcagagacaaggcgctgaaccacggaagaactttgtgaaaccgaatgagacgaagacctacttctggaaagtacagcaccacatggcccccacaaaagacgaattcgattgcaaagcatgggcgtatttttcagacgttgacttggagaaagatgtacattcaggacttattggtcctttgttggtgtgtcacactaacactctcaatccagcccatggcaggcaggtgacagtccaggaattcgctcttttctttaccatctttgatgagaccaagtcctggtacttcacggaaaacatggagcgcaattgcagagccccctgtaacatacagatggaggaccctacctttaaggaaaattatcggttccacgcaatcaacggatacattatggatacactccctggccttgtgatggctcaggaccaacgaatcaggtggtacctcctcagcatgggttctaatgagaacatacactccattcacttttcaggacatgtgttcactgtccggaagaaagaagagtataagatggccctctacaatttgtatccaggcgtgtttgagaccgttgaaatgcttccctctaaagctggcatctggagagtagagtgcttgatcggagaacatcttcacgcaggtatgagcaccttgttcctcgtgtacagcaacaaatgtcagaccccacttggcatggccagtggacacattcgcgactttcagatcacagcatctggccagtatggacaatgggccccaaagttggctcgcctccattactccggtagcataaatgcgtggtccactaaagaacctttcagctggattaaggtcgatcttcttgcccccatgatcatccacggcattaagacacagggagcgaggcagaaattctcctccctctacatctcacagttcattattatgtatagtttggacggcaagaagtggcaaacttatagaggtaacagtactggaacagacatggtgttcttcggcaacgttgatagctctggcatcaaacacaacatctttaatcctcccataatagctcggtacatcagattgcatccgacccactacagcattaggagtacactccgaatggagcttatgggttgcgacttgaattcctgttcaatgccactcggaatggagtctaaagccatctctgatgcacagataaccgccagtagctactttacgaacatgtttgctacgtggtcaccctctaaggcaaggcttcatttgcaaggccggtctaatgcctggagacctcaggtgaacaacccgaaagaatggctccaggtggactttcagaagaccatgaaagtaacaggtgtcactactcagggagttaagtccttggatactagcatgtatgtgaaggagttccttatttcctcatcacaagatggccaccagtggaccctcttctttcagaatggtaaggtcaaagtgtttcagggcaatcaagacagcttcacacccgtggtgaacagtcttgatcctccactcttgacacgataccttcgaatccatccacagtcttgggagcaccagattgcattgcgcatggaagtacttggatgcgaggctcaggacctctac

SEQ ID NO: 1124 - protein, 1457 aa, synthetic construct
  REGION 1..1457: note = Variant of human B-domain deleted Factor VIII
MQIELSTCFFLCGLRFCFSATRRYYLGAVELSWDYMQSDLGELPVDARFPPRVPKSFPFNTSVVYKKTLFVEFTDHLFNIAKPRPPWMGLLGPTIQAEVYDTVVITLKNMASHPVSLHAVGVSYWKASEGAEYDDQTSQREKEDDKVFPGGSHTYVWQVLKENGPMASDPPCLTYSYLSHVDLVKDLNSGLIGALLVCREGSLAKEKTQTLHKFILLFAVFDEGKSWHSETKNSLMQDRDAASARAWPKMHTVNGYVNRTLPGLIGCHRKSVYWHVIGMGTTPEVHSIFLEGHTFLVRNHRQASLGISPITFLTAQTLLMDLGQFLLFCHIPSHQHDGMEAYVKVDSCPEEPQLRMKNNEEAEDYDDDLTDSEMDVVRFDDDNSPSIIQARSVAKKHPKTWVHYIAAEEEDWDYAPLVLAPDDRSYKSQYLNNGPQRIGRKYKKVRFMAYTDETFKTREAIQHESGILGPLLYGEVGDTLLIIFKNQASRPYNIYPHGITDVRPLYSRRLPKGVKHLKDFPILPGEIFKYKWTVTVEDGPTKSDPRCLTRYYSSFVNMERDLASGLIGPLLICYKESVDQRGNQIMSDKRNVILFSVFDENRSWYLTENIQRFLPNPAGVQLEDPEFQASNIMHSINGYVFDSLQLSVCLHEVAYWYILSIGAQTDFLSVFFSGYTFKHKMVYEDTLTLFPFSGETVFMSMENPGLWILGCHNSDFRNRGMTALLKVSSCDKNTGDYYEDSYEDISAYFDSKNNAIEPRSFSQNPPVLKRHQREITRTTLQSDQEEIDYDDTISVEMKKEDFDIYDEDENQSPRSFQKKTRHYFIAAVERLWDYGMSSSPHVLRNRAQSGSVPQFKKVVFQEFTDGSFTQPLYRGELNEHLGLLGPYIRAEVEDNIMVTFRNQASRPYSFYSSLISYEEDQRQGAEPRKNFVKPNETKTYFWKVQHHMAPTKDEFDCKAWAYFSDVDLEKDVHSGLIGPLLVCHTNTLNPAHGRQVTVQEFALFFTIFDETKSWYFTENMERNCRAPCNIQMEDPTFKENYRFHAINGYIMDTLPGLVMAQDQRIRWYLLSMGSNENIHSIHFSGHVFTVRKKEEYKMALYNLYPGVFETVEMLPSKAGIWRVECLIGEHLHAGMSTLFLVYSNKCQTPLGMASGHIRDFQITASGQYGQWAPKLARLHYSGSINAWSTKEPFSWIKVDLLAPMIIHGIKTQGARQKFSSLYISQFIIMYSLDGKKWQTYRGNSTGTDMVFFGNVDSSGIKHNIFNPPIIARYIRLHPTHYSIRSTLRMELMGCDLNSCSMPLGMESKAISDAQITASSYFTNMFATWSPSKARLHLQGRSNAWRPQVNNPKEWLQVDFQKTMKVTGVTTQGVKSLDTSMYVKEFLISSSQDGHQWTLFFQNGKVKVFQGNQDSFTPVVNSLDPPLLTRYLRIHPQSWEHQIALRMEVLGCEAQDLY

SEQ ID NO: 1125 - DNA, 4371 bp, synthetic construct
  misc_feature 1..4371: note = Variant of human B-domain deleted Factor VIII
  source 1..4371: mol_type = other DNA
atgcagattgaactgtctacctgcttcttcctctgtttgctgaggttctgctttagcgccactagacggtactaccttggcgctgtggagctgtcctgggactatatgcagagtgatttgggagagcttcccgtcgacgcacgatttcctcctcgcgttccaaagtcatttccctttaacacaagcgtggtgtacaagaagacgctcttcgtcgaattcaccgatcacctgttcaatatcgccaaacccagaccaccatggatgggtcttttggggcctaccatacaagcggaggtgtatgacacagttgttatcactctcaagaacatggcttctcatccggtaagtcttcacgcagtgggcgtgtcctactggaaagcttcagaaggagccgagtatgatgatcagacatcccagagggagaaagaagacgacaaggtatttccaggtgggtctcatacctatgtgtggcaagtgctcaaagagaatggccctatggcaagcgatccgccgtgtttgacttacagctacctttcacacgttgacctcgtcaaggacctcaactccgggttgattggagccttgttggtatgcagggaaggatctcttgccaaagagaagacacagaccctccacaagtttatccttctctttgctgtgttcgatgagggcaaaagttggcatagcgaaacgaagaattccctcatgcaggatcgcgacgcagccagcgccagagcttggcccaagatgcacactgtgaacggatatgtcaataggacgcttcctggcttgattgggtgtcatcggaaaagtgtctactggcacgtgatcggaatggggacaacaccagaggtccactccatatttctcgaaggccataccttccttgttcgaaaccacagacaggcatccttggggatctctcccattacctttctcactgcccaaacgctccttatggacttgggtcagttccttctcttttgccatatcccgtcacaccagcatgatggtatggaagcttatgtgaaagtcgacagttgtcctgaggagccacagttgcgcatgaagaataatgaagaagccgaggattacgacgacgatctcaccgattctgagatggacgtggtgaggtttgatgacgacaactctccctccatcattcaagctcggagcgtggcgaagaaacaccccaagacttgggtccactatatagcggcggaagaggaggattgggattacgctcctcttgtattggcaccagatgaccgctcatacaaaagccagtacctcaacaacggaccgcagagaattggccggaagtataagaaagtgcgatttatggcctatacagacgaaacctttaagacaagggaggccatccagcatgagagtgggattttgggacctcttctttacggcgaagttggtgataccctcctcatcatcttcaagaatcaagcttctcgcccctataacatttacccacacgggatcactgacgttaggcctttgtatagcagaagacttcccaaaggcgtgaagcatctcaaagacttccccattttgccaggcgagatctttaagtacaaatggaccgtcacagtggaagatggaccgactaaatcagaccctcgatgccttacgcggtactattcctccttcgtgaatatggagagagatttggcaagcggactcataggaccactcctcatctgttacaaggaatctgtagaccagaggggtaaccagattatgagtgataaacgcaatgtgatcctttttagcgtcttcgacgagaaccggtcctggtacttgaccgagaatatacaaaggttccttcccaaccccgcaggcgttcagttggaagaccctgagtttcaggccagcaatattatgcactcaatcaacggctatgtgtttgatagtctccagctttctgtttgcctccatgaagtagcctattggtacatcttgtcaattggtgctcaaacagacttcctctccgtcttcttctccggctacacctttaagcacaagatggtgtatgaggacactctcacactctttccattttctggagaaaccgtgttcatgagcatggagaatccaggcctttggatcttgggttgccacaacagtgattttcgcaatcggggaatgactgctctcctcaaagtcagcagctgtgataagaacacaggcgactattacgaagattcttacgaggacataagtgcctactttgactccaagaataacgccattgagcccagatcattctcccagaatcctcccgtgcttaaaaggcatcagcgcgaaatcaccagaactactcttcagtctgatcaagaggagattgactatgacgacaccataagcgtggaaatgaagaaggaggatttcgatatctatgacgaagatgagaaccagtctccgcggagctttcagaagaagacgcgacactacttcattgcagcagtcgaaaggctttgggactacggtatgtcatcatcccctcatgtgttgcgcaatagagctcagagtggaagtgttccacagttcaagaaagtcgtctttcaagagtttacagatggcagcttcacacagcctctctatcggggcgagcttaacgaacatttgggactccttggtccctatatccgagccgaagtggaggacaacattatggttacctttaggaatcaagcctctcgcccctacagcttctactcctccctcatcagttatgaggaggatcagagacaaggcgctgaaccacggaagaactttgtgaaaccgaatgagacgaagacctacttctggaaagtacagcaccacatggcccccacaaaagacgaattcgattgcaaagcatgggcgtatttttcagacgttgacttggagaaagatgtacattcaggacttattggtcctttgttggtgtgtcacactaacactctcaatccagcccatggcaggcaggtgacagtccaggaattcgctcttttctttaccatctttgatgagaccaagtcctggtacttcacggaaaacatggagcgcaattgcagagccccctgtaacatacagatggaggaccctacctttaaggaaaattatcggttccacgcaatcaacggatacattatggatacactccctggccttgtgatggctcaggaccaacgaatcaggtggtacctcctcagcatgggttctaatgagaacatacactccattcacttttcaggacatgtgttcactgtccggaagaaagaagagtataagatggccctctacaatttgtatccaggcgtgtttgagaccgttgaaatgcttccctctaaagctggcatctggagagtagagtgcttgatcggagaacatcttcacgcaggtatgagcaccttgttcctcgtgtacagcaacaaatgtcagaccccacttggcatggccagtggacacattcgcgactttcagatcacagcatctggccagtatggacaatgggccccaaagttggctcgcctccattactccggtagcataaatgcgtggtccactaaagaacctttcagctggattaaggtcgatcttcttgcccccatgatcatccacggcattatgacacagggagcgaggcagaaattctcctccctctacatctcacagttcattattatgtatagtttggacggcaagaagtggcaaacttatagaggtaacagtactggaacagacatggtgttcttcggcaacgttgatagctctggcatcaaacacaacatctttaatcctcccataatagctcggtacatcagattgcatccgacccactacagcattaggagtacactccgaatggagcttatgggttgcgacttgaattcctgttcaatgccactcggaatggagtctaaagccatctctgatgcacagataaccgccagtagctactttacgaacatgtttgctacgtggtcaccctctaaggcaaggcttcatttgcaaggccggtctaatgcctggagacctcaggtgaacaacccgaaagaatggctccaggtggactttcagaagaccatgaaagtaacaggtgtcactactcagggagttaagtccttggatactagcatgtatgtgaaggagttccttatttcctcatcacaagatggccaccagtggaccctcttctttcagaatggtaaggtcaaagtgtttcagggcaatcaagacagcttcacacccgtggtgaacagtcttgatcctccactcttgacacgataccttcgaatccatccacagtcttgggagcaccagattgcattgcgcatggaagtacttggatgcgaggctcaggacctctac

SEQ ID NO: 1126 - protein, 1457 aa, synthetic construct
  REGION 1..1457: note = Variant of human B-domain deleted Factor VIII
MQIELSTCFFLCLLRFCFSATRRYYLGAVELSWDYMQSDLGELPVDARFPPRVPKSFPFNTSVVYKKTLFVEFTDHLFNIAKPRPPWMGLLGPTIQAEVYDTVVITLKNMASHPVSLHAVGVSYWKASEGAEYDDQTSQREKEDDKVFPGGSHTYVWQVLKENGPMASDPPCLTYSYLSHVDLVKDLNSGLIGALLVCREGSLAKEKTQTLHKFILLFAVFDEGKSWHSETKNSLMQDRDAASARAWPKMHTVNGYVNRTLPGLIGCHRKSVYWHVIGMGTTPEVHSIFLEGHTFLVRNHRQASLGISPITFLTAQTLLMDLGQFLLFCHIPSHQHDGMEAYVKVDSCPEEPQLRMKNNEEAEDYDDDLTDSEMDVVRFDDDNSPSIIQARSVAKKHPKTWVHYIAAEEEDWDYAPLVLAPDDRSYKSQYLNNGPQRIGRKYKKVRFMAYTDETFKTREAIQHESGILGPLLYGEVGDTLLIIFKNQASRPYNIYPHGITDVRPLYSRRLPKGVKHLKDFPILPGEIFKYKWTVTVEDGPTKSDPRCLTRYYSSFVNMERDLASGLIGPLLICYKESVDQRGNQIMSDKRNVILFSVFDENRSWYLTENIQRFLPNPAGVQLEDPEFQASNIMHSINGYVFDSLQLSVCLHEVAYWYILSIGAQTDFLSVFFSGYTFKHKMVYEDTLTLFPFSGETVFMSMENPGLWILGCHNSDFRNRGMTALLKVSSCDKNTGDYYEDSYEDISAYFDSKNNAIEPRSFSQNPPVLKRHQREITRTTLQSDQEEIDYDDTISVEMKKEDFDIYDEDENQSPRSFQKKTRHYFIAAVERLWDYGMSSSPHVLRNRAQSGSVPQFKKVVFQEFTDGSFTQPLYRGELNEHLGLLGPYIRAEVEDNIMVTFRNQASRPYSFYSSLISYEEDQRQGAEPRKNFVKPNETKTYFWKVQHHMAPTKDEFDCKAWAYFSDVDLEKDVHSGLIGPLLVCHTNTLNPAHGRQVTVQEFALFFTIFDETKSWYFTENMERNCRAPCNIQMEDPTFKENYRFHAINGYIMDTLPGLVMAQDQRIRWYLLSMGSNENIHSIHFSGHVFTVRKKEEYKMALYNLYPGVFETVEMLPSKAGIWRVECLIGEHLHAGMSTLFLVYSNKCQTPLGMASGHIRDFQITASGQYGQWAPKLARLHYSGSINAWSTKEPFSWIKVDLLAPMIIHGIMTQGARQKFSSLYISQFIIMYSLDGKKWQTYRGNSTGTDMVFFGNVDSSGIKHNIFNPPIIARYIRLHPTHYSIRSTLRMELMGCDLNSCSMPLGMESKAISDAQITASSYFTNMFATWSPSKARLHLQGRSNAWRPQVNNPKEWLQVDFQKTMKVTGVTTQGVKSLDTSMYVKEFLISSSQDGHQWTLFFQNGKVKVFQGNQDSFTPVVNSLDPPLLTRYLRIHPQSWEHQIALRMEVLGCEAQDLY

SEQ ID NO: 1127 - DNA, 4371 bp, synthetic construct
  misc_feature 1..4371: note = Variant of human B-domain deleted Factor VIII
  source 1..4371: mol_type = other DNA
atgcagattgaactgtctacctgcttcttcctctgtttgctgaggttctgctttagcgccactagacggtactaccttggcgctgtggagctgtcctgggactatatgcagagtgatttgggagagcttcccgtcgacgcacgatttcctcctcgcgttccaaagtcatttccctttaacacaagcgtggtgtacaagaagacgctcttcgtcgaattcaccgatcacctgttcaatatcgccaaacccagaccaccatggatgggtcttttggggcctaccatacaagcggaggtgtatgacacagttgttatcactctcaagaacatggcttctcatccggtaagtcttcacgcagtgggcgtgtcctactggaaagcttcagaaggagccgagtatgatgatcagacatcccagagggagaaagaagacgacaaggtatttccaggtgggtctcatacctatgtgtggcaagtgctcaaagagaatggccctatggcaagcgatccgccgtgtttgacttacagctacctttcacacgttgacctcgtcaaggacctcaactccgggttgattggagccttgttggtatgcagggaaggatctcttgccaaagagaagacacagaccctccacaagtttatccttctctttgctgtgttcgatgagggcaaaagttggcatagcgaaacgaagaattccctcatgcaggatcgcgacgcagccagcgccagagcttggcccaagatgcacactgtgaacggatatgtcaataggacgcttcctggcttgattgggtgtcatcggaaaagtgtctactggcacgtgatcggaatggggacaacaccagaggtccactccatatttctcgaaggccataccttccttgttcgaaaccacagacaggcatccttggggatctctcccattacctttctcactgcccaaacgctccttatggacttgggtcagttccttctcttttgccatatcccgtcacaccagcatgatggtatggaagcttatgtgaaagtcgacagttgtcctgaggagccacagttgcgcatgaagaataatgaagaagccgaggattacgacgacgatctcaccgattctgagatggacgtggtgaggtttgatgacgacaactctccctccatcattcaagctcggagcgtggcgaagaaacaccccaagacttgggtccactatatagcggcggaagaggaggattgggattacgctcctcttgtattggcaccagatgaccgctcatacaaaagccagtacctcaacaacggaccgcagagaattggccggaagtataagaaagtgcgatttatggcctatacagacgaaacctttaagacaagggaggccatccagcatgagagtgggattttgggacctcttctttacggcgaagttggtgataccctcctcatcatcttcaagaatcaagcttctcgcccctataacatttacccacacgggatcactgacgttaggcctttgtatagcagaagacttcccaaaggcgtgaagcatctcaaagacttccccattttgccaggcgagatctttaagtacaaatggaccgtcacagtggaagatggaccgactaaatcagaccctcgatgccttacgcggtactattcctccttcgtgaatatggagagagatttggcaagcggactcataggaccactcctcatctgttacaaggaatctgtagaccagaggggtaaccagattatgagtgataaacgcaatgtgatcctttttagcgtcttcgacgagaaccggtcctggtacttgaccgagaatatacaaaggttccttcccaaccccgcaggcgttcagttggaagaccctgagtttcaggccagcaatattatgcactcaatcaacggctatgtgtttgatagtctccagctttctgtttgcctccatgaagtagcctattggtacatcttgtcaattggtgctcaaacagacttcctctccgtcttcttctccggctacacctttaagcacaagatggtgtatgaggacactctcacactctttccattttctggagaaaccgtgttcatgagcatggagaatccaggcctttggatcttgggttgccacaacagtgattttcgcaatcggggaatgactgctctcctcaaagtcagcagctgtgataagaacacaggcgactattacgaagattcttacgaggacataagtgcctactttgactccaagaataacgccattgagcccagatcattctcccagaatcctcccgtgcttaaaaggcatcagcgcgaaatcaccagaactactcttcagtctgatcaagaggagattgactatgacgacaccataagcgtggaaatgaagaaggaggatttcgatatctatgacgaagatgagaaccagtctccgcggagctttcagaagaagacgcgacactacttcattgcagcagtcgaaaggctttgggactacggtatgtcatcatcccctcatgtgttgcgcaatagagctcagagtggaagtgttccacagttcaagaaagtcgtctttcaagagtttacagatggcagcttcacacagcctctctatcggggcgagcttaacgaacatttgggactccttggtccctatatccgagccgaagtggaggacaacattatggttacctttaggaatcaagcctctcgcccctacagcttctactcctccctcatcagttatgaggaggatcagagacaaggcgctgaaccacggaagaactttgtgaaaccgaatgagacgaagacctacttctggaaagtacagcaccacatggcccccacaaaagacgaattcgattgcaaagcatgggcgtatttttcagacgttgacttggagaaagatgtacattcaggacttattggtcctttgttggtgtgtcacactaacactctcaatccagcccatggcaggcaggtgacagtccaggaattcgctcttttctttaccatctttgatgagaccaagtcctggtacttcacggaaaacatggagcgcaattgcagagccccctgtaacatacagatggaggaccctacctttaaggaaaattatcggttccacgcaatcaacggatacattatggatacactccctggccttgtgatggctcaggaccaacgaatcaggtggtacctcctcagcatgggttctaatgagaacatacactccattcacttttcaggacatgtgttcactgtccggaagaaagaagagtataagatggccctctacaatttgtatccaggcgtgtttgagaccgttgaaatgcttccctctaaagctggcatctggagagtagagtgcttgatcggagaacatcttcacgcaggtatgagcaccttgttcctcgtgtacagcaacaaatgtcagaccccacttggcatggccagtggaggtattcgcgactttcagatcacagcatctggccagtatggacaatgggccccaaagttggctcgcctccattactccggtagcataaatgcgtggtccactaaagaacctttcagctggattaaggtcgatcttcttgcccccatgatcatccacggcattaagacacagggagcgaggcagaaattctcctccctctacatctcacagttcattattatgtatagtttggacggcaagaagtggcaaacttatagaggtaacagtactggaacagacatggtgttcttcggcaacgttgatagctctggcatcaaacacaacatctttaatcctcccataatagctcggtacatcagattgcatccgacccactacagcattaggagtacactccgaatggagcttatgggttgcgacttgaattcctgttcaatgccactcggaatggagtctaaagccatctctgatgcacagataaccgccagtagctactttacgaacatgtttgctacgtggtcaccctctaaggcaaggcttcatttgcaaggccggtctaatgcctggagacctcaggtgaacaacccgaaagaatggctccaggtggactttcagaagaccatgaaagtaacaggtgtcactactcagggagttaagtccttggatactagcatgtatgtgaaggagttccttatttcctcatcacaagatggccaccagtggaccctcttctttcagaatggtaaggtcaaagtgtttcagggcaatcaagacagcttcacacccgtggtgaacagtcttgatcctccactcttgacacgataccttcgaatccatccacagtcttgggagcaccagattgcattgcgcatggaagtacttggatgcgaggctcaggacctctac

SEQ ID NO: 1128 - protein, 1457 aa, synthetic construct
  REGION 1..1457: note = Variant of human B-domain deleted Factor VIII
MQIELSTCFFLCLLRFCFSATRRYYLGAVELSWDYMQSDLGELPVDARFPPRVPKSFPFNTSVVYKKTLFVEFTDHLFNIAKPRPPWMGLLGPTIQAEVYDTVVITLKNMASHPVSLHAVGVSYWKASEGAEYDDQTSQREKEDDKVFPGGSHTYVWQVLKENGPMASDPPCLTYSYLSHVDLVKDLNSGLIGALLVCREGSLAKEKTQTLHKFILLFAVFDEGKSWHSETKNSLMQDRDAASARAWPKMHTVNGYVNRTLPGLIGCHRKSVYWHVIGMGTTPEVHSIFLEGHTFLVRNHRQASLGISPITFLTAQTLLMDLGQFLLFCHIPSHQHDGMEAYVKVDSCPEEPQLRMKNNEEAEDYDDDLTDSEMDVVRFDDDNSPSIIQARSVAKKHPKTWVHYIAAEEEDWDYAPLVLAPDDRSYKSQYLNNGPQRIGRKYKKVRFMAYTDETFKTREAIQHESGILGPLLYGEVGDTLLIIFKNQASRPYNIYPHGITDVRPLYSRRLPKGVKHLKDFPILPGEIFKYKWTVTVEDGPTKSDPRCLTRYYSSFVNMERDLASGLIGPLLICYKESVDQRGNQIMSDKRNVILFSVFDENRSWYLTENIQRFLPNPAGVQLEDPEFQASNIMHSINGYVFDSLQLSVCLHEVAYWYILSIGAQTDFLSVFFSGYTFKHKMVYEDTLTLFPFSGETVFMSMENPGLWILGCHNSDFRNRGMTALLKVSSCDKNTGDYYEDSYEDISAYFDSKNNAIEPRSFSQNPPVLKRHQREITRTTLQSDQEEIDYDDTISVEMKKEDFDIYDEDENQSPRSFQKKTRHYFIAAVERLWDYGMSSSPHVLRNRAQSGSVPQFKKVVFQEFTDGSFTQPLYRGELNEHLGLLGPYIRAEVEDNIMVTFRNQASRPYSFYSSLISYEEDQRQGAEPRKNFVKPNETKTYFWKVQHHMAPTKDEFDCKAWAYFSDVDLEKDVHSGLIGPLLVCHTNTLNPAHGRQVTVQEFALFFTIFDETKSWYFTENMERNCRAPCNIQMEDPTFKENYRFHAINGYIMDTLPGLVMAQDQRIRWYLLSMGSNENIHSIHFSGHVFTVRKKEEYKMALYNLYPGVFETVEMLPSKAGIWRVECLIGEHLHAGMSTLFLVYSNKCQTPLGMASGGIRDFQITASGQYGQWAPKLARLHYSGSINAWSTKEPFSWIKVDLLAPMIIHGIKTQGARQKFSSLYISQFIIMYSLDGKKWQTYRGNSTGTDMVFFGNVDSSGIKHNIFNPPIIARYIRLHPTHYSIRSTLRMELMGCDLNSCSMPLGMESKAISDAQITASSYFTNMFATWSPSKARLHLQGRSNAWRPQVNNPKEWLQVDFQKTMKVTGVTTQGVKSLDTSMYVKEFLISSSQDGHQWTLFFQNGKVKVFQGNQDSFTPVVNSLDPPLLTRYLRIHPQSWEHQIALRMEVLGCEAQDLY

SEQ ID NO: 1129 - DNA, 4371 bp, synthetic construct
  misc_feature 1..4371: note = Variant of human B-domain deleted Factor VIII
  source 1..4371: mol_type = other DNA
atgcagattgaactgtctacctgcttcttcctctgtttgctgaggttctgctttagcgccactagacggtactaccttggcgctgtggagctgtcctgggactatatgcagagtgatttgggagagcttcccgtcgacgcacgatttcctcctcgcgttccaaagtcatttccctttaacacaagcgtggtgtacaagaagacgctcttcgtcgaattcaccgatcacctgttcaatatcgccaaacccagaccaccatggatgggtcttttggggcctaccatacaagcggaggtgtatgacacagttgttatcactctcaagaacatggcttctcatccggtaagtcttcacgcagtgggcgtgtcctactggaaagcttcagaaggagccgagtatgatgatcagacatcccagagggagaaagaagacgacaaggtatttccaggtgggtctcatacctatgtgtggcaagtgctcaaagagaatggccctatggcaagcgatccgccgtgtttgacttacagctacctttcacacgttgacctcgtcaaggacctcaactccgggttgattggagccttgttggtatgcagggaaggatctcttgccaaagagaagacacagaccctccacaagtttatccttctctttgctgtgttcgatgagggcaaaagttggcatagcgaaacgaagaattccctcatgcaggatcgcgacgcagccagcgccagagcttggcccaagatgcacactgtgaacggatatgtcaataggacgcttcctggcttgattgggtgtcatcggaaaagtgtctactggcacgtgatcggaatggggacaacaccagaggtccactccatatttctcgaaggccataccttccttgttcgaaaccacagacaggcatccttggggatctctcccattacctttctcactgcccaaacgctccttatggacttgggtcagttccttctcttttgccatatcccgtcacaccagcatgatggtatggaagcttatgtgaaagtcgacagttgtcctgaggagccacagttgcgcatgaagaataatgaagaagccgaggattacgacgacgatctcaccgattctgagatggacgtggtgaggtttgatgacgacaactctccctccatcattcaagctcggagcgtggcgaagaaacaccccaagacttgggtccactatatagcggcggaagaggaggattgggattacgctcctcttgtattggcaccagatgaccgctcatacaaaagccagtacctcaacaacggaccgcagagaattggccggaagtataagaaagtgcgatttatggcctatacagacgaaacctttaagacaagggaggccatccagcatgagagtgggattttgggacctcttctttacggcgaagttggtgataccctcctcatcatcttcaagaatcaagcttctcgcccctataacatttacccacacgggatcactgacgttaggcctttgtatagcagaagacttcccaaaggcgtgaagcatctcaaagacttccccattttgccaggcgagatctttaagtacaaatggaccgtcacagtggaagatggaccgactaaatcagaccctcgatgccttacgcggtactattcctccttcgtgaatttggagagagatttggcaagcggactcataggaccactcctcatctgttacaaggaatctgtagaccagaggggtaaccagattatgagtgataaacgcaatgtgatcctttttagcgtcttcgacgagaaccggtcctggtacttgaccgagaatatacaaaggttccttcccaaccccgcaggcgttcagttggaagaccctgagtttcaggccagcaatattatgcactcaatcaacggctatgtgtttgatagtctccagctttctgtttgcctccatgaagtagcctattggtacatcttgtcaattggtgctcaaacagacttcctctccgtcttcttctccggctacacctttaagcacaagatggtgtatgaggacactctcacactctttccattttctggagaaaccgtgttcatgagcatggagaatccaggcctttggatcttgggttgccacaacagtgattttcgcaatcggggaatgactgctctcctcaaagtcagcagctgtgataagaacacaggcgactattacgaagattcttacgaggacataagtgcctactttgactccaagaataacgccattgagcccagatcattctcccagaatcctcccgtgcttaaaaggcatcagcgcgaaatcaccagaactactcttcagtctgatcaagaggagattgactatgacgacaccataagcgtggaaatgaagaaggaggatttcgatatctatgacgaagatgagaaccagtctccgcggagctttcagaagaagacgcgacactacttcattgcagcagtcgaaaggctttgggactacggtatgtcatcatcccctcatgtgttgcgcaatagagctcagagtggaagtgttccacagttcaagaaagtcgtctttcaagagtttacagatggcagcttcacacagcctctctatcggggcgagcttaacgaacatttgggactccttggtccctatatccgagccgaagtggaggacaacattatggttacctttaggaatcaagcctctcgcccctacagcttctactcctccctcatcagttatgaggaggatcagagacaaggcgctgaaccacggaagaactttgtgaaaccgaatgagacgaagacctacttctggaaagtacagcaccacatggcccccacaaaagacgaattcgattgcaaagcatgggcgtatttttcagacgttgacttggagaaagatgtacattcaggacttattggtcctttgttggtgtgtcacactaacactctcaatccagcccatggcaggcaggtgacagtccaggaattcgctcttttctttaccatctttgatgagaccaagtcctggtacttcacggaaaacatggagcgcaattgcagagccccctgtaacatacagatggaggaccctacctttaaggaaaattatcggttccacgcaatcaacggatacattatggatacactccctggccttgtgatggctcaggaccaacgaatcaggtggtacctcctcagcatgggttctaatgagaacatacactccattcacttttcaggacatgtgttcactgtccggaagaaagaagagtataagatggccctctacaatttgtatccaggcgtgtttgagaccgttgaaatgcttccctctaaagctggcatctggagagtagagtgcttgatcggagaacatcttcacgcaggtatgagcaccttgttcctcgtgtacagcaacaaatgtcagaccccacttggcatggccagtggacacattcgcgactttcagatcacagcatctggccagtatggacaatgggccccaaagttggctcgcctccattactccggtagcataaatgcgtggtccactaaagaacctttcagctggattaaggtcgatcttcttgcccccatgatcatccacggcattaagacacagggagcgaggcagaaattctcctccctctacatctcacagttcattattatgtatagtttggacggcaagaagtggcaaacttatagaggtaacagtactggaacagacatggtgttcttcggcaacgttgatagctctggcatcaaacacaacatctttaatcctcccataatagctcggtacatcagattgcatccgacccactacagcattaggagtacactccgaatggagcttatgggttgcgacttgaattcctgttcaatgccactcggaatggagtctaaagccatctctgatgcacagataaccgccagtagctactttacgaacatgtttgctacgtggtcaccctctaaggcaaggcttcatttgcaaggccggtctaatgcctggagacctcaggtgaacaacccgaaagaatggctccaggtggactttcagaagaccatgaaagtaacaggtgtcactactcagggagttaagtccttggatactagcatgtatgtgaaggagttccttatttcctcatcacaagatggccaccagtggaccctcttctttcagaatggtaaggtcaaagtgtttcagggcaatcaagacagcttcacacccgtggtgaacagtcttgatcctccactcttgacacgataccttcgaatccatccacagtcttgggagcaccagattgcattgcgcatggaagtacttggatgcgaggctcaggacctctac

SEQ ID NO: 1130 - protein, 1457 aa, synthetic construct
  REGION 1..1457: note = Variant of human B-domain deleted Factor VIII
MQIELSTCFFLCLLRFCFSATRRYYLGAVELSWDYMQSDLGELPVDARFPPRVPKSFPFNTSVVYKKTLFVEFTDHLFNIAKPRPPWMGLLGPTIQAEVYDTVVITLKNMASHPVSLHAVGVSYWKASEGAEYDDQTSQREKEDDKVFPGGSHTYVWQVLKENGPMASDPPCLTYSYLSHVDLVKDLNSGLIGALLVCREGSLAKEKTQTLHKFILLFAVFDEGKSWHSETKNSLMQDRDAASARAWPKMHTVNGYVNRTLPGLIGCHRKSVYWHVIGMGTTPEVHSIFLEGHTFLVRNHRQASLGISPITFLTAQTLLMDLGQFLLFCHIPSHQHDGMEAYVKVDSCPEEPQLRMKNNEEAEDYDDDLTDSEMDVVRFDDDNSPSIIQARSVAKKHPKTWVHYIAAEEEDWDYAPLVLAPDDRSYKSQYLNNGPQRIGRKYKKVRFMAYTDETFKTREAIQHESGILGPLLYGEVGDTLLIIFKNQASRPYNIYPHGITDVRPLYSRRLPKGVKHLKDFPILPGEIFKYKWTVTVEDGPTKSDPRCLTRYYSSFVNLERDLASGLIGPLLICYKESVDQRGNQIMSDKRNVILFSVFDENRSWYLTENIQRFLPNPAGVQLEDPEFQASNIMHSINGYVFDSLQLSVCLHEVAYWYILSIGAQTDFLSVFFSGYTFKHKMVYEDTLTLFPFSGETVFMSMENPGLWILGCHNSDFRNRGMTALLKVSSCDKNTGDYYEDSYEDISAYFDSKNNAIEPRSFSQNPPVLKRHQREITRTTLQSDQEEIDYDDTISVEMKKEDFDIYDEDENQSPRSFQKKTRHYFIAAVERLWDYGMSSSPHVLRNRAQSGSVPQFKKVVFQEFTDGSFTQPLYRGELNEHLGLLGPYIRAEVEDNIMVTFRNQASRPYSFYSSLISYEEDQRQGAEPRKNFVKPNETKTYFWKVQHHMAPTKDEFDCKAWAYFSDVDLEKDVHSGLIGPLLVCHTNTLNPAHGRQVTVQEFALFFTIFDETKSWYFTENMERNCRAPCNIQMEDPTFKENYRFHAINGYIMDTLPGLVMAQDQRIRWYLLSMGSNENIHSIHFSGHVFTVRKKEEYKMALYNLYPGVFETVEMLPSKAGIWRVECLIGEHLHAGMSTLFLVYSNKCQTPLGMASGHIRDFQITASGQYGQWAPKLARLHYSGSINAWSTKEPFSWIKVDLLAPMIIHGIKTQGARQKFSSLYISQFIIMYSLDGKKWQTYRGNSTGTDMVFFGNVDSSGIKHNIFNPPIIARYIRLHPTHYSIRSTLRMELMGCDLNSCSMPLGMESKAISDAQITASSYFTNMFATWSPSKARLHLQGRSNAWRPQVNNPKEWLQVDFQKTMKVTGVTTQGVKSLDTSMYVKEFLISSSQDGHQWTLFFQNGKVKVFQGNQDSFTPVVNSLDPPLLTRYLRIHPQSWEHQIALRMEVLGCEAQDLY

SEQ ID NO: 1131 - DNA, 4371 bp, synthetic construct
  misc_feature 1..4371: note = Variant of human B-domain deleted Factor VIII
  source 1..4371: mol_type = other DNA
atgcagattgaactgtctacctgcttcttcctctgtttgctgaggttctgctttagcgccactagacggtactaccttggcgctgtggagctgtcctgggactatatgcagagtgatttgggagagcttcccgtcgacgcacgatttcctcctcgcgttccaaagtcatttccctttaacacaagcgtggtgtacaagaagacgctcttcgtcgaattcaccgatcacctgttcaatatcgccaaacccagaccaccatggatgggtcttttggggcctaccatacaagcggaggtgtatgacacagttgttatcactctcaagaacatggcttctcatccggtaagtcttcacgcagtgggcgtgtcctactggaaagcttcagaaggagccgagtatgatgatcagacatcccagagggagaaagaagacgacaaggtatttccaggtgggtctcatacctatgtgtggcaagtgctcaaagagaatggccctatggcaagcgatccgccgtgtttgacttacagctacctttcacacgttgacctcgtcaaggacctcaactccgggttgattggagccttgttggtatgcagggaaggatctcttgccaaagagaagacacagaccctccacaagtttatccttctctttgctgtgttcgatgagggcaaaagttggcatagcgaaacgaagaattccctcatgcaggatcgcgacgcagccagcgccagagcttggcccaagatgcacactgtgaacggatatgtcaataggacgcttcctggcttgattgggtgtcatcggaaaagtgtctactggcacgtgatcggaatggggacaacaccagaggtccactccatatttctcgaaggccataccttccttgttcgaaaccacagacaggcatccttggggatctctcccattacctttctcactgcccaaacgctccttatggacttgggtcagttccttctcttttgccatatcccgtcacaccagcatgatggtatggaagcttatgtgaaagtcgacagttgtcctgaggagccacagttgcgcatgaagaataatgaagaagccgaggattacgacgacgatctcaccgattctgagatggacgtggtgaggtttgatgacgacaactctccctccatcattcaagctcggagcgtggcgaagaaacaccccaagacttgggtccactatatagcggcggaagaggaggattgggattacgctcctcttgtattggcaccagatgaccgctcatacaaaagccagtacctcaacaacggaccgcagagaattggccggaagtataagaaagtgcgatttatggcctatacagacgaaacctttaagacaagggaggccatccagcatgagagtgggattttgggacctcttctttacggcgaagttggtgataccctcctcatcatcttcaagaatcaagcttctcgcccctataacatttacccacacgggatcactgacgttaggcctttgtatagcagaagacttcccaaaggcgtgaagcatctcaaagacttccccattttgccaggcgagatctttaagtacaaatggaccgtcacagtggaagatggaccgactaaatcagaccctcgatgccttacgcggtactattcctccttcgtgaatatggagagagatttggcaagcggactcataggaccactcctcatctgttacaaggaatctgtagaccagaggggtaaccagattatgagtgataaacgcaatgtgatcctttttagcgtcttcgacgagaaccggtcctggtacttgaccgagaatatacaaaggttccttcccaaccccgcaggcgttcagttggaagaccctgagtttcaggccagcaatattatgcactcaatcaacggctatgtgtttgatagtctccagctttctgtttgcctccatgaagtagcctattggtacatcttgtcaattggtgctcaaacagacttcctctccgtcttcttctccggctacacctttaagcacaagatggtgtatgaggacactctcacactctttccattttctggagaaaccgtgttcatgagcatggagaatccaggcctttggatcttgggttgccacaacagtgattttcgcaatcggggaatgactgctctcctcaaagtcagcagctgtgataagaacacaggcgactattacgaagattcttacgaggacataagtgcctactttgactccaagaataacgccattgagcccagatcattctcccagaatcctcccgtgcttaaaaggcatcagcgcgaaatcaccagaactactcttcagtctgatcaagaggagattgactatgacgacaccataagcgtggaaatgaagaaggaggatttcgatatctatgacgaagatgagaaccagtctccgcggagctttcagaagaagacgcgacactacttcattgcagcagtcgaaaggctttgggactacggtatgtcatcaaagcctcatgtgttgcgcaatagagctcagagtggaagtgttccacagttcaagaaagtcgtctttcaagagtttacagatggcagcttcacacagcctctctatcggggcgagcttaacgaacatttgggactccttggtccctatatccgagccgaagtggaggacaacattatggttacctttaggaatcaagcctctcgcccctacagcttctactcctccctcatcagttatgaggaggatcagagacaaggcgctgaaccacggaagaactttgtgaaaccgaatgagacgaagacctacttctggaaagtacagcaccacatggcccccacaaaagacgaattcgattgcaaagcatgggcgtatttttcagacgttgacttggagaaagatgtacattcaggacttattggtcctttgttggtgtgtcacactaacactctcaatccagcccatggcaggcaggtgacagtccaggaattcgctcttttctttaccatctttgatgagaccaagtcctggtacttcacggaaaacatggagcgcaattgcagagccccctgtaacatacagatggaggaccctacctttaaggaaaattatcggttccacgcaatcaacggatacattatggatacactccctggccttgtgatggctcaggaccaacgaatcaggtggtacctcctcagcatgggttctaatgagaacatacactccattcacttttcaggacatgtgttcactgtccggaagaaagaagagtataagatggccctctacaatttgtatccaggcgtgtttgagaccgttgaaatgcttccctctaaagctggcatctggagagtagagtgcttgatcggagaacatcttcacgcaggtatgagcaccttgttcctcgtgtacagcaacaaatgtcagaccccacttggcatggccagtggacacattcgcgactttcagatcacagcatctggccagtatggacaatgggccccaaagttggctcgcctccattactccggtagcataaatgcgtggtccactaaagaacctttcagctggattaaggtcgatcttcttgcccccatgatcatccacggcattaagacacagggagcgaggcagaaattctcctccctctacatctcacagttcattattatgtatagtttggacggcaagaagtggcaaacttatagaggtaacagtactggaacagacatggtgttcttcggcaacgttgatagctctggcatcaaacacaacatctttaatcctcccataatagctcggtacatcagattgcatccgacccactacagcattaggagtacactccgaatggagcttatgggttgcgacttgaattcctgttcaatgccactcggaatggagtctaaagccatctctgatgcacagataaccgccagtagctactttacgaacatgtttgctacgtggtcaccctctaaggcaaggcttcatttgcaaggtcggtctaatgcctggagacctcaggtgaacaacccgaaagaatggctccaggtggactttcagaagaccatgaaagtaacaggtgtcactactcagggagttaagtccttggatactagcatgtatgtgaaggagttccttatttcctcatcacaagatggccaccagtggaccctcttctttcagaatggtaaggtcaaagtgtttcagggcaatcaagacagcttcacacccgtggtgaacagtcttgatcctccactcttgacacgataccttcgaatccatccacagtcttgggagcaccagattgcattgcgcatggaagtacttggatgcgaggctcaggacctctac

SEQ ID NO: 1132 - protein, 1457 aa, synthetic construct
  REGION 1..1457: note = Variant of human B-domain deleted Factor VIII
MQIELSTCFFLCLLRFCFSATRRYYLGAVELSWDYMQSDLGELPVDARFPPRVPKSFPFNTSVVYKKTLFVEFTDHLFNIAKPRPPWMGLLGPTIQAEVYDTVVITLKNMASHPVSLHAVGVSYWKASEGAEYDDQTSQREKEDDKVFPGGSHTYVWQVLKENGPMASDPPCLTYSYLSHVDLVKDLNSGLIGALLVCREGSLAKEKTQTLHKFILLFAVFDEGKSWHSETKNSLMQDRDAASARAWPKMHTVNGYVNRTLPGLIGCHRKSVYWHVIGMGTTPEVHSIFLEGHTFLVRNHRQASLGISPITFLTAQTLLMDLGQFLLFCHIPSHQHDGMEAYVKVDSCPEEPQLRMKNNEEAEDYDDDLTDSEMDVVRFDDDNSPSIIQARSVAKKHPKTWVHYIAAEEEDWDYAPLVLAPDDRSYKSQYLNNGPQRIGRKYKKVRFMAYTDETFKTREAIQHESGILGPLLYGEVGDTLLIIFKNQASRPYNIYPHGITDVRPLYSRRLPKGVKHLKDFPILPGEIFKYKWTVTVEDGPTKSDPRCLTRYYSSFVNMERDLASGLIGPLLICYKESVDQRGNQIMSDKRNVILFSVFDENRSWYLTENIQRFLPNPAGVQLEDPEFQASNIMHSINGYVFDSLQLSVCLHEVAYWYILSIGAQTDFLSVFFSGYTFKHKMVYEDTLTLFPFSGETVFMSMENPGLWILGCHNSDFRNRGMTALLKVSSCDKNTGDYYEDSYEDISAYFDSKNNAIEPRSFSQNPPVLKRHQREITRTTLQSDQEEIDYDDTISVEMKKEDFDIYDEDENQSPRSFQKKTRHYFIAAVERLWDYGMSSKPHVLRNRAQSGSVPQFKKVVFQEFTDGSFTQPLYRGELNEHLGLLGPYIRAEVEDNIMVTFRNQASRPYSFYSSLISYEEDQRQGAEPRKNFVKPNETKTYFWKVQHHMAPTKDEFDCKAWAYFSDVDLEKDVHSGLIGPLLVCHTNTLNPAHGRQVTVQEFALFFTIFDETKSWYFTENMERNCRAPCNIQMEDPTFKENYRFHAINGYIMDTLPGLVMAQDQRIRWYLLSMGSNENIHSIHFSGHVFTVRKKEEYKMALYNLYPGVFETVEMLPSKAGIWRVECLIGEHLHAGMSTLFLVYSNKCQTPLGMASGHIRDFQITASGQYGQWAPKLARLHYSGSINAWSTKEPFSWIKVDLLAPMIIHGIKTQGARQKFSSLYISQFIIMYSLDGKKWQTYRGNSTGTDMVFFGNVDSSGIKHNIFNPPIIARYIRLHPTHYSIRSTLRMELMGCDLNSCSMPLGMESKAISDAQITASSYFTNMFATWSPSKARLHLQGRSNAWRPQVNNPKEWLQVDFQKTMKVTGVTTQGVKSLDTSMYVKEFLISSSQDGHQWTLFFQNGKVKVFQGNQDSFTPVVNSLDPPLLTRYLRIHPQSWEHQIALRMEVLGCEAQDLY

SEQ ID NO: 1133 - DNA, 4371 bp, synthetic construct
  misc_feature 1..4371: note = Variant of human B-domain deleted Factor VIII
  source 1..4371: mol_type = other DNA
atgcagattgaactgtctacctgcttcttcctctgtttgctgaggttctgctttagcgccactagacggtactaccttggcgctgtggagctgtcctgggactatatgcagagtgatttgggagagcttcccgtcgacgcacgatttcctcctcgcgttccaaagtcatttccctttaacacaagcgtggtgtacaagaagacgctcttcgtcgaattcaccgatcacctgttcaatatcgccaaacccagaccaccatggatgggtcttttggggcctaccatacaagcggaggtgtatgacacagttgttatcactctcaagaacatggcttctcatccggtaagtcttcacgcagtgggcgtgtcctactggaaagcttcagaaggagccgagtatgatgatcagacatcccagagggagaaagaagacgacaaggtatttccaggtgggtctcatacctatgtgtggcaagtgctcaaagagaatggccctatggcaagcgatccgccgtgtttgacttacagctacctttcacacgttgacctcgtcaaggacctcaactccgggttgattggagccttgttggtatgcagggaaggatctcttgccaaagagaagacacagaccccgcacaagtttatccttctctttgctgtgttcgatgagggcaaaagttggcatagcgaaacgaagaattccctcatgcaggatcgcgacgcagccagcgccagagcttggcccaagatgcacactgtgaacggatatgtcaataggacgcttcctggcttgattgggtgtcatcggaaaagtgtctactggcacgtgatcggaatggggacaacaccagaggtccactccatatttctcgaaggccataccttccttgttcgaaaccacagacaggcatccttggggatctctcccattacctttctcactgcccaaacgctccttatggacttgggtcagttccttctcttttgccatatcccgtcacaccagcatgatggtatggaagcttatgtgaaagtcgacagttgtcctgaggagccacagttgcgcatgaagaataatgaagaagccgaggattacgacgacgatctcaccgattctgagatggacgtggtgaggtttgatgacgacaactctccctccatcattcaagctcggagcgtggcgaagaaacaccccaagacttgggtccactatatagcggcggaagaggaggattgggattacgctcctcttgtattggcaccagatgaccgctcatacaaaagccagtacctcaacaacggaccgcagagaattggccggaagtataagaaagtgcgatttatggcctatacagacgaaacctttaagacaagggaggccatccagcatgagagtgggattttgggacctcttctttacggcgaagttggtgataccctcctcatcatcttcaagaatcaagcttctcgcccctataacatttacccacacgggatcactgacgttaggcctttgtatagcagaagacttcccaaaggcgtgaagcatctcaaagacttccccattttgccaggcgagatctttaagtacaaatggaccgtcacagtggaagatggaccgactaaatcagaccctcgatgccttacgcggtactattcctccttcgtgaatatggagagagatttggcaagcggactcataggaccactcctcatctgttacaaggaatctgtagaccagaggggtaaccagattatgagtgataaacgcaatgtgatcctttttagcgtcttcgacgagaaccggtcctggtacttgaccgagaatatacaaaggttccttcccaaccccgcaggcgttcagttggaagaccctgagtttcaggccagcaatattatgcactcaatcaacggctatgtgtttgatagtctccagctttctgtttgcctccatgaagtagcctattggtacatcttgtcaattggtgctcaaacagacttcctctccgtcttcttctccggctacacctttaagcacaagatggtgtatgaggacactctcacactctttccattttctggagaaaccgtgttcatgagcatggagaatccaggcctttggatcttgggttgccacaacagtgattttcgcaatcggggaatgactgctctcctcaaagtcagcagctgtgataagaacacaggcgactattacgaagattcttacgaggacataagtgcctactttgactccaagaataacgccattgagcccagatcattctcccagaatcctcccgtgcttaaaaggcatcagcgcgaaatcaccagaactactcttcagtctgatcaagaggagattgactatgacgacaccataagcgtggaaatgaagaaggaggatttcgatatctatgacgaagatgagaaccagtctccgcggagctttcagaagaagacgcgacactacttcattgcagcagtcgaaaggctttgggactacggtatgtcatcatcccctcatgtgttgcgcaatagagctcagagtggaagtgttccacagttcaagaaagtcgtctttcaagagtttacagatggcagcttcacacagcctctctatcggggcgagcttaacgaacatttgggactccttggtccctatatccgagccgaagtggaggacaacattatggttacctttaggaatcaagcctctcgcccctacagcttctactcctccctcatcagttatgaggaggatcagagacaaggcgctgaaccacggaagaactttgtgaaaccgaatgagacgaagacctacttctggaaagtacagcaccacatggcccccacaaaagacgaattcgattgcaaagcatgggcgtatttttcagacgttgacttggagaaagatgtacattcaggacttattggtcctttgttggtgtgtcacactaacactctcaatccagcccatggcaggcaggtgacagtccaggaattcgctcttttctttaccatctttgatgagaccaagtcctggtacttcacggaaaacatggagcgcaattgcagagccccctgtaacatacagatggaggaccctacctttaaggaaaattatcggttccacgcaatcaacggatacattatggatacactccctggccttgtgatggctcaggaccaacgaatcaggtggtacctcctcagcatgggttctaatgagaacatacactccattcacttttcaggacatgtgttcactgtccggaagaaagaagagtataagatggccctctacaatttgtatccaggcgtgtttgagaccgttgaaatgcttccctctaaagctggcatctggagagtagagtgcttgatcggagaacatcttcacgcaggtatgagcaccttgttcctcgtgtacagcaacaaatgtcagaccccacttggcatggccagtggacacattcgcgactttcagatcacagcatctggccagtatggacaatgggccccaaagttggctcgcctccattactccggtagcataaatgcgtggtccactaaagaacctttcagctggattaaggtcgatcttcttgcccccatgatcatccacggcattaagacacagggagcgaggcagaaattctcctccctctacatctcacagttcattattatgtatagtttggacggcaagaagtggcaaacttatagaggtaacagtactggaacagacatggtgttcttcggcaacgttgatagctctggcatcaaacacaacatctttaatcctcccataatagctcggtacatcagattgcatccgacccactacagcattaggagtacactccgaatggagcttatgggttgcgacttgaattcctgttcaatgccactcggaatggagtctaaagccatctctgatgcacagataaccgccagtagctactttacgaacatgtttgctacgtggtcaccctctaaggcaaggcttcatttgcaaggccggtctaatgcctggagacctcaggtgaacaacccgaaagaatggctccaggtggactttcagaagaccatgaaagtaacaggtgtcactactcagggagttaagtccttggatactagcatgtatgtgaaggagttccttatttcctcatcacaagatggccaccagtggaccctcttctttcagaatggtaaggtcaaagtgtttcagggcaatcaagacagcttcacacccgtggtgaacagtcttgatcctccactcttgacacgataccttcgaatccatccacagtcttgggagcaccagattgcattgcgcatggaagtacttggatgcgaggctcaggacctctac

SEQ ID NO: 1134 - protein, 1457 aa, synthetic construct
  REGION 1..1457: note = Variant of human B-domain deleted Factor VIII
MQIELSTCFFLCLLRFCFSATRRYYLGAVELSWDYMQSDLGELPVDARFPPRVPKSFPFNTSVVYKKTLFVEFTDHLFNIAKPRPPWMGLLGPTIQAEVYDTVVITLKNMASHPVSLHAVGVSYWKASEGAEYDDQTSQREKEDDKVFPGGSHTYVWQVLKENGPMASDPPCLTYSYLSHVDLVKDLNSGLIGALLVCREGSLAKEKTQTPHKFILLFAVFDEGKSWHSETKNSLMQDRDAASARAWPKMHTVNGYVNRTLPGLIGCHRKSVYWHVIGMGTTPEVHSIFLEGHTFLVRNHRQASLGISPITFLTAQTLLMDLGQFLLFCHIPSHQHDGMEAYVKVDSCPEEPQLRMKNNEEAEDYDDDLTDSEMDVVRFDDDNSPSIIQARSVAKKHPKTWVHYIAAEEEDWDYAPLVLAPDDRSYKSQYLNNGPQRIGRKYKKVRFMAYTDETFKTREAIQHESGILGPLLYGEVGDTLLIIFKNQASRPYNIYPHGITDVRPLYSRRLPKGVKHLKDFPILPGEIFKYKWTVTVEDGPTKSDPRCLTRYYSSFVNMERDLASGLIGPLLICYKESVDQRGNQIMSDKRNVILFSVFDENRSWYLTENIQRFLPNPAGVQLEDPEFQASNIMHSINGYVFDSLQLSVCLHEVAYWYILSIGAQTDFLSVFFSGYTFKHKMVYEDTLTLFPFSGETVFMSMENPGLWILGCHNSDFRNRGMTALLKVSSCDKNTGDYYEDSYEDISAYFDSKNNAIEPRSFSQNPPVLKRHQREITRTTLQSDQEEIDYDDTISVEMKKEDFDIYDEDENQSPRSFQKKTRHYFIAAVERLWDYGMSSSPHVLRNRAQSGSVPQFKKVVFQEFTDGSFTQPLYRGELNEHLGLLGPYIRAEVEDNIMVTFRNQASRPYSFYSSLISYEEDQRQGAEPRKNFVKPNETKTYFWKVQHHMAPTKDEFDCKAWAYFSDVDLEKDVHSGLIGPLLVCHTNTLNPAHGRQVTVQEFALFFTIFDETKSWYFTENMERNCRAPCNIQMEDPTFKENYRFHAINGYIMDTLPGLVMAQDQRIRWYLLSMGSNENIHSIHFSGHVFTVRKKEEYKMALYNLYPGVFETVEMLPSKAGIWRVECLIGEHLHAGMSTLFLVYSNKCQTPLGMASGHIRDFQITASGQYGQWAPKLARLHYSGSINAWSTKEPFSWIKVDLLAPMIIHGIKTQGARQKFSSLYISQFIIMYSLDGKKWQTYRGNSTGTDMVFFGNVDSSGIKHNIFNPPIIARYIRLHPTHYSIRSTLRMELMGCDLNSCSMPLGMESKAISDAQITASSYFTNMFATWSPSKARLHLQGRSNAWRPQVNNPKEWLQVDFQKTMKVTGVTTQGVKSLDTSMYVKEFLISSSQDGHQWTLFFQNGKVKVFQGNQDSFTPVVNSLDPPLLTRYLRIHPQSWEHQIALRMEVLGCEAQDLY

SEQ ID NO: 1135 - DNA, 4371 bp, synthetic construct
  misc_feature 1..4371: note = Variant of human B-domain deleted Factor VIII
  source 1..4371: mol_type = other DNA
atgcagattgaactgtctacctgcttcttcctctgtttgctgaggttctgctttagcgccactagacggtactaccttggcgctgtggagctgtcctgggactatatgcagagtgatttgggagagcttcccgtcgacgcacgatttcctcctcgcgttccaaagtcatttccctttaacacaagcgtggtgtacaagaagacgctcttcgtcgaattcaccgatcacctgttcaatatcgccaaacccagaccaccatggatgggtcttttggggcctaccatacaagcggaggtgtatgacacagttgttatcactctcaagaacatggcttctcatccggtaagtcttcacgcagtgggcgtgtcctactggaaagcttcagaaggagccgagtatgatgatcagacatcccagagggagaaagaagacgacaaggtatttccaggtgggtctcatacctatgtgtggcaagtgctcaaagagaatggccctatggcaagcgatccgccgtgtttgacttacagctacctttcacacgttgacctcgtcaaggacctcaactccgggttgattggagccttgttggtatgcagggaaggatctcttgccaaagagaagacacagaccggtcacaagtttatccttctctttgctgtgttcgatgagggcaaaagttggcatagcgaaacgaagaattccctcatgcaggatcgcgacgcagccagcgccagagcttggcccaagatgcacactgtgaacggatatgtcaataggacgcttcctggcttgattgggtgtcatcggaaaagtgtctactggcacgtgatcggaatggggacaacaccagaggtccactccatatttctcgaaggccataccttccttgttcgaaaccacagacaggcatccttggggatctctcccattacctttctcactgcccaaacgctccttatggacttgggtcagttccttctcttttgccatatcccgtcacaccagcatgatggtatggaagcttatgtgaaagtcgacagttgtcctgaggagccacagttgcgcatgaagaataatgaagaagccgaggattacgacgacgatctcaccgattctgagatggacgtggtgaggtttgatgacgacaactctccctccatcattcaagctcggagcgtggcgaagaaacaccccaagacttgggtccactatatagcggcggaagaggaggattgggattacgctcctcttgtattggcaccagatgaccgctcatacaaaagccagtacctcaacaacggaccgcagagaattggccggaagtataagaaagtgcgatttatggcctatacagacgaaacctttaagacaagggaggccatccagcatgagagtgggattttgggacctcttctttacggcgaagttggtgataccctcctcatcatcttcaagaatcaagcttctcgcccctataacatttacccacacgggatcactgacgttaggcctttgtatagcagaagacttcccaaaggcgtgaagcatctcaaagacttccccattttgccaggcgagatctttaagtacaaatggaccgtcacagtggaagatggaccgactaaatcagaccctcgatgccttacgcggtactattcctccttcgtgaatatggagagagatttggcaagcggactcataggaccactcctcatctgttacaaggaatctgtagaccagaggggtaaccagattatgagtgataaacgcaatgtgatcctttttagcgtcttcgacgagaaccggtcctggtacttgaccgagaatatacaaaggttccttcccaaccccgcaggcgttcagttggaagaccctgagtttcaggccagcaatattatgcactcaatcaacggctatgtgtttgatagtctccagctttctgtttgcctccatgaagtagcctattggtacatcttgtcaattggtgctcaaacagacttcctctccgtcttcttctccggctacacctttaagcacaagatggtgtatgaggacactctcacactctttccattttctggagaaaccgtgttcatgagcatggagaatccaggcctttggatcttgggttgccacaacagtgattttcgcaatcggggaatgactgctctcctcaaagtcagcagctgtgataagaacacaggcgactattacgaagattcttacgaggacataagtgcctactttgactccaagaataacgccattgagcccagatcattctcccagaatcctcccgtgcttaaaaggcatcagcgcgaaatcaccagaactactcttcagtctgatcaagaggagattgactatgacgacaccataagcgtggaaatgaagaaggaggatttcgatatctatgacgaagatgagaaccagtctccgcggagctttcagaagaagacgcgacactacttcattgcagcagtcgaaaggctttgggactacggtatgtcatcatcccctcatgtgttgcgcaatagagctcagagtggaagtgttccacagttcaagaaagtcgtctttcaagagtttacagatggcagcttcacacagcctctctatcggggcgagcttaacgaacatttgggactccttggtccctatatccgagccgaagtggaggacaacattatggttacctttaggaatcaagcctctcgcccctacagcttctactcctccctcatcagttatgaggaggatcagagacaaggcgctgaaccacggaagaactttgtgaaaccgaatgagacgaagacctacttctggaaagtacagcaccacatggcccccacaaaagacgaattcgattgcaaagcatgggcgtatttttcagacgttgacttggagaaagatgtacattcaggacttattggtcctttgttggtgtgtcacactaacactctcaatccagcccatggcaggcaggtgacagtccaggaattcgctcttttctttaccatctttgatgagaccaagtcctggtacttcacggaaaacatggagcgcaattgcagagccccctgtaacatacagatggaggaccctacctttaaggaaaattatcggttccacgcaatcaacggatacattatggatacactccctggccttgtgatggctcaggaccaacgaatcaggtggtacctcctcagcatgggttctaatgagaacatacactccattcacttttcaggacatgtgttcactgtccggaagaaagaagagtataagatggccctctacaatttgtatccaggcgtgtttgagaccgttgaaatgcttccctctaaagctggcatctggagagtagagtgcttgatcggagaacatcttcacgcaggtatgagcaccttgttcctcgtgtacagcaacaaatgtcagaccccacttggcatggccagtggacacattcgcgactttcagatcacagcatctggccagtatggacaatgggccccaaagttggctcgcctccattactccggtagcataaatgcgtggtccactaaagaacctttcagctggattaaggtcgatcttcttgcccccatgatcatccacggcattaagacacagggagcgaggcagaaattctcctccctctacatctcacagttcattattatgtatagtttggacggcaagaagtggcaaacttatagaggtaacagtactggaacagacatggtgttcttcggcaacgttgatagctctggcatcaaacacaacatctttaatcctcccataatagctcggtacatcagattgcatccgacccactacagcattaggagtacactccgaatggagcttatgggttgcgacttgaattcctgttcaatgccactcggaatggagtctaaagccatctctgatgcacagataaccgccagtagctactttacgaacatgtttgctacgtggtcaccctctaaggcaaggcttcatttgcaaggccggtctaatgcctggagacctcaggtgaacaacccgaaagaatggctccaggtggactttcagaagaccatgaaagtaacaggtgtcactactcagggagttaagtccttggatactagcatgtatgtgaaggagttccttatttcctcatcacaagatggccaccagtggaccctcttctttcagaatggtaaggtcaaagtgtttcagggcaatcaagacagcttcacacccgtggtgaacagtcttgatcctccactcttgacacgataccttcgaatccatccacagtcttgggagcaccagattgcattgcgcatggaagtacttggatgcgaggctcaggacctctac

SEQ ID NO: 1136 - protein, 1457 aa, synthetic construct
  REGION 1..1457: note = Variant of human B-domain deleted Factor VIII
MQIELSTCFFLCLLRFCFSATRRYYLGAVELSWDYMQSDLGELPVDARFPPRVPKSFPFNTSVVYKKTLFVEFTDHLFNIAKPRPPWMGLLGPTIQAEVYDTVVITLKNMASHPVSLHAVGVSYWKASEGAEYDDQTSQREKEDDKVFPGGSHTYVWQVLKENGPMASDPPCLTYSYLSHVDLVKDLNSGLIGALLVCREGSLAKEKTQTGHKFILLFAVFDEGKSWHSETKNSLMQDRDAASARAWPKMHTVNGYVNRTLPGLIGCHRKSVYWHVIGMGTTPEVHSIFLEGHTFLVRNHRQASLGISPITFLTAQTLLMDLGQFLLFCHIPSHQHDGMEAYVKVDSCPEEPQLRMKNNEEAEDYDDDLTDSEMDVVRFDDDNSPSIIQARSVAKKHPKTWVHYIAAEEEDWDYAPLVLAPDDRSYKSQYLNNGPQRIGRKYKKVRFMAYTDETFKTREAIQHESGILGPLLYGEVGDTLLIIFKNQASRPYNIYPHGITDVRPLYSRRLPKGVKHLKDFPILPGEIFKYKWTVTVEDGPTKSDPRCLTRYYSSFVNMERDLASGLIGPLLICYKESVDQRGNQIMSDKRNVILFSVFDENRSWYLTENIQRFLPNPAGVQLEDPEFQASNIMHSINGYVFDSLQLSVCLHEVAYWYILSIGAQTDFLSVFFSGYTFKHKMVYEDTLTLFPFSGETVFMSMENPGLWILGCHNSDFRNRGMTALLKVSSCDKNTGDYYEDSYEDISAYFDSKNNAIEPRSFSQNPPVLKRHQREITRTTLQSDQEEIDYDDTISVEMKKEDFDIYDEDENQSPRSFQKKTRHYFIAAVERLWDYGMSSSPHVLRNRAQSGSVPQFKKVVFQEFTDGSFTQPLYRGELNEHLGLLGPYIRAEVEDNIMVTFRNQASRPYSFYSSLISYEEDQRQGAEPRKNFVKPNETKTYFWKVQHHMAPTKDEFDCKAWAYFSDVDLEKDVHSGLIGPLLVCHTNTLNPAHGRQVTVQEFALFFTIFDETKSWYFTENMERNCRAPCNIQMEDPTFKENYRFHAINGYIMDTLPGLVMAQDQRIRWYLLSMGSNENIHSIHFSGHVFTVRKKEEYKMALYNLYPGVFETVEMLPSKAGIWRVECLIGEHLHAGMSTLFLVYSNKCQTPLGMASGHIRDFQITASGQYGQWAPKLARLHYSGSINAWSTKEPFSWIKVDLLAPMIIHGIKTQGARQKFSSLYISQFIIMYSLDGKKWQTYRGNSTGTDMVFFGNVDSSGIKHNIFNPPIIARYIRLHPTHYSIRSTLRMELMGCDLNSCSMPLGMESKAISDAQITASSYFTNMFATWSPSKARLHLQGRSNAWRPQVNNPKEWLQVDFQKTMKVTGVTTQGVKSLDTSMYVKEFLISSSQDGHQWTLFFQNGKVKVFQGNQDSFTPVVNSLDPPLLTRYLRIHPQSWEHQIALRMEVLGCEAQDLY

SEQ ID NO: 1137 - DNA, 4371 bp, synthetic construct
  misc_feature 1..4371: note = Variant of human B-domain deleted Factor VIII
  source 1..4371: mol_type = other DNA
atgcagattgaactgtctacctgcttcttcctctgtttgctgaggttctgctttagcgccactagacggtactaccttggcgctgtggagctgtcctgggactatatgcagagtgatttgggagagcttcccgtcgacgcacgatttcctcctcgcgttccaaagtcatttccctttaacacaagcgtggtgtacaagaagacgctcttcgtcgaattcaccgatcacctgttcaatatcgccaaacccagaccaccatggatgggtcttttggggcctaccatacaagcggaggtgtatgacacagttgttatcactctcaagaacatggcttctcatccggtaagtcttcacgcagtgggcgtgtcctactggaaagcttcagaaggagccgagtatgatgatcagacatcccagagggagaaagaagacgacaaggtatttccaggtgggtctcatacctatgtgtggcaagtgctcaaagagaatggccctatggcaagcgatccgccgtgtttgacttacagctacctttcacacgttgacctcgtcaaggacctcaactccgggttgattggagccttgttggtatgcagggaaggatctcttgccaaagagaagacacagacccagcacaagtttatccttctctttgctgtgttcgatgagggcaaaagttggcatagcgaaacgaagaattccctcatgcaggatcgcgacgcagccagcgccagagcttggcccaagatgcacactgtgaacggatatgtcaataggacgcttcctggcttgattgggtgtcatcggaaaagtgtctactggcacgtgatcggaatggggacaacaccagaggtccactccatatttctcgaaggccataccttccttgttcgaaaccacagacaggcatccttggggatctctcccattacctttctcactgcccaaacgctccttatggacttgggtcagttccttctcttttgccatatcccgtcacaccagcatgatggtatggaagcttatgtgaaagtcgacagttgtcctgaggagccacagttgcgcatgaagaataatgaagaagccgaggattacgacgacgatctcaccgattctgagatggacgtggtgaggtttgatgacgacaactctccctccatcattcaagctcggagcgtggcgaagaaacaccccaagacttgggtccactatatagcggcggaagaggaggattgggattacgctcctcttgtattggcaccagatgaccgctcatacaaaagccagtacctcaacaacggaccgcagagaattggccggaagtataagaaagtgcgatttatggcctatacagacgaaacctttaagacaagggaggccatccagcatgagagtgggattttgggacctcttctttacggcgaagttggtgataccctcctcatcatcttcaagaatcaagcttctcgcccctataacatttacccacacgggatcactgacgttaggcctttgtatagcagaagacttcccaaaggcgtgaagcatctcaaagacttccccattttgccaggcgagatctttaagtacaaatggaccgtcacagtggaagatggaccgactaaatcagaccctcgatgccttacgcggtactattcctccttcgtgaatatggagagagatttggcaagcggactcataggaccactcctcatctgttacaaggaatctgtagaccagaggggtaaccagattatgagtgataaacgcaatgtgatcctttttagcgtcttcgacgagaaccggtcctggtacttgaccgagaatatacaaaggttccttcccaaccccgcaggcgttcagttggaagaccctgagtttcaggccagcaatattatgcactcaatcaacggctatgtgtttgatagtctccagctttctgtttgcctccatgaagtagcctattggtacatcttgtcaattggtgctcaaacagacttcctctccgtcttcttctccggctacacctttaagcacaagatggtgtatgaggacactctcacactctttccattttctggagaaaccgtgttcatgagcatggagaatccaggcctttggatcttgggttgccacaacagtgattttcgcaatcggggaatgactgctctcctcaaagtcagcagctgtgataagaacacaggcgactattacgaagattcttacgaggacataagtgcctactttgactccaagaataacgccattgagcccagatcattctcccagaatcctcccgtgcttaaaaggcatcagcgcgaaatcaccagaactactcttcagtctgatcaagaggagattgactatgacgacaccataagcgtggaaatgaagaaggaggatttcgatatctatgacgaagatgagaaccagtctccgcggagctttcagaagaagacgcgacactacttcattgcagcagtcgaaaggctttgggactacggtatgtcatcatcccctcatgtgttgcgcaatagagctcagagtggaagtgttccacagttcaagaaagtcgtctttcaagagtttacagatggcagcttcacacagcctctctatcggggcgagcttaacgaacatttgggactccttggtccctatatccgagccgaagtggaggacaacattatggttacctttaggaatcaagcctctcgcccctacagcttctactcctccctcatcagttatgaggaggatcagagacaaggcgctgaaccacggaagaactttgtgaaaccgaatgagacgaagacctacttctggaaagtacagcaccacatggcccccacaaaagacgaattcgattgcaaagcatgggcgtatttttcagacgttgacttggagaaagatgtacattcaggacttattggtcctttgttggtgtgtcacactaacactctcaatccagcccatggcaggcaggtgacagtccaggaattcgctcttttctttaccatctttgatgagaccaagtcctggtacttcacggaaaacatggagcgcaattgcagagccccctgtaacatacagatggaggaccctacctttaaggaaaattatcggttccacgcaatcaacggatacattatggatacactccctggccttgtgatggctcaggaccaacgaatcaggtggtacctcctcagcatgggttctaatgagaacatacactccattcacttttcaggacatgtgttcactgtccggaagaaagaagagtataagatggccctctacaatttgtatccaggcgtgtttgagaccgttgaaatgcttccctctaaagctggcatctggagagtagagtgcttgatcggagaacatcttcacgcaggtatgagcaccttgttcctcgtgtacagcaacaaatgtcagaccccacttggcatggccagtggacacattcgcgactttcagatcacagcatctggccagtatggacaatgggccccaaagttggctcgcctccattactccggtagcataaatgcgtggtccactaaagaacctttcagctggattaaggtcgatcttcttgcccccatgatcatccacggcattaagacacagggagcgaggcagaaattctcctccctctacatctcacagttcattattatgtatagtttggacggcaagaagtggcaaacttatagaggtaacagtactggaacagacatggtgttcttcggcaacgttgatagctctggcatcaaacacaacatctttaatcctcccataatagctcggtacatcagattgcatccgacccactacagcattaggagtacactccgaatggagcttatgggttgcgacttgaattcctgttcaatgccactcggaatggagtctaaagccatctctgatgcacagataaccgccagtagctactttacgaacatgtttgctacgtggtcaccctctaaggcaaggcttcatttgcaaggccggtctaatgcctggagacctcaggtgaacaacccgaaagaatggctccaggtggactttcagaagaccatgaaagtaacaggtgtcactactcagggagttaagtccttggatactagcatgtatgtgaaggagttccttatttcctcatcacaagatggccaccagtggaccctcttctttcagaatggtaaggtcaaagtgtttcagggcaatcaagacagcttcacacccgtggtgaacagtcttgatcctccactcttgacacgataccttcgaatccatccacagtcttgggagcaccagattgcattgcgcatggaagtacttggatgcgaggctcaggacctctac

SEQ ID NO: 1138 - protein, 1457 aa, synthetic construct
  REGION 1..1457: note = Variant of human B-domain deleted Factor VIII
MQIELSTCFFLCLLRFCFSATRRYYLGAVELSWDYMQSDLGELPVDARFPPRVPKSFPFNTSVVYKKTLFVEFTDHLFNIAKPRPPWMGLLGPTIQAEVYDTVVITLKNMASHPVSLHAVGVSYWKASEGAEYDDQTSQREKEDDKVFPGGSHTYVWQVLKENGPMASDPPCLTYSYLSHVDLVKDLNSGLIGALLVCREGSLAKEKTQTQHKFILLFAVFDEGKSWHSETKNSLMQDRDAASARAWPKMHTVNGYVNRTLPGLIGCHRKSVYWHVIGMGTTPEVHSIFLEGHTFLVRNHRQASLGISPITFLTAQTLLMDLGQFLLFCHIPSHQHDGMEAYVKVDSCPEEPQLRMKNNEEAEDYDDDLTDSEMDVVRFDDDNSPSIIQARSVAKKHPKTWVHYIAAEEEDWDYAPLVLAPDDRSYKSQYLNNGPQRIGRKYKKVRFMAYTDETFKTREAIQHESGILGPLLYGEVGDTLLIIFKNQASRPYNIYPHGITDVRPLYSRRLPKGVKHLKDFPILPGEIFKYKWTVTVEDGPTKSDPRCLTRYYSSFVNMERDLASGLIGPLLICYKESVDQRGNQIMSDKRNVILFSVFDENRSWYLTENIQRFLPNPAGVQLEDPEFQASNIMHSINGYVFDSLQLSVCLHEVAYWYILSIGAQTDFLSVFFSGYTFKHKMVYEDTLTLFPFSGETVFMSMENPGLWILGCHNSDFRNRGMTALLKVSSCDKNTGDYYEDSYEDISAYFDSKNNAIEPRSFSQNPPVLKRHQREITRTTLQSDQEEIDYDDTISVEMKKEDFDIYDEDENQSPRSFQKKTRHYFIAAVERLWDYGMSSSPHVLRNRAQSGSVPQFKKVVFQEFTDGSFTQPLYRGELNEHLGLLGPYIRAEVEDNIMVTFRNQASRPYSFYSSLISYEEDQRQGAEPRKNFVKPNETKTYFWKVQHHMAPTKDEFDCKAWAYFSDVDLEKDVHSGLIGPLLVCHTNTLNPAHGRQVTVQEFALFFTIFDETKSWYFTENMERNCRAPCNIQMEDPTFKENYRFHAINGYIMDTLPGLVMAQDQRIRWYLLSMGSNENIHSIHFSGHVFTVRKKEEYKMALYNLYPGVFETVEMLPSKAGIWRVECLIGEHLHAGMSTLFLVYSNKCQTPLGMASGHIRDFQITASGQYGQWAPKLARLHYSGSINAWSTKEPFSWIKVDLLAPMIIHGIKTQGARQKFSSLYISQFIIMYSLDGKKWQTYRGNSTGTDMVFFGNVDSSGIKHNIFNPPIIARYIRLHPTHYSIRSTLRMELMGCDLNSCSMPLGMESKAISDAQITASSYFTNMFATWSPSKARLHLQGRSNAWRPQVNNPKEWLQVDFQKTMKVTGVTTQGVKSLDTSMYVKEFLISSSQDGHQWTLFFQNGKVKVFQGNQDSFTPVVNSLDPPLLTRYLRIHPQSWEHQIALRMEVLGCEAQDLY

SEQ ID NO: 1139 - DNA, 4371 bp, synthetic construct
  misc_feature 1..4371: note = Variant of human B-domain deleted Factor VIII
  source 1..4371: mol_type = other DNA
atgcagattgaactgtctacctgcttcttcctctgtttgctgagggattgctttagcgccactagacggtactaccttggcgctgtggagctgtcctgggactatatgcagagtgatttgggagagcttcccgtcgacgcacgatttcctcctcgcgttccaaagtcatttccctttaacacaagcgtggtgtacaagaagacgctcttcgtcgaattcaccgatcacctgttcaatatcgccaaacccagaccaccatggatgggtcttttggggcctaccatacaagcggaggtgtatgacacagttgttatcactctcaagaacatggcttctcatccggtaagtcttcacgcagtgggcgtgtcctactggaaagcttcagaaggagccgagtatgatgatcagacatcccagagggagaaagaagacgacaaggtatttccaggtgggtctcatacctatgtgtggcaagtgctcaaagagaatggccctatggcaagcgatccgccgtgtttgacttacagctacctttcacacgttgacctcgtcaaggacctcaactccgggttgattggagccttgttggtatgcagggaaggatctcttgccaaagagaagacacagaccctccacaagtttatccttctctttgctgtgttcgatgagggcaaaagttggcatagcgaaacgaagaattccctcatgcaggatcgcgacgcagccagcgccagagcttggcccaagatgcacactgtgaacggatatgtcaataggacgcttcctggcttgattgggtgtcatcggaaaagtgtctactggcacgtgatcggaatggggacaacaccagaggtccactccatatttctcgaaggccataccttccttgttcgaaaccacagacaggcatccttggggatctctcccattacctttctcactgcccaaacgctccttatggacttgggtcagttccttctcttttgccatatcccgtcacaccagcatgatggtatggaagcttatgtgaaagtcgacagttgtcctgaggagccacagttgcgcatgaagaataatgaagaagccgaggattacgacgacgatctcaccgattctgagatggacgtggtgaggtttgatgacgacaactctccctccatcattcaagctcggagcgtggcgaagaaacaccccaagacttgggtccactatatagcggcggaagaggaggattgggattacgctcctcttgtattggcaccagatgaccgctcatacaaaagccagtacctcaacaacggaccgcagagaattggccggaagtataagaaagtgcgatttatggcctatacagacgaaacctttaagacaagggaggccatccagcatgagagtgggattttgggacctcttctttacggcgaagttggtgataccctcctcatcatcttcaagaatcaagcttctcgcccctataacatttacccgcacgggatcactgacgttaggcctttgtatagcagaagacttcccaaaggcgtgaagcatctcaaagacttccccattttgccaggcgagatctttaagtacaaatggaccgtcacagtggaagatggaccgactaaatcagaccctcgatgccttacgcggtactattcctccttcgtgaatatggagagagatttggcaagcggactcataggaccactcctcatctgttacaaggaatctgtagaccagaggggtaaccagattatgagtgataaacgcaatgtgatcctttttagcgtcttcgacgagaaccggtcctggtacttgaccgagaatatacaaaggttccttcccaaccccgcaggcgttcagttggaagaccctgagtttcaggccagcaatattatgcactcaatcaacggctatgtgtttgatagtctccagctttctgtttgcctccatgaagtagcctattggtacatcttgtcaattggtgctcaaacagacttcctctccgtcttcttctccggctacacctttaagcacaagatggtgtatgaggacactctcacactctttccattttctggagaaaccgtgttcatgagcatggagaatccaggcctttggatcttgggttgccacaacagtgattttcgcaatcggggaatgactgctctcctcaaagtcagcagctgtgataagaacacaggcgactattacgaagattcttacgaggacataagtgcctactttgactccaagaataacgccattgagcccagatcattctcccagaatcctcccgtgcttaaaaggcatcagcgcgaaatcaccagaactactcttcagtctgatcaagaggagattgactatgacgacaccataagcgtggaaatgaagaaggaggatttcgatatctatgacgaagatgagaaccagtctccgcggagctttcagaagaagacgcgacactacttcattgcagcagtcgaaaggctttgggactacggtatgtcatcatcccctcatgtgttgcgcaatagagctcagagtggaagtgttccacagttcaagaaagtcgtctttcaagagtttacagatggcagcttcacacagcctctctatcggggcgagcttaacgaacatttgggactccttggtccctatatccgagccgaagtggaggacaacattatggttacctttaggaatcaagcctctcgcccctacagcttctactcctccctcatcagttatgaggaggatcagagacaaggcgctgaaccacggaagaactttgtgaaaccgaatgagacgaagacctacttctggaaagtacagcaccacatggcccccacaaaagacgaattcgattgcaaagcatgggcgtatttttcagacgttgacttggagaaagatgtacattcaggacttattggtcctttgttggtgtgtcacactaacactctcaatccagcccatggcaggcaggtgacagtccaggaattcgctcttttctttaccatctttgatgagaccaagtcctggtacttcacggaaaacatggagcgcaattgcagagccccctgtaacatacagatggaggaccctacctttaaggaaaattatcggttccacgcaatcaacggatacattatggatacactccctggccttgtgatggctcaggaccaacgaatcaggtggtacctcctcagcatgggttctaatgagaacatacactccattcacttttcaggacatgtgttcactgtccggaagaaagaagagtataagatggccctctacaatttgtatccaggcgtgtttgagaccgttgaaatgcttccctctaaagctggcatctggagagtagagtgcttgatcggagaacatcttcacgcaggtatgagcaccttgttcctcgtgtacagcaacaaatgtcagaccccacttggcatggccagtggacacattcgcgactttcagatcacagcatctggccagtatggacaatgggccccaaagttggctcgcctccattactccggtagcataaatgcgtggtccactaaagaacctttcagctggattaaggtcgatcttcttgcccccatgatcatccacggcattaagacacagggagcgaggcagaaattctcctccctctacatctcacagttcattattatgtatagtttggacggcaagaagtggcaaacttatagaggtaacagtactggaacagacatggtgttcttcggcaacgttgatagctctggcatcaaacacaacatctttaatcctcccataatagctcggtacatcagattgcatccgacccactacagcattaggagtacactccgaatggagcttatgggttgcgacttgaattcctgttcaatgccactcggaatggagtctaaagccatctctgatgcacagataaccgccagtagctactttacgaacatgtttgctacgtggtcaccctctaaggcaaggcttcatttgcaaggccggtctaatgcctggagacctcaggtgaacaacccgaaagaatggctccaggtggactttcagaagaccatgaaagtaacaggtgtcactactcagggagttaagtccttggatactagcatgtatgtgaaggagttccttatttcctcatcacaagatggccaccagtggaccctcttctttcagaatggtaaggtcaaagtgtttcagggcaatcaagacagcttcacacccgtggtgaacagtcttgatcctccactcttgacacgataccttcgaatccatccacagtcttgggagcaccagattgcattgcgcatggaagtacttggatgcgaggctcaggacctctac

SEQ ID NO: 1140 - protein, 1457 aa, synthetic construct
  REGION 1..1457: note = Variant of human B-domain deleted Factor VIII
MQIELSTCFFLCLLRDCFSATRRYYLGAVELSWDYMQSDLGELPVDARFPPRVPKSFPFNTSVVYKKTLFVEFTDHLFNIAKPRPPWMGLLGPTIQAEVYDTVVITLKNMASHPVSLHAVGVSYWKASEGAEYDDQTSQREKEDDKVFPGGSHTYVWQVLKENGPMASDPPCLTYSYLSHVDLVKDLNSGLIGALLVCREGSLAKEKTQTLHKFILLFAVFDEGKSWHSETKNSLMQDRDAASARAWPKMHTVNGYVNRTLPGLIGCHRKSVYWHVIGMGTTPEVHSIFLEGHTFLVRNHRQASLGISPITFLTAQTLLMDLGQFLLFCHIPSHQHDGMEAYVKVDSCPEEPQLRMKNNEEAEDYDDDLTDSEMDVVRFDDDNSPSIIQARSVAKKHPKTWVHYIAAEEEDWDYAPLVLAPDDRSYKSQYLNNGPQRIGRKYKKVRFMAYTDETFKTREAIQHESGILGPLLYGEVGDTLLIIFKNQASRPYNIYPHGITDVRPLYSRRLPKGVKHLKDFPILPGEIFKYKWTVTVEDGPTKSDPRCLTRYYSSFVNMERDLASGLIGPLLICYKESVDQRGNQIMSDKRNVILFSVFDENRSWYLTENIQRFLPNPAGVQLEDPEFQASNIMHSINGYVFDSLQLSVCLHEVAYWYILSIGAQTDFLSVFFSGYTFKHKMVYEDTLTLFPFSGETVFMSMENPGLWILGCHNSDFRNRGMTALLKVSSCDKNTGDYYEDSYEDISAYFDSKNNAIEPRSFSQNPPVLKRHQREITRTTLQSDQEEIDYDDTISVEMKKEDFDIYDEDENQSPRSFQKKTRHYFIAAVERLWDYGMSSSPHVLRNRAQSGSVPQFKKVVFQEFTDGSFTQPLYRGELNEHLGLLGPYIRAEVEDNIMVTFRNQASRPYSFYSSLISYEEDQRQGAEPRKNFVKPNETKTYFWKVQHHMAPTKDEFDCKAWAYFSDVDLEKDVHSGLIGPLLVCHTNTLNPAHGRQVTVQEFALFFTIFDETKSWYFTENMERNCRAPCNIQMEDPTFKENYRFHAINGYIMDTLPGLVMAQDQRIRWYLLSMGSNENIHSIHFSGHVFTVRKKEEYKMALYNLYPGVFETVEMLPSKAGIWRVECLIGEHLHAGMSTLFLVYSNKCQTPLGMASGHIRDFQITASGQYGQWAPKLARLHYSGSINAWSTKEPFSWIKVDLLAPMIIHGIKTQGARQKFSSLYISQFIIMYSLDGKKWQTYRGNSTGTDMVFFGNVDSSGIKHNIFNPPIIARYIRLHPTHYSIRSTLRMELMGCDLNSCSMPLGMESKAISDAQITASSYFTNMFATWSPSKARLHLQGRSNAWRPQVNNPKEWLQVDFQKTMKVTGVTTQGVKSLDTSMYVKEFLISSSQDGHQWTLFFQNGKVKVFQGNQDSFTPVVNSLDPPLLTRYLRIHPQSWEHQIALRMEVLGCEAQDLY

SEQ ID NO: 1141 - DNA, 4371 bp, synthetic construct
  misc_feature 1..4371: note = Variant of human B-domain deleted Factor VIII
  source 1..4371: mol_type = other DNA
atgcagattgaactgtctacctgcttcttcctctgtttgctgaggttctgctttagcgccactagacggtactaccttggcgctgtggagctgtcctgggactatatgcagagtgatttgggagagcttcccgtcgacgcacgatttcctcctcgcgttccaaagtcatttccctttaacacaagcgtggtgtacaagaagacgctcttcgtcgaattcaccgatcacctgttcaatatcgccaaacccagaccaccatggatgggtcttttggggcctaccatacaagcggaggtgtatgacacagttgttatcactctcaagaacatggcttctcatccggtaagtcttcacgcagtgggcgtgtcctactggaaagcttcagaaggagccgagtatgatgatcagacatcccagagggagaaagaagacgacaaggtatttccaggtgggtctcatacctatgtgtggcaagtgctcaaagagaatggccctatggcaagcgatccgccgtgtttgacttacagctacctttcacacgttgacctcgtcaaggacctcaactccgggttgattggagccttgttggtatgcagggaaggatctcttgccaaagagaagacacagaccctccacaagtttatccttctctttgctgtgttcgatgagggcaaaagttggcatagcgaaacgaagaattccctcatgcaggatcgcgacgcagccagcgccagagcttggcccaagatgcacactgtgaacggatatgtcaataggacgcttcctggcttgattgggtgtcatcggaaaagtgtctactggcacgtgatcggaatggggacaacaccagaggtccactccatatttctcgaaggccataccttccttgttcgaaaccacagacaggcatccttggggatctctcccattacctttctcactgcccaaacgctccttggtgacttgggtcagttccttctcttttgccatatcccgtcacaccagcatgatggtatggaagcttatgtgaaagtcgacagttgtcctgaggagccacagttgcgcatgaagaataatgaagaagccgaggattacgacgacgatctcaccgattctgagatggacgtggtgaggtttgatgacgacaactctccctccatcattcaagctcggagcgtggcgaagaaacaccccaagacttgggtccactatatagcggcggaagaggaggattgggattacgctcctcttgtattggcaccagatgaccgctcatacaaaagccagtacctcaacaacggaccgcagagaattggccggaagtataagaaagtgcgatttatggcctatacagacgaaacctttaagacaagggaggccatccagcatgagagtgggattttgggacctcttctttacggcgaagttggtgataccctcctcatcatcttcaagaatcaagcttctcgcccctataacatttacccacacgggatcactgacgttaggcctttgtatagcagaagacttcccaaaggcgtgaagcatctcaaagacttccccattttgccaggcgagatctttaagtacaaatggaccgtcacagtggaagatggaccgactaaatcagaccctcgatgccttacgcggtactattcctccttcgtgaatatggagagagatttggcaagcggactcataggaccactcctcatctgttacaaggaatctgtagaccagaggggtaaccagattatgagtgataaacgcaatgtgatcctttttagcgtcttcgacgagaaccggtcctggtacttgaccgagaatatacaaaggttccttcccaaccccgcaggcgttcagttggaagaccctgagtttcaggccagcaatattatgcactcaatcaacggctatgtgtttgatagtctccagctttctgtttgcctccatgaagtagcctattggtacatcttgtcaattggtgctcaaacagacttcctctccgtcttcttctccggctacacctttaagcacaagatggtgtatgaggacactctcacactctttccattttctggagaaaccgtgttcatgagcatggagaatccaggcctttggatcttgggttgccacaacagtgattttcgcaatcggggaatgactgctctcctcaaagtcagcagctgtgataagaacacaggcgactattacgaagattcttacgaggacataagtgcctactttgactccaagaataacgccattgagcccagatcattctcccagaatcctcccgtgcttaaaaggcatcagcgcgaaatcaccagaactactcttcagtctgatcaagaggagattgactatgacgacaccataagcgtggaaatgaagaaggaggatttcgatatctatgacgaagatgagaaccagtctccgcggagctttcagaagaagacgcgacactacttcattgcagcagtcgaaaggctttgggactacggtatgtcatcatcccctcatgtgttgcgcaatagagctcagagtggaagtgttccacagttcaagaaagtcgtctttcaagagtttacagatggcagcttcacacagcctctctatcggggcgagcttaacgaacatttgggactccttggtccctatatccgagccgaagtggaggacaacattatggttacctttaggaatcaagcctctcgcccctacagcttctactcctccctcatcagttatgaggaggatcagagacaaggcgctgaaccacggaagaactttgtgaaaccgaatgagacgaagacctacttctggaaagtacagcaccacatggcccccacaaaagacgaattcgattgcaaagcatgggcgtatttttcagacgttgacttggagaaagatgtacattcaggacttattggtcctttgttggtgtgtcacactaacactctcaatccagcccatggcaggcaggtgacagtccaggaattcgctcttttctttaccatctttgatgagaccaagtcctggtacttcacggaaaacatggagcgcaattgcagagccccctgtaacatacagatggaggaccctacctttaaggaaaattatcggttccacgcaatcaacggatacattatggatacactccctggccttgtgatggctcaggaccaacgaatcaggtggtacctcctcagcatgggttctaatgagaacatacactccattcacttttcaggacatgtgttcactgtccggaagaaagaagagtataagatggccctctacaatttgtatccaggcgtgtttgagaccgttgaaatgcttccctctaaagctggcatctggagagtagagtgcttgatcggagaacatcttcacgcaggtatgagcaccttgttcctcgtgtacagcaacaaatgtcagaccccacttggcatggccagtggacacattcgcgactttcagatcacagcatctggccagtatggacaatgggccccaaagttggctcgcctccattactccggtagcataaatgcgtggtccactaaagaacctttcagctggattaaggtcgatcttcttgcccccatgatcatccacggcattaagacacagggagcgaggcagaaattctcctccctctacatctcacagttcattattatgtatagtttggacggcaagaagtggcaaacttatagaggtaacagtactggaacagacatggtgttcttcggcaacgttgatagctctggcatcaaacacaacatctttaatcctcccataatagctcggtacatcagattgcatccgacccactacagcattaggagtacactccgaatggagcttatgggttgcgacttgaattcctgttcaatgccactcggaatggagtctaaagccatctctgatgcacagataaccgccagtagctactttacgaacatgtttgctacgtggtcaccctctaaggcaaggcttcatttgcaaggccggtctaatgcctggagacctcaggtgaacaacccgaaagaatggctccaggtggactttcagaagaccatgaaagtaacaggtgtcactactcagggagttaagtccttggatactagcatgtatgtgaaggagttccttatttcctcatcacaagatggccaccagtggaccctcttctttcagaatggtaaggtcaaagtgtttcagggcaatcaagacagcttcacacccgtggtgaacagtcttgatcctccactcttgacacgataccttcgaatccatccacagtcttgggagcaccagattgcattgcgcatggaagtacttggatgcgaggctcaggacctctac

SEQ ID NO: 1142 - protein, 1457 aa, synthetic construct
  REGION 1..1457: note = Variant of human B-domain deleted Factor VIII
MQIELSTCFFLCLLRFCFSATRRYYLGAVELSWDYMQSDLGELPVDARFPPRVPKSFPFNTSVVYKKTLFVEFTDHLFNIAKPRPPWMGLLGPTIQAEVYDTVVITLKNMASHPVSLHAVGVSYWKASEGAEYDDQTSQREKEDDKVFPGGSHTYVWQVLKENGPMASDPPCLTYSYLSHVDLVKDLNSGLIGALLVCREGSLAKEKTQTLHKFILLFAVFDEGKSWHSETKNSLMQDRDAASARAWPKMHTVNGYVNRTLPGLIGCHRKSVYWHVIGMGTTPEVHSIFLEGHTFLVRNHRQASLGISPITFLTAQTLLGDLGQFLLFCHIPSHQHDGMEAYVKVDSCPEEPQLRMKNNEEAEDYDDDLTDSEMDVVRFDDDNSPSIIQARSVAKKHPKTWVHYIAAEEEDWDYAPLVLAPDDRSYKSQYLNNGPQRIGRKYKKVRFMAYTDETFKTREAIQHESGILGPLLYGEVGDTLLIIFKNQASRPYNIYPHGITDVRPLYSRRLPKGVKHLKDFPILPGEIFKYKWTVTVEDGPTKSDPRCLTRYYSSFVNMERDLASGLIGPLLICYKESVDQRGNQIMSDKRNVILFSVFDENRSWYLTENIQRFLPNPAGVQLEDPEFQASNIMHSINGYVFDSLQLSVCLHEVAYWYILSIGAQTDFLSVFFSGYTFKHKMVYEDTLTLFPFSGETVFMSMENPGLWILGCHNSDFRNRGMTALLKVSSCDKNTGDYYEDSYEDISAYFDSKNNAIEPRSFSQNPPVLKRHQREITRTTLQSDQEEIDYDDTISVEMKKEDFDIYDEDENQSPRSFQKKTRHYFIAAVERLWDYGMSSSPHVLRNRAQSGSVPQFKKVVFQEFTDGSFTQPLYRGELNEHLGLLGPYIRAEVEDNIMVTFRNQASRPYSFYSSLISYEEDQRQGAEPRKNFVKPNETKTYFWKVQHHMAPTKDEFDCKAWAYFSDVDLEKDVHSGLIGPLLVCHTNTLNPAHGRQVTVQEFALFFTIFDETKSWYFTENMERNCRAPCNIQMEDPTFKENYRFHAINGYIMDTLPGLVMAQDQRIRWYLLSMGSNENIHSIHFSGHVFTVRKKEEYKMALYNLYPGVFETVEMLPSKAGIWRVECLIGEHLHAGMSTLFLVYSNKCQTPLGMASGHIRDFQITASGQYGQWAPKLARLHYSGSINAWSTKEPFSWIKVDLLAPMIIHGIKTQGARQKFSSLYISQFIIMYSLDGKKWQTYRGNSTGTDMVFFGNVDSSGIKHNIFNPPIIARYIRLHPTHYSIRSTLRMELMGCDLNSCSMPLGMESKAISDAQITASSYFTNMFATWSPSKARLHLQGRSNAWRPQVNNPKEWLQVDFQKTMKVTGVTTQGVKSLDTSMYVKEFLISSSQDGHQWTLFFQNGKVKVFQGNQDSFTPVVNSLDPPLLTRYLRIHPQSWEHQIALRMEVLGCEAQDLY

SEQ ID NO: 1143 - DNA, 4371 bp, synthetic construct
  misc_feature 1..4371: note = Variant of human B-domain deleted Factor VIII
  source 1..4371: mol_type = other DNA
atgcagattgaactgtctacctgcttcttcctctgtttgctgaggttctgctttagcgccactagacggtactaccttggcgctgtggagctgtcctgggactatatgcagagtgatttgggagagcttcccgtcgacgcacgatttcctcctcgcgttccaaagtcatttccctttaacacaagcgtggtgtacaagaagacgctcttcgtcgaattcaccgatcacctgttcaatatcgccaaacccagaccaccatggatgggtcttttggggcctaccatacaagcggaggtgtatgacacagttgttatcactctcaagaacatggcttctcatccggtaagtcttcacgcagtgggcgtgtcctactggaaagcttcagaaggagccgagtatgatgatcagacatcccagagggagaaagaagacgacaaggtatttccaggtgggtctcatacctatgtgtggcaagtgctcaaagagaatggccctatggcaagcgatccgccgtgtttgacttacagctacctttcacacgttgacctcgtcaaggacctcaactccgggttgattggagccttgttggtatgcagggaaggatctcttgccaaagagaagacacagaccctccacaagtttatccttctctttgctgtgttcgatgagggcaaaagttggcatagcgaaacgaagaattccctcatgcaggatcgcgacgcagccagcgccagagcttggcccaagatgcacactgtgaacggatatgtcaataggacgcttcctggcttgattgggtgtcatcggaaaagtgtctactggcacgtgatcggaatggggacaacaccagaggtccactccatatttctcgaaggccataccttccttgttcgaaaccacagacaggcatccttggggatctctcccattacctttctcactgcccaaacgctccttatggacttgggtcagttccttctcttttgccatatcccgtcacaccagcatgatggtatggaagcttatgtgaaagtcgacagttgtcctgaggagccacagttgcgcatgaagaataatgaagaagccgaggattacgacgacgatctcaccgattctgagatggacgtggtgaggtttgatgacgacaactctccctccatcattcaagctcggagcgtggcgaagaaacaccccaagacttgggtccactatatagcggcggaagaggaggattgggattacgctcctcttgtattggcaccagatgaccgctcatacaaaagccagtacctcaacaacggaccgcagagaattggccggaagtataagaaagtgcgatttatggcctatacagacgaaacctttaagacaagggaggccatccagcatgagagtgggattttgggacctcttctttacggcgaagttggtgataccctcctcatcatcttcaagaatcaagcttctcgcccctataacatttacccacacgggatcactgacgttaggcctttgtatagcagaagacttcccaaaggcgtgaagcatctcaaagacttccccattttgccaggcgagatctttaagtacaaatggaccgtcacagtggaagatggaccgactaaatcagaccctcgatgccttacgcggtactattcctccttcgtgaatatggagagagatttggcaagcggactcataggaccactcctcatctgttacaaggaatctgtagaccagaggggtaaccagattatgagtgataaacgcaatgtgatcctttttagcgtcttcgacgagaaccggtcctggtacttgaccgagaatatacaaaggttccttcccaaccccgcaggcgttcagttggaagaccctgagtttcaggccagcaatattatgcactcaatcaacggctatgtgtttgatagtctccagctttctgtttgcctccatgaagtagcctattggtacatcttgtcaattggtgctcaaacagacttcctctccgtcttcttctccggctacacctttaagcacaagatggtgtgggaggacactctcacactctttccattttctggagaaaccgtgttcatgagcatggagaatccaggcctttggatcttgggttgccacaacagtgattttcgcaatcggggaatgactgctctcctcaaagtcagcagctgtgataagaacacaggcgactattacgaagattcttacgaggacataagtgcctactttgactccaagaataacgccattgagcccagatcattctcccagaatcctcccgtgcttaaaaggcatcagcgcgaaatcaccagaactactcttcagtctgatcaagaggagattgactatgacgacaccataagcgtggaaatgaagaaggaggatttcgatatctatgacgaagatgagaaccagtctccgcggagctttcagaagaagacgcgacactacttcattgcagcagtcgaaaggctttgggactacggtatgtcatcatcccctcatgtgttgcgcaatagagctcagagtggaagtgttccacagttcaagaaagtcgtctttcaagagtttacagatggcagcttcacacagcctctctatcggggcgagcttaacgaacatttgggactccttggtccctatatccgagccgaagtggaggacaacattatggttacctttaggaatcaagcctctcgcccctacagcttctactcctccctcatcagttatgaggaggatcagagacaaggcgctgaaccacggaagaactttgtgaaaccgaatgagacgaagacctacttctggaaagtacagcaccacatggcccccacaaaagacgaattcgattgcaaagcatgggcgtatttttcagacgttgacttggagaaagatgtacattcaggacttattggtcctttgttggtgtgtcacactaacactctcaatccagcccatggcaggcaggtgacagtccaggaattcgctcttttctttaccatctttgatgagaccaagtcctggtacttcacggaaaacatggagcgcaattgcagagccccctgtaacatacagatggaggaccctacctttaaggaaaattatcggttccacgcaatcaacggatacattatggatacactccctggccttgtgatggctcaggaccaacgaatcaggtggtacctcctcagcatgggttctaatgagaacatacactccattcacttttcaggacatgtgttcactgtccggaagaaagaagagtataagatggccctctacaatttgtatccaggcgtgtttgagaccgttgaaatgcttccctctaaagctggcatctggagagtagagtgcttgatcggagaacatcttcacgcaggtatgagcaccttgttcctcgtgtacagcaacaaatgtcagaccccacttggcatggccagtggacacattcgcgactttcagatcacagcatctggccagtatggacaatgggccccaaagttggctcgcctccattactccggtagcataaatgcgtggtccactaaagaacctttcagctggattaaggtcgatcttcttgcccccatgatcatccacggcattaagacacagggagcgaggcagaaattctcctccctctacatctcacagttcattattatgtatagtttggacggcaagaagtggcaaacttatagaggtaacagtactggaacagacatggtgttcttcggcaacgttgatagctctggcatcaaacacaacatctttaatcctcccataatagctcggtacatcagattgcatccgacccactacagcattaggagtacactccgaatggagcttatgggttgcgacttgaattcctgttcaatgccactcggaatggagtctaaagccatctctgatgcacagataaccgccagtagctactttacgaacatgtttgctacgtggtcaccctctaaggcaaggcttcatttgcaaggccggtctaatgcctggagacctcaggtgaacaacccgaaagaatggctccaggtggactttcagaagaccatgaaagtaacaggtgtcactactcagggagttaagtccttggatactagcatgtatgtgaaggagttccttatttcctcatcacaagatggccaccagtggaccctcttctttcagaatggtaaggtcaaagtgtttcagggcaatcaagacagcttcacacccgtggtgaacagtcttgatcctccactcttgacacgataccttcgaatccatccacagtcttgggagcaccagattgcattgcgcatggaagtacttggatgcgaggctcaggacctctac

SEQ ID NO: 1144 - protein, 1457 aa, synthetic construct
  REGION 1..1457: note = Variant of human B-domain deleted Factor VIII
MQIELSTCFFLCLLRFCFSATRRYYLGAVELSWDYMQSDLGELPVDARFPPRVPKSFPFNTSVVYKKTLFVEFTDHLFNIAKPRPPWMGLLGPTIQAEVYDTVVITLKNMASHPVSLHAVGVSYWKASEGAEYDDQTSQREKEDDKVFPGGSHTYVWQVLKENGPMASDPPCLTYSYLSHVDLVKDLNSGLIGALLVCREGSLAKEKTQTLHKFILLFAVFDEGKSWHSETKNSLMQDRDAASARAWPKMHTVNGYVNRTLPGLIGCHRKSVYWHVIGMGTTPEVHSIFLEGHTFLVRNHRQASLGISPITFLTAQTLLMDLGQFLLFCHIPSHQHDGMEAYVKVDSCPEEPQLRMKNNEEAEDYDDDLTDSEMDVVRFDDDNSPSIIQARSVAKKHPKTWVHYIAAEEEDWDYAPLVLAPDDRSYKSQYLNNGPQRIGRKYKKVRFMAYTDETFKTREAIQHESGILGPLLYGEVGDTLLIIFKNQASRPYNIYPHGITDVRPLYSRRLPKGVKHLKDFPILPGEIFKYKWTVTVEDGPTKSDPRCLTRYYSSFVNMERDLASGLIGPLLICYKESVDQRGNQIMSDKRNVILFSVFDENRSWYLTENIQRFLPNPAGVQLEDPEFQASNIMHSINGYVFDSLQLSVCLHEVAYWYILSIGAQTDFLSVFFSGYTFKHKMVWEDTLTLFPFSGETVFMSMENPGLWILGCHNSDFRNRGMTALLKVSSCDKNTGDYYEDSYEDISAYFDSKNNAIEPRSFSQNPPVLKRHQREITRTTLQSDQEEIDYDDTISVEMKKEDFDIYDEDENQSPRSFQKKTRHYFIAAVERLWDYGMSSSPHVLRNRAQSGSVPQFKKVVFQEFTDGSFTQPLYRGELNEHLGLLGPYIRAEVEDNIMVTFRNQASRPYSFYSSLISYEEDQRQGAEPRKNFVKPNETKTYFWKVQHHMAPTKDEFDCKAWAYFSDVDLEKDVHSGLIGPLLVCHTNTLNPAHGRQVTVQEFALFFTIFDETKSWYFTENMERNCRAPCNIQMEDPTFKENYRFHAINGYIMDTLPGLVMAQDQRIRWYLLSMGSNENIHSIHFSGHVFTVRKKEEYKMALYNLYPGVFETVEMLPSKAGIWRVECLIGEHLHAGMSTLFLVYSNKCQTPLGMASGHIRDFQITASGQYGQWAPKLARLHYSGSINAWSTKEPFSWIKVDLLAPMIIHGIKTQGARQKFSSLYISQFIIMYSLDGKKWQTYRGNSTGTDMVFFGNVDSSGIKHNIFNPPIIARYIRLHPTHYSIRSTLRMELMGCDLNSCSMPLGMESKAISDAQITASSYFTNMFATWSPSKARLHLQGRSNAWRPQVNNPKEWLQVDFQKTMKVTGVTTQGVKSLDTSMYVKEFLISSSQDGHQWTLFFQNGKVKVFQGNQDSFTPVVNSLDPPLLTRYLRIHPQSWEHQIALRMEVLGCEAQDLY

SEQ ID NO: 1145 - DNA, 4371 bp, synthetic construct
  misc_feature 1..4371: note = Variant of human B-domain deleted Factor VIII
  source 1..4371: mol_type = other DNA
atgcagattgaactgtctacctgcttcttcctctgtttgctgaggttctgctttagcgccactagacgggtttaccttggcgctgtggagctgtcctgggactatatgcagagtgatttgggagagcttcccgtcgacgcacgatttcctcctcgcgttccaaagtcatttccctttaacacaagcgtggtgtacaagaagacgctcttcgtcgaattcaccgatcacctgttcaatatcgccaaacccagaccaccatggatgggtcttttggggcctaccatacaagcggaggtgtatgacacagttgttatcactctcaagaacatggcttctcatccggtaagtcttcacgcagtgggcgtgtcctactggaaagcttcagaaggagccgagtatgatgatcagacatcccagagggagaaagaagacgacaaggtatttccaggtgggtctcatacctatgtgtggcaagtgctcaaagagaatggccctatggcaagcgatccgccgtgtttgacttacagctacctttcacacgttgacctcgtcaaggacctcaactccgggttgattggagccttgttggtatgcagggaaggatctcttgccaaagagaagacacagaccctccacaagtttatccttctctttgctgtgttcgatgagggcaaaagttggcatagcgaaacgaagaattccctcatgcaggatcgcgacgcagccagcgccagagcttggcccaagatgcacactgtgaacggatatgtcaataggacgcttcctggcttgattgggtgtcatcggaaaagtgtctactggcacgtgatcggaatggggacaacaccagaggtccactccatatttctcgaaggccataccttccttgttcgaaaccacagacaggcatccttggggatctctcccattacctttctcactgcccaaacgctccttatggacttgggtcagttccttctcttttgccatatcccgtcacaccagcatgatggtatggaagcttatgtgaaagtcgacagttgtcctgaggagccacagttgcgcatgaagaataatgaagaagccgaggattacgacgacgatctcaccgattctgagatggacgtggtgaggtttgatgacgacaactctccctccatcattcaagctcggagcgtggcgaagaaacaccccaagacttgggtccactatatagcggcggaagaggaggattgggattacgctcctcttgtattggcaccagatgaccgctcatacaaaagccagtacctcaacaacggaccgcagagaattggccggaagtataagaaagtgcgatttatggcctatacagacgaaacctttaagacaagggaggccatccagcatgagagtgggattttgggacctcttctttacggcgaagttggtgataccctcctcatcatcttcaagaatcaagcttctcgcccctataacatttacccacacgggatcactgacgttaggcctttgtatagcagaagacttcccaaaggcgtgaagcatctcaaagacttccccattttgccaggcgagatctttaagtacaaatggaccgtcacagtggaagatggaccgactaaatcagaccctcgatgccttacgcggtactattcctccttcgtgaatatggagagagatttggcaagcggactcataggaccactcctcatctgttacaaggaatctgtagaccagaggggtaaccagattatgagtgataaacgcaatgtgatcctttttagcgtcttcgacgagaaccggtcctggtacttgaccgagaatatacaaaggttccttcccaaccccgcaggcgttcagttggaagaccctgagtttcaggccagcaatattatgcactcaatcaacggctatgtgtttgatagtctccagctttctgtttgcctccatgaagtagcctattggtacatcttgtcaattggtgctcaaacagacttcctctccgtcttcttctccggctacacctttaagcacaagatggtgtatgaggacactctcacactctttccattttctggagaaaccgtgttcatgagcatggagaatccaggcctttggatcttgggttgccacaacagtgattttcgcaatcggggaatgactgctctcctcaaagtcagcagctgtgataagaacacaggcgactattacgaagattcttacgaggacataagtgcctactttgactccaagaataacgccattgagcccagatcattctcccagaatcctcccgtgcttaaaaggcatcagcgcgaaatcaccagaactactcttcagtctgatcaagaggagattgactatgacgacaccataagcgtggaaatgaagaaggaggatttcgatatctatgacgaagatgagaaccagtctccgcggagctttcagaagaagacgcgacactacttcattgcagcagtcgaaaggctttgggactacggtatgtcatcatcccctcatgtgttgcgcaatagagctcagagtggaagtgttccacagttcaagaaagtcgtctttcaagagtttacagatggcagcttcacacagcctctctatcggggcgagcttaacgaacatttgggactccttggtccctatatccgagccgaagtggaggacaacattatggttacctttaggaatcaagcctctcgcccctacagcttctactcctccctcatcagttatgaggaggatcagagacaaggcgctgaaccacggaagaactttgtgaaaccgaatgagacgaagacctacttctggaaagtacagcaccacatggcccccacaaaagacgaattcgattgcaaagcatgggcgtatttttcagacgttgacttggagaaagatgtacattcaggacttattggtcctttgttggtgtgtcacactaacactctcaatccagcccatggcaggcaggtgacagtccaggaattcgctcttttctttaccatctttgatgagaccaagtcctggtacttcacggaaaacatggagcgcaattgcagagccccctgtaacatacagatggaggaccctacctttaaggaaaattatcggttccacgcaatcaacggatacattatggatacactccctggccttgtgatggctcaggaccaacgaatcaggtggtacctcctcagcatgggttctaatgagaacatacactccattcacttttcaggacatgtgttcactgtccggaagaaagaagagtataagatggccctctacaatttgtatccaggcgtgtttgagaccgttgaaatgcttccctctaaagctggcatctggagagtagagtgcttgatcggagaacatcttcacgcaggtatgagcaccttgttcctcgtgtacagcaacaaatgtcagaccccacttggcatggccagtggacacattcgcgactttcagatcacagcatctggccagtatggacaatgggccccaaagttggctcgcctccattactccggtagcataaatgcgtggtccactaaagaacctttcagctggattaaggtcgatcttcttgcccccatgatcatccacggcattaagacacagggagcgaggcagaaattctcctccctctacatctcacagttcattattatgtatagtttggacggcaagaagtggcaaacttatagaggtaacagtactggaacagacatggtgttcttcggcaacgttgatagctctggcatcaaacacaacatctttaatcctcccataatagctcggtacatcagattgcatccgacccactacagcattaggagtacactccgaatggagcttatgggttgcgacttgaattcctgttcaatgccactcggaatggagtctaaagccatctctgatgcacagataaccgccagtagctactttacgaacatgtttgctacgtggtcaccctctaaggcaaggcttcatttgcaaggccggtctaatgcctggagacctcaggtgaacaacccgaaagaatggctccaggtggactttcagaagaccatgaaagtaacaggtgtcactactcagggagttaagtccttggatactagcatgtatgtgaaggagttccttatttcctcatcacaagatggccaccagtggaccctcttctttcagaatggtaaggtcaaagtgtttcagggcaatcaagacagcttcacacccgtggtgaacagtcttgatcctccactcttgacacgataccttcgaatccatccacagtcttgggagcaccagattgcattgcgcatggaagtacttggatgcgaggctcaggacctctac

SEQ ID NO: 1146 - protein, 1457 aa, synthetic construct
  REGION 1..1457: note = Variant of human B-domain deleted Factor VIII
MQIELSTCFFLCLLRFCFSATRRVYLGAVELSWDYMQSDLGELPVDARFPPRVPKSFPFNTSVVYKKTLFVEFTDHLFNIAKPRPPWMGLLGPTIQAEVYDTVVITLKNMASHPVSLHAVGVSYWKASEGAEYDDQTSQREKEDDKVFPGGSHTYVWQVLKENGPMASDPPCLTYSYLSHVDLVKDLNSGLIGALLVCREGSLAKEKTQTLHKFILLFAVFDEGKSWHSETKNSLMQDRDAASARAWPKMHTVNGYVNRTLPGLIGCHRKSVYWHVIGMGTTPEVHSIFLEGHTFLVRNHRQASLGISPITFLTAQTLLMDLGQFLLFCHIPSHQHDGMEAYVKVDSCPEEPQLRMKNNEEAEDYDDDLTDSEMDVVRFDDDNSPSIIQARSVAKKHPKTWVHYIAAEEEDWDYAPLVLAPDDRSYKSQYLNNGPQRIGRKYKKVRFMAYTDETFKTREAIQHESGILGPLLYGEVGDTLLIIFKNQASRPYNIYPHGITDVRPLYSRRLPKGVKHLKDFPILPGEIFKYKWTVTVEDGPTKSDPRCLTRYYSSFVNMERDLASGLIGPLLICYKESVDQRGNQIMSDKRNVILFSVFDENRSWYLTENIQRFLPNPAGVQLEDPEFQASNIMHSINGYVFDSLQLSVCLHEVAYWYILSIGAQTDFLSVFFSGYTFKHKMVYEDTLTLFPFSGETVFMSMENPGLWILGCHNSDFRNRGMTALLKVSSCDKNTGDYYEDSYEDISAYFDSKNNAIEPRSFSQNPPVLKRHQREITRTTLQSDQEEIDYDDTISVEMKKEDFDIYDEDENQSPRSFQKKTRHYFIAAVERLWDYGMSSSPHVLRNRAQSGSVPQFKKVVFQEFTDGSFTQPLYRGELNEHLGLLGPYIRAEVEDNIMVTFRNQASRPYSFYSSLISYEEDQRQGAEPRKNFVKPNETKTYFWKVQHHMAPTKDEFDCKAWAYFSDVDLEKDVHSGLIGPLLVCHTNTLNPAHGRQVTVQEFALFFTIFDETKSWYFTENMERNCRAPCNIQMEDPTFKENYRFHAINGYIMDTLPGLVMAQDQRIRWYLLSMGSNENIHSIHFSGHVFTVRKKEEYKMALYNLYPGVFETVEMLPSKAGIWRVECLIGEHLHAGMSTLFLVYSNKCQTPLGMASGHIRDFQITASGQYGQWAPKLARLHYSGSINAWSTKEPFSWIKVDLLAPMIIHGIKTQGARQKFSSLYISQFIIMYSLDGKKWQTYRGNSTGTDMVFFGNVDSSGIKHNIFNPPIIARYIRLHPTHYSIRSTLRMELMGCDLNSCSMPLGMESKAISDAQITASSYFTNMFATWSPSKARLHLQGRSNAWRPQVNNPKEWLQVDFQKTMKVTGVTTQGVKSLDTSMYVKEFLISSSQDGHQWTLFFQNGKVKVFQGNQDSFTPVVNSLDPPLLTRYLRIHPQSWEHQIALRMEVLGCEAQDLY

SEQ ID NO: 1147 - DNA, 4371 bp, synthetic construct
  misc_feature 1..4371: note = Variant of human B-domain deleted Factor VIII
  source 1..4371: mol_type = other DNA
atgcagattgaactgtctacctgcttcttcctctgtttgctgaggttctgctttagcgccactagacggtactaccttggcgctgtggagctgtcctgggactatatgcagagtgatttgggagagcttcccgtcgacgcacgatttcctcctcgcgttccaaagtcatttccctttaacacaagcgtggtgtacaagaagacgctcttcgtcgaattcaccgatcacctgttcaatatcgccaaacccagaccaccatggatgggtcttttggggcctaccatacaagcggaggtgtatgacacagttgttatcactctcaagaacatggcttctcatccggtaagtcttcacgcagtgggcgtgtcctactggaaagcttcagaaggagccgagtatgatgatcagacatcccagagggagaaagaagacgacaaggtatttccaggtgggtctcatacctatgtgtggcaagtgctcaaagagaatggccctatggcaagcgatccgccgtgtttgacttacagctacctttcacacgttgacctcgtcaaggacctcaactccgggttgattggagccttgttggtatgcagggaaggatctcttgccaaagagaagacacagaccctccacaagtttatccttctctttgctgtgttcgatgagggcaaaagttggcatagcgaaacgaagaattccctcatgcaggatcgcgacgcagccagcgccagagcttggcccaagatgcacactgtgaacggatatgtcaataggacgcttcctggcttgattgggtgtcatcggaaaagtgtctactggcacgtgatcggaatggggacaacaccagaggtccactccatatttctcgaaggccataccttccttgttcgaaaccacagacaggcatccttggggatctctcccattacctttctcactgcccaaacgctccttatggacttgggtcagttccttctcttttgccatatcccgtcacaccagcatgatggtatggaagcttatgtgaaagtcgacagttgtcctgaggagccacagttgcgcatgaagaataatgaagaagccgaggattacgacgacgatctcaccgattctgagatggacgtggtgaggtttgatgacgacaactctccctccatcattcaagctcggagcgtggcgaagaaacaccccaagacttgggtccactatatagcggcggaagaggaggattgggattacgctcctcttgtattggcaccagatgaccgctcatacaaaagccagtacctcaacaacggaccgcagagaattggccggaagtataagaaagtgcgatttatggcctatacagacgaaacctttaagacaagggaggccatccagcatgagagtgggattttgggacctcttctttacggcgaagttggtgataccctcctcatcatcttcaagaatcaagcttctcgcccctataacatttacccacacgggatcactgacgttaggcctttgtatagcagaagacttcccaaaggcgtgaagcatctcaaagacttccccattttgccaggcgagatctttaagtacaaatggaccattacagtggaagatggaccgactaaatcagaccctcgatgccttacgcggtactattcctccttcgtgaatatggagagagatttggcaagcggactcataggaccactcctcatctgttacaaggaatctgtagaccagaggggtaaccagattatgagtgataaacgcaatgtgatcctttttagcgtcttcgacgagaaccggtcctggtacttgaccgagaatatacaaaggttccttcccaaccccgcaggcgttcagttggaagaccctgagtttcaggccagcaatattatgcactcaatcaacggctatgtgtttgatagtctccagctttctgtttgcctccatgaagtagcctattggtacatcttgtcaattggtgctcaaacagacttcctctccgtcttcttctccggctacacctttaagcacaagatggtgtatgaggacactctcacactctttccattttctggagaaaccgtgttcatgagcatggagaatccaggcctttggatcttgggttgccacaacagtgattttcgcaatcggggaatgactgctctcctcaaagtcagcagctgtgataagaacacaggcgactattacgaagattcttacgaggacataagtgcctactttgactccaagaataacgccattgagcccagatcattctcccagaatcctcccgtgcttaaaaggcatcagcgcgaaatcaccagaactactcttcagtctgatcaagaggagattgactatgacgacaccataagcgtggaaatgaagaaggaggatttcgatatctatgacgaagatgagaaccagtctccgcggagctttcagaagaagacgcgacactacttcattgcagcagtcgaaaggctttgggactacggtatgtcatcatcccctcatgtgttgcgcaatagagctcagagtggaagtgttccacagttcaagaaagtcgtctttcaagagtttacagatggcagcttcacacagcctctctatcggggcgagcttaacgaacatttgggactccttggtccctatatccgagccgaagtggaggacaacattatggttacctttaggaatcaagcctctcgcccctacagcttctactcctccctcatcagttatgaggaggatcagagacaaggcgctgaaccacggaagaactttgtgaaaccgaatgagacgaagacctacttctggaaagtacagcaccacatggcccccacaaaagacgaattcgattgcaaagcatgggcgtatttttcagacgttgacttggagaaagatgtacattcaggacttattggtcctttgttggtgtgtcacactaacactctcaatccagcccatggcaggcaggtgacagtccaggaattcgctcttttctttaccatctttgatgagaccaagtcctggtacttcacggaaaacatggagcgcaattgcagagccccctgtaacatacagatggaggaccctacctttaaggaaaattatcggttccacgcaatcaacggatacattatggatacactccctggccttgtgatggctcaggaccaacgaatcaggtggtacctcctcagcatgggttctaatgagaacatacactccattcacttttcaggacatgtgttcactgtccggaagaaagaagagtataagatggccctctacaatttgtatccaggcgtgtttgagaccgttgaaatgcttccctctaaagctggcatctggagagtagagtgcttgatcggagaacatcttcacgcaggtatgagcaccttgttcctcgtgtacagcaacaaatgtcagaccccacttggcatggccagtggacacattcgcgactttcagatcacagcatctggccagtatggacaatgggccccaaagttggctcgcctccattactccggtagcataaatgcgtggtccactaaagaacctttcagctggattaaggtcgatcttcttgcccccatgatcatccacggcattaagacacagggagcgaggcagaaattctcctccctctacatctcacagttcattattatgtatagtttggacggcaagaagtggcaaacttatagaggtaacagtactggaacagacatggtgttcttcggcaacgttgatagctctggcatcaaacacaacatctttaatcctcccataatagctcggtacatcagattgcatccgacccactacagcattaggagtacactccgaatggagcttatgggttgcgacttgaattcctgttcaatgccactcggaatggagtctaaagccatctctgatgcacagataaccgccagtagctactttacgaacatgtttgctacgtggtcaccctctaaggcaaggcttcatttgcaaggccggtctaatgcctggagacctcaggtgaacaacccgaaagaatggctccaggtggactttcagaagaccatgaaagtaacaggtgtcactactcagggagttaagtccttggatactagcatgtatgtgaaggagttccttatttcctcatcacaagatggccaccagtggaccctcttctttcagaatggtaaggtcaaagtgtttcagggcaatcaagacagcttcacacccgtggtgaacagtcttgatcctccactcttgacacgataccttcgaatccatccacagtcttgggagcaccagattgcattgcgcatggaagtacttggatgcgaggctcaggacctctac

SEQ ID NO: 1148 - protein, 1457 aa, synthetic construct
  REGION 1..1457: note = Variant of human B-domain deleted Factor VIII
MQIELSTCFFLCLLRFCFSATRRYYLGAVELSWDYMQSDLGELPVDARFPPRVPKSFPFNTSVVYKKTLFVEFTDHLFNIAKPRPPWMGLLGPTIQAEVYDTVVITLKNMASHPVSLHAVGVSYWKASEGAEYDDQTSQREKEDDKVFPGGSHTYVWQVLKENGPMASDPPCLTYSYLSHVDLVKDLNSGLIGALLVCREGSLAKEKTQTLHKFILLFAVFDEGKSWHSETKNSLMQDRDAASARAWPKMHTVNGYVNRTLPGLIGCHRKSVYWHVIGMGTTPEVHSIFLEGHTFLVRNHRQASLGISPITFLTAQTLLMDLGQFLLFCHIPSHQHDGMEAYVKVDSCPEEPQLRMKNNEEAEDYDDDLTDSEMDVVRFDDDNSPSIIQARSVAKKHPKTWVHYIAAEEEDWDYAPLVLAPDDRSYKSQYLNNGPQRIGRKYKKVRFMAYTDETFKTREAIQHESGILGPLLYGEVGDTLLIIFKNQASRPYNIYPHGITDVRPLYSRRLPKGVKHLKDFPILPGEIFKYKWTITVEDGPTKSDPRCLTRYYSSFVNMERDLASGLIGPLLICYKESVDQRGNQIMSDKRNVILFSVFDENRSWYLTENIQRFLPNPAGVQLEDPEFQASNIMHSINGYVFDSLQLSVCLHEVAYWYILSIGAQTDFLSVFFSGYTFKHKMVYEDTLTLFPFSGETVFMSMENPGLWILGCHNSDFRNRGMTALLKVSSCDKNTGDYYEDSYEDISAYFDSKNNAIEPRSFSQNPPVLKRHQREITRTTLQSDQEEIDYDDTISVEMKKEDFDIYDEDENQSPRSFQKKTRHYFIAAVERLWDYGMSSSPHVLRNRAQSGSVPQFKKVVFQEFTDGSFTQPLYRGELNEHLGLLGPYIRAEVEDNIMVTFRNQASRPYSFYSSLISYEEDQRQGAEPRKNFVKPNETKTYFWKVQHHMAPTKDEFDCKAWAYFSDVDLEKDVHSGLIGPLLVCHTNTLNPAHGRQVTVQEFALFFTIFDETKSWYFTENMERNCRAPCNIQMEDPTFKENYRFHAINGYIMDTLPGLVMAQDQRIRWYLLSMGSNENIHSIHFSGHVFTVRKKEEYKMALYNLYPGVFETVEMLPSKAGIWRVECLIGEHLHAGMSTLFLVYSNKCQTPLGMASGHIRDFQITASGQYGQWAPKLARLHYSGSINAWSTKEPFSWIKVDLLAPMIIHGIKTQGARQKFSSLYISQFIIMYSLDGKKWQTYRGNSTGTDMVFFGNVDSSGIKHNIFNPPIIARYIRLHPTHYSIRSTLRMELMGCDLNSCSMPLGMESKAISDAQITASSYFTNMFATWSPSKARLHLQGRSNAWRPQVNNPKEWLQVDFQKTMKVTGVTTQGVKSLDTSMYVKEFLISSSQDGHQWTLFFQNGKVKVFQGNQDSFTPVVNSLDPPLLTRYLRIHPQSWEHQIALRMEVLGCEAQDLY

SEQ ID NO: 1149 - DNA, 4371 bp, synthetic construct
  misc_feature 1..4371: note = Variant of human B-domain deleted Factor VIII
  source 1..4371: mol_type = other DNA
atgcagattgaactgtctacctgcttcttcctctgtttgctgaggttctgctttagcgccactagacggtactaccttggcgctgtggagctgtcctgggactatatgcagagtgatttgggagagcttcccgtcgacgcacgatttcctcctcgcgttccaaagtcatttccctttaacacaagcgtggtgtacaagaagacgctcttcgtcgaattcaccgatcacctgttcaatatcgccaaacccagaccaccatggatgggtcttttggggcctaccatacaagcggaggtgtatgacacagttgttatcactctcaagaacatggcttctcatccggtaagtcttcacgcagtgggcgtgtcctactggaaagcttcagaaggagccgagtatgatgatcagacatcccagagggagaaagaagacgacaaggtatttccaggtgggtctcatacctatgtgtggcaagtgctcaaagagaatggccctatggcaagcgatccgccgtgtttgacttacagctacctttcacacgttgacctcgtcaaggacctcaactccgggttgattggagccttgttggtatgcagggaaggatctcttgccaaagagaagacacagaccctccacaagtttatccttctctttgctgtgttcgatgagggcaaaagttggcatagcgaaacgaagaattccctcatgcaggatcgcgacgcagccagcgccagagcttggcccaagatgcacactgtgaacggatatgtcaataggacgcttcctggcttgattgggtgtcatcggaaaagtgtctactggcacgtgatcggaatggggacaacaccagaggtccactccatatttctcgaaggccataccttccttgttcgaaaccacagacaggcatccttggggatctctcccattacctttctcactgcccaaacgctccttatggacttgggtcagttccttctcttttgccatatcccgtcacaccagcatgatggtatggaagcttatgtgaaagtcgacagttgtcctgaggagccacagttgcgcatgaagaataatgaagaagccgaggattacgacgacgatctcaccgattctgagatggacgtggtgaggtttgatgacgacaactctccctccatcattcaagctcggagcgtggcgaagaaacaccccaagacttgggtccactatatagcggcggaagaggaggattgggattacgctcctcttgtattggcaccagatgaccgctcatacaaaagccagtacctcaacaacggaccgcagagaattggccggaagtataagaaagtgcgatttatggcctatacagacgaaacctttaagacaagggaggccatccagcatgagagtgggattttgggacctcttctttacggcgaagttggtgataccctcctcatcatcttcaagaatcaagcttctcgcccctataacatttacccacacgggatcactgacgttaggcctttgtatagcagaagacttcccaaaggcgtgaagcatctcaaagacttccccattttgccaggcgagatctttaagtacaaatggaccgtcacagtggaagatggaccgactaaatcagaccctcgatgccttacgcggtactattcctccttcgtgaatatggagagagatttggcaagcggactcataggaccactcctcatctgttacaaggaatctgtagaccagaggggtaaccagattatgagtgataaacgcaatgtgatcctttttagcgtcttcgacgagaaccggtcctggtacttgaccgagaatatacaaaggttccttcccaaccccgcaggcgttcagttggaagaccctgagtttcaggccagcaatattatgcactcaatcaacggctatgtgtttgatagtctccagctttctgtttgcctccatgaagtagcctattggtacatcttgtcaattggtgctcaaacagacttcctctccgtcttcttctccggctacacctttaagcacaaggcggtgtatgaggacactctcacactctttccattttctggagaaaccgtgttcatgagcatggagaatccaggcctttggatcttgggttgccacaacagtgattttcgcaatcggggaatgactgctctcctcaaagtcagcagctgtgataagaacacaggcgactattacgaagattcttacgaggacataagtgcctactttgactccaagaataacgccattgagcccagatcattctcccagaatcctcccgtgcttaaaaggcatcagcgcgaaatcaccagaactactcttcagtctgatcaagaggagattgactatgacgacaccataagcgtggaaatgaagaaggaggatttcgatatctatgacgaagatgagaaccagtctccgcggagctttcagaagaagacgcgacactacttcattgcagcagtcgaaaggctttgggactacggtatgtcatcatcccctcatgtgttgcgcaatagagctcagagtggaagtgttccacagttcaagaaagtcgtctttcaagagtttacagatggcagcttcacacagcctctctatcggggcgagcttaacgaacatttgggactccttggtccctatatccgagccgaagtggaggacaacattatggttacctttaggaatcaagcctctcgcccctacagcttctactcctccctcatcagttatgaggaggatcagagacaaggcgctgaaccacggaagaactttgtgaaaccgaatgagacgaagacctacttctggaaagtacagcaccacatggcccccacaaaagacgaattcgattgcaaagcatgggcgtatttttcagacgttgacttggagaaagatgtacattcaggacttattggtcctttgttggtgtgtcacactaacactctcaatccagcccatggcaggcaggtgacagtccaggaattcgctcttttctttaccatctttgatgagaccaagtcctggtacttcacggaaaacatggagcgcaattgcagagccccctgtaacatacagatggaggaccctacctttaaggaaaattatcggttccacgcaatcaacggatacattatggatacactccctggccttgtgatggctcaggaccaacgaatcaggtggtacctcctcagcatgggttctaatgagaacatacactccattcacttttcaggacatgtgttcactgtccggaagaaagaagagtataagatggccctctacaatttgtatccaggcgtgtttgagaccgttgaaatgcttccctctaaagctggcatctggagagtagagtgcttgatcggagaacatcttcacgcaggtatgagcaccttgttcctcgtgtacagcaacaaatgtcagaccccacttggcatggccagtggacacattcgcgactttcagatcacagcatctggccagtatggacaatgggccccaaagttggctcgcctccattactccggtagcataaatgcgtggtccactaaagaacctttcagctggattaaggtcgatcttcttgcccccatgatcatccacggcattaagacacagggagcgaggcagaaattctcctccctctacatctcacagttcattattatgtatagtttggacggcaagaagtggcaaacttatagaggtaacagtactggaacagacatggtgttcttcggcaacgttgatagctctggcatcaaacacaacatctttaatcctcccataatagctcggtacatcagattgcatccgacccactacagcattaggagtacactccgaatggagcttatgggttgcgacttgaattcctgttcaatgccactcggaatggagtctaaagccatctctgatgcacagataaccgccagtagctactttacgaacatgtttgctacgtggtcaccctctaaggcaaggcttcatttgcaaggccggtctaatgcctggagacctcaggtgaacaacccgaaagaatggctccaggtggactttcagaagaccatgaaagtaacaggtgtcactactcagggagttaagtccttggatactagcatgtatgtgaaggagttccttatttcctcatcacaagatggccaccagtggaccctattctttcagaatggtaaggtcaaagtgtttcagggcaatcaagacagcttcacacccgtggtgaacagtcttgatcctccactcttgacacgataccttcgaatccatccacagtcttgggagcaccagattgcattgcgcatggaagtacttggatgcgaggctcaggacctctac

SEQ ID NO: 1150 - protein, 1457 aa, synthetic construct
  REGION 1..1457: note = Variant of human B-domain deleted Factor VIII
MQIELSTCFFLCLLRFCFSATRRYYLGAVELSWDYMQSDLGELPVDARFPPRVPKSFPFNTSVVYKKTLFVEFTDHLFNIAKPRPPWMGLLGPTIQAEVYDTVVITLKNMASHPVSLHAVGVSYWKASEGAEYDDQTSQREKEDDKVFPGGSHTYVWQVLKENGPMASDPPCLTYSYLSHVDLVKDLNSGLIGALLVCREGSLAKEKTQTLHKFILLFAVFDEGKSWHSETKNSLMQDRDAASARAWPKMHTVNGYVNRTLPGLIGCHRKSVYWHVIGMGTTPEVHSIFLEGHTFLVRNHRQASLGISPITFLTAQTLLMDLGQFLLFCHIPSHQHDGMEAYVKVDSCPEEPQLRMKNNEEAEDYDDDLTDSEMDVVRFDDDNSPSIIQARSVAKKHPKTWVHYIAAEEEDWDYAPLVLAPDDRSYKSQYLNNGPQRIGRKYKKVRFMAYTDETFKTREAIQHESGILGPLLYGEVGDTLLIIFKNQASRPYNIYPHGITDVRPLYSRRLPKGVKHLKDFPILPGEIFKYKWTVTVEDGPTKSDPRCLTRYYSSFVNMERDLASGLIGPLLICYKESVDQRGNQIMSDKRNVILFSVFDENRSWYLTENIQRFLPNPAGVQLEDPEFQASNIMHSINGYVFDSLQLSVCLHEVAYWYILSIGAQTDFLSVFFSGYTFKHKAVYEDTLTLFPFSGETVFMSMENPGLWILGCHNSDFRNRGMTALLKVSSCDKNTGDYYEDSYEDISAYFDSKNNAIEPRSFSQNPPVLKRHQREITRTTLQSDQEEIDYDDTISVEMKKEDFDIYDEDENQSPRSFQKKTRHYFIAAVERLWDYGMSSSPHVLRNRAQSGSVPQFKKVVFQEFTDGSFTQPLYRGELNEHLGLLGPYIRAEVEDNIMVTFRNQASRPYSFYSSLISYEEDQRQGAEPRKNFVKPNETKTYFWKVQHHMAPTKDEFDCKAWAYFSDVDLEKDVHSGLIGPLLVCHTNTLNPAHGRQVTVQEFALFFTIFDETKSWYFTENMERNCRAPCNIQMEDPTFKENYRFHAINGYIMDTLPGLVMAQDQRIRWYLLSMGSNENIHSIHFSGHVFTVRKKEEYKMALYNLYPGVFETVEMLPSKAGIWRVECLIGEHLHAGMSTLFLVYSNKCQTPLGMASGHIRDFQITASGQYGQWAPKLARLHYSGSINAWSTKEPFSWIKVDLLAPMIIHGIKTQGARQKFSSLYISQFIIMYSLDGKKWQTYRGNSTGTDMVFFGNVDSSGIKHNIFNPPIIARYIRLHPTHYSIRSTLRMELMGCDLNSCSMPLGMESKAISDAQITASSYFTNMFATWSPSKARLHLQGRSNAWRPQVNNPKEWLQVDFQKTMKVTGVTTQGVKSLDTSMYVKEFLISSSQDGHQWTLFFQNGKVKVFQGNQDSFTPVVNSLDPPLLTRYLRIHPQSWEHQIALRMEVLGCEAQDLY

SEQ ID NO: 1151 - DNA, 4371 bp, synthetic construct
  misc_feature 1..4371: note = Variant of human B-domain deleted Factor VIII
  source 1..4371: mol_type = other DNA
atgcagattgaactgtctacctgcttcttcctctgtttgctgaggttctgctttagcgccactagacggtactaccttggcgctgtggagctgtcctgggactatatgcagagtgatttgggagagcttcccgtcgacgcacgatttcctcctcgcgttccaaagtcatttccctttaacacaagcgtggtgtacaagaagacgctcttcgtcgaattcaccgatcacctgttcaatatcgccaaacccagaccaccatggatgggtcttttggggcctaccatacaagcggaggtgtatgacacagttgttatcactctcaagaacatggcttctcatccggtaagtcttcacgcagtgggcgtgtcctactggaaagcttcagaaggagccgagtatgatgatcagacatcccagagggagaaagaagacgacaaggtatttccaggtgggtctcatacctatgtgtggcaagtgctcaaagagaatggccctatggcaagcgatccgccgtgtttgacttacagctacctttcacacgttgacctcgtcaaggacctcaactccgggttgattggagccttgttggtatgcagggaaggatctcttgccaaagagaagacacagaccctccacaagtttatccttctctttgctgtgttcgatgagggcaaaagttggcatagcgaaacgaagaattccctcatgcaggatcgcgacgcagccagcgccagagcttggcccaagatgcacactgtgaacggatatgtcaataggacgcttcctggcttgattgggtgtcatcggaaaagtgtctactggcacgtgatcggaatggggacaacaccagaggtccactccatatttctcgaaggccataccttccttgttcgaaaccacagacaggcatccttggggatctctcccattacctttctcactgcccaaacgctccttatggacttgggtcagttccttctcttttgccatatcccgtcacaccagcatgatggtatggaagcttatgtgaaagtcgacagttgtcctgaggagccacagttgcgcatgaagaataatgaagaagccgaggattacgacgacgatctcaccgattctgagatggacgtggtgaggtttgatgacgacaactctccctccatcattcaagctcggagcgtggcgaagaaacaccccaagacttgggtccactatatagcggcggaagaggaggattgggattacgctcctcttgtattggcaccagatgaccgctcatacaaaagccagtacctcaacaacggaccgcagagaattggccggaagtataagaaagtgcgatttatggcctatacagacgaaacctttaagacaagggaggccatccagcatgagagtgggattttgggacctcttctttacggcgaagttggtgataccctcctcatcatcttcaagaatcaagcttctcgcccctataacatttacccacacgggatcactgacgttaggcctttgtatagcagaagacttcccaaaggcgtgaagcatctcaaagacttccccattttgccaggcgagatctttaagtacaaatggaccgtcacagtggaagatggaccgactaaatcagaccctcgatgccttacgcggtactattcctccttcgtgaatatggagagagatttggcaagcggactcataggaccactcctcatctgttacaaggaatctgtagaccagaggggtaaccagattatgagtgataaacgcaatgtgatcctttttagcgtcttcgacgagaaccggtcctggtacttgaccgagaatatacaaaggttccttcccaaccccgcaggcgttcagttggaagaccctgagtttcaggccagcaatattatgcactcaatcaacggctatgtgtttgatagtctccagctttctgtttgcctccatgaagtagcctattggtacatcttgtcaattggtgctcaaacagacttcctctccgtcttcttctccggctacacctttaagcacaagatggtgtatgaggacactctcacactctttccattttctggagaaaccgtgttcatgagcatggagaatccaggcctttggatcttgggttgccacaacagtgattttcgcaatcggggaatgactgctctcctcaaagtcagcagctgtgataagaacacaggcgactattacgaagattcttacgaggacataagtgcctactttgactccaagaataacgccattgagcccagatcattctcccagaatcctcccgtgcttaaaaggcatcagcgcgaaatcaccagaactactcttcagtctgatcaagaggagattgactatgacgacaccataagcgtggaaatgaagaaggaggatttcgatatctatgacgaagatgagaaccagtctccgcggagctttcagaagaagacgcgacactacttcattgcagcagtcgaaaggctttgggactacggtatgtcatcatccgggcatgtgttgcgcaatagagctcagagtggaagtgttccacagttcaagaaagtcgtctttcaagagtttacagatggcagcttcacacagcctctctatcggggcgagcttaacgaacatttgggactccttggtccctatatccgagccgaagtggaggacaacattatggttacctttaggaatcaagcctctcgcccctacagcttctactcctccctcatcagttatgaggaggatcagagacaaggcgctgaaccacggaagaactttgtgaaaccgaatgagacgaagacctacttctggaaagtacagcaccacatggcccccacaaaagacgaattcgattgcaaagcatgggcgtatttttcagacgttgacttggagaaagatgtacattcaggacttattggtcctttgttggtgtgtcacactaacactctcaatccagcccatggcaggcaggtgacagtccaggaattcgctcttttctttaccatctttgatgagaccaagtcctggtacttcacggaaaacatggagcgcaattgcagagccccctgtaacatacagatggaggaccctacctttaaggaaaattatcggttccacgcaatcaacggatacattatggatacactccctggccttgtgatggctcaggaccaacgaatcaggtggtacctcctcagcatgggttctaatgagaacatacactccattcacttttcaggacatgtgttcactgtccggaagaaagaagagtataagatggccctctacaatttgtatccaggcgtgtttgagaccgttgaaatgcttccctctaaagctggcatctggagagtagagtgcttgatcggagaacatcttcacgcaggtatgagcaccttgttcctcgtgtacagcaacaaatgtcagaccccacttggcatggccagtggacacattcgcgactttcagatcacagcatctggccagtatggacaatgggccccaaagttggctcgcctccattactccggtagcataaatgcgtggtccactaaagaacctttcagctggattaaggtcgatcttcttgcccccatgatcatccacggcattaagacacagggagcgaggcagaaattctcctccctctacatctcacagttcattattatgtatagtttggacggcaagaagtggcaaacttatagaggtaacagtactggaacagacatggtgttcttcggcaacgttgatagctctggcatcaaacacaacatctttaatcctcccataatagctcggtacatcagattgcatccgacccactacagcattaggagtacactccgaatggagcttatgggttgcgacttgaattcctgttcaatgccactcggaatggagtctaaagccatctctgatgcacagataaccgccagtagctactttacgaacatgtttgctacgtggtcaccctctaaggcaaggcttcatttgcaaggccggtctaatgcctggagacctcaggtgaacaacccgaaagaatggctccaggtggactttcagaagaccatgaaagtaacaggtgtcactactcagggagttaagtccttggatactagcatgtatgtgaaggagttccttatttcctcatcacaagatggccaccagtggaccctcttctttcagaatggtaaggtcaaagtgtttcagggcaatcaagacagcttcacacccgtggtgaacagtcttgatcctccactcttgacacgataccttcgaatccatccacagtcttgggagcaccagattgcattgcgcatggaagtacttggatgcgaggctcaggacctctac

SEQ ID NO: 1152 - protein, 1457 aa, synthetic construct
  REGION 1..1457: note = Variant of human B-domain deleted Factor VIII
MQIELSTCFFLCLLRFCFSATRRYYLGAVELSWDYMQSDLGELPVDARFPPRVPKSFPFNTSVVYKKTLFVEFTDHLFNIAKPRPPWMGLLGPTIQAEVYDTVVITLKNMASHPVSLHAVGVSYWKASEGAEYDDQTSQREKEDDKVFPGGSHTYVWQVLKENGPMASDPPCLTYSYLSHVDLVKDLNSGLIGALLVCREGSLAKEKTQTLHKFILLFAVFDEGKSWHSETKNSLMQDRDAASARAWPKMHTVNGYVNRTLPGLIGCHRKSVYWHVIGMGTTPEVHSIFLEGHTFLVRNHRQASLGISPITFLTAQTLLMDLGQFLLFCHIPSHQHDGMEAYVKVDSCPEEPQLRMKNNEEAEDYDDDLTDSEMDVVRFDDDNSPSIIQARSVAKKHPKTWVHYIAAEEEDWDYAPLVLAPDDRSYKSQYLNNGPQRIGRKYKKVRFMAYTDETFKTREAIQHESGILGPLLYGEVGDTLLIIFKNQASRPYNIYPHGITDVRPLYSRRLPKGVKHLKDFPILPGEIFKYKWTVTVEDGPTKSDPRCLTRYYSSFVNMERDLASGLIGPLLICYKESVDQRGNQIMSDKRNVILFSVFDENRSWYLTENIQRFLPNPAGVQLEDPEFQASNIMHSINGYVFDSLQLSVCLHEVAYWYILSIGAQTDFLSVFFSGYTFKHKMVYEDTLTLFPFSGETVFMSMENPGLWILGCHNSDFRNRGMTALLKVSSCDKNTGDYYEDSYEDISAYFDSKNNAIEPRSFSQNPPVLKRHQREITRTTLQSDQEEIDYDDTISVEMKKEDFDIYDEDENQSPRSFQKKTRHYFIAAVERLWDYGMSSSGHVLRNRAQSGSVPQFKKVVFQEFTDGSFTQPLYRGELNEHLGLLGPYIRAEVEDNIMVTFRNQASRPYSFYSSLISYEEDQRQGAEPRKNFVKPNETKTYFWKVQHHMAPTKDEFDCKAWAYFSDVDLEKDVHSGLIGPLLVCHTNTLNPAHGRQVTVQEFALFFTIFDETKSWYFTENMERNCRAPCNIQMEDPTFKENYRFHAINGYIMDTLPGLVMAQDQRIRWYLLSMGSNENIHSIHFSGHVFTVRKKEEYKMALYNLYPGVFETVEMLPSKAGIWRVECLIGEHLHAGMSTLFLVYSNKCQTPLGMASGHIRDFQITASGQYGQWAPKLARLHYSGSINAWSTKEPFSWIKVDLLAPMIIHGIKTQGARQKFSSLYISQFIIMYSLDGKKWQTYRGNSTGTDMVFFGNVDSSGIKHNIFNPPIIARYIRLHPTHYSIRSTLRMELMGCDLNSCSMPLGMESKAISDAQITASSYFTNMFATWSPSKARLHLQGRSNAWRPQVNNPKEWLQVDFQKTMKVTGVTTQGVKSLDTSMYVKEFLISSSQDGHQWTLFFQNGKVKVFQGNQDSFTPVVNSLDPPLLTRYLRIHPQSWEHQIALRMEVLGCEAQDLY

SEQ ID NO: 1153 - DNA, 4371 bp, synthetic construct
  misc_feature 1..4371: note = Variant of human B-domain deleted Factor VIII
  source 1..4371: mol_type = other DNA
atgcagattgaactgtctacctgcttcttcctctgtttgctgaggttctgctttagcgccactagacggtactaccttggcgctgtggagctgtcctgggactatatgcagagtgatttgggagagcttcccgtcgacgcacgatttcctcctcgcgttccaaagtcatttccctttaacacaagcgtggtgtacaagaagacgctcttcgtcgaattcaccgatcacctgttcaatatcgccaaacccagaccaccatggatgggtcttttggggcctaccatacaagcggaggtgtatgacacagttgttatcactctcaagaacatggcttctcatccggtaagtcttcacgcagtgggcgtgtcctactggaaagcttcagaaggagccgagtatgatgatcagacatcccagagggagaaagaagacgacaaggtatttccaggtgggtctcatacctatgtgtggcaagtgctcaaagagaatggccctatggcaagcgatccgccgtgtttgacttacagctacctttcacacgttgacctcgtcaaggacctcaactccgggttgattggagccttgttggtatgcagggaaggatctcttgccaaagagaagacacagaccctccacaagtttatccttctctttgctgtgttcgatgagggcaaaagttggcatagcgaaacgaagaattccctcatgcaggatcgcgacgcagccagcgccagagcttggcccaagatgcacactgtgaacggatatgtcaataggacgcttcctggcttgattgggtgtcatcggaaaagtgtctactggcacgtgatcggaatggggacaacaccagaggtccactccatatttctcgaaggccataccttccttgttcgaaaccacagacaggcatccttggggatctctcccattacctttctcactgcccaaacgctccttatggacttgggtcagttccttctcttttgccatatcccgtcacaccagcatgatggtatggaagcttatgtgaaagtcgacagttgtcctgaggagccacagttgcgcatgaagaataatgaagaagccgaggattacgacgacgatctcaccgattctgagatggacgtggtgaggtttgatgacgacaactctccctccatcattcaagctcggagcgtggcgaagaaacaccccaagacttgggtccactatatagcggcggaagaggaggattgggattacgctcctcttgtattggcaccagatgaccgctcatacaaaagccagtacctcaacaacggaccgcagagaattggccggaagtataagaaagtgcgatttatggcctatacagacgaaacctttaagacaagggaggccatccagcatgagagtgggattttgggacctcttctttacggcgaagttggtgataccctcctcatcatcttcaagaatcaagcttctcgcccctataacatttacccacacgggatcactgacgttaggcctttgtatagcagaagacttcccaaaggcgtgaagcatctcaaagacttccccattttgccaggcgagatctttaagtacaaatggaccgtcacagtggaagatggaccgactaaatcagaccctcgatgccttacgcggtactattcctccttcgtgaatatggagagagatttggcaagcggactcataggaccactcctcatctgttacaaggaatctgtagaccagaggggtaaccagattatgagtgataaacgcaatgtgatcctttttagcgtcttcgacgagaaccggtcctggtacttgaccgagaatatacaaaggttccttcccaaccccgcaggcgttcagttggaagaccctgagtttcaggccagcaatattatgcactcaatcaacggctatgtgtttgatagtctccagctttctgtttgcctccatgaagtagcctattggtacatcttgtcaattggtgctcaaacagacttcctctccgtcttcttctccggctacacctttaagcacaagatggtgtatgaggacactctcacactctttccattttctggagaaaccgtgttcatgagcatggagaatccaggcctttggatcttgggttgccacaacagtgattttcgcaatcggggaatgactgctctcctcaaagtcagcagctgtgataagaacacaggcgactattacgaagattcttacgaggacataagtgcctactttgactccaagaataacgccattgagcccagatcattctcccagaatcctcccgtgcttaaaaggcatcagcgcgaaatcaccagaactactcttcagtctgatcaagaggagattgactatgacgacaccataagcgtggaaatgaagaaggaggatttcgatatctatgacgaagatgagaaccagtctccgcggagctttcagaagaagacgcgacactacttcattgcagcagtcgaaaggctttgggactacggtatgtcatcatcccctcatgtgttgcgcaatagagctcagagtggaagtgttccacagttcaagaaagtcgtctttcaagagtttacagatggcagcttcacacagcctctctatcggggcgagcttaacgaacatttgggactccttggtccctatatccgagccgaagtggaggacaacattatggttacctttaggaatcaagcctctcgcccctacagcttctactcctccctcatcagttatgaggaggatcagagacaaggcgctgaaccacggaagaactttgtgaaaccgaatgagacgaagacctacttctggaaagtacagcaccacatggcccccacaaaagacgaattcgattgcaaagcatgggcgtatttttcagacgttgacttggagaaagatgtacattcaggacttattggtcctttgttggtgtgtcacactaacactctcaatccagcccatggcaggcaggtgacagtccaggaattcgctcttttctttaccatctttgatgagaccaagtcctggtacttcacggaaaacatggagcgcaattgcagagccccctgtaacatacagatggaggaccctacctttaaggaaaattatcggttccacgcaatcaacggatacattatggatacactccctggccttgtgatggctcaggaccaacgaatcaggtggtacctcctcagcatgggttctaatgagaacatacactccattcacttttcaggacatgtgttcactgtccggaagaaagaagagtataagatggccctctacaatttgtatccaggcgtgtttgagaccgttgaaatgcttccctctaaagctggcatctggagagtagagtgcttgatcggagaacatcttcacgcaggtatgagcaccttgttcctcgtgtacagcaacaaatgtcagaccccacttggcatggccagtggacacattcgcgacaggcagatcacagcatctggccagtatggacaatgggccccaaagttggctcgcctccattactccggtagcataaatgcgtggtccactaaagaacctttcagctggattaaggtcgatcttcttgcccccatgatcatccacggcattaagacacagggagcgaggcagaaattctcctccctctacatctcacagttcattattatgtatagtttggacggcaagaagtggcaaacttatagaggtaacagtactggaacagacatggtgttcttcggcaacgttgatagctctggcatcaaacacaacatctttaatcctcccataatagctcggtacatcagattgcatccgacccactacagcattaggagtacactccgaatggagcttatgggttgcgacttgaattcctgttcaatgccactcggaatggagtctaaagccatctctgatgcacagataaccgccagtagctactttacgaacatgtttgctacgtggtcaccctctaaggcaaggcttcatttgcaaggccggtctaatgcctggagacctcaggtgaacaacccgaaagaatggctccaggtggactttcagaagaccatgaaagtaacaggtgtcactactcagggagttaagtccttggatactagcatgtatgtgaaggagttccttatttcctcatcacaagatggccaccagtggaccctcttctttcagaatggtaaggtcaaagtgtttcagggcaatcaagacagcttcacacccgtggtgaacagtcttgatcctccactcttgacacgataccttcgaatccatccacagtcttgggagcaccagattgcattgcgcatggaagtacttggatgcgaggctcaggacctctac

SEQ ID NO: 1154 - protein, 1457 aa, synthetic construct
  REGION 1..1457: note = Variant of human B-domain deleted Factor VIII
MQIELSTCFFLCLLRFCFSATRRYYLGAVELSWDYMQSDLGELPVDARFPPRVPKSFPFNTSVVYKKTLFVEFTDHLFNIAKPRPPWMGLLGPTIQAEVYDTVVITLKNMASHPVSLHAVGVSYWKASEGAEYDDQTSQREKEDDKVFPGGSHTYVWQVLKENGPMASDPPCLTYSYLSHVDLVKDLNSGLIGALLVCREGSLAKEKTQTLHKFILLFAVFDEGKSWHSETKNSLMQDRDAASARAWPKMHTVNGYVNRTLPGLIGCHRKSVYWHVIGMGTTPEVHSIFLEGHTFLVRNHRQASLGISPITFLTAQTLLMDLGQFLLFCHIPSHQHDGMEAYVKVDSCPEEPQLRMKNNEEAEDYDDDLTDSEMDVVRFDDDNSPSIIQARSVAKKHPKTWVHYIAAEEEDWDYAPLVLAPDDRSYKSQYLNNGPQRIGRKYKKVRFMAYTDETFKTREAIQHESGILGPLLYGEVGDTLLIIFKNQASRPYNIYPHGITDVRPLYSRRLPKGVKHLKDFPILPGEIFKYKWTVTVEDGPTKSDPRCLTRYYSSFVNMERDLASGLIGPLLICYKESVDQRGNQIMSDKRNVILFSVFDENRSWYLTENIQRFLPNPAGVQLEDPEFQASNIMHSINGYVFDSLQLSVCLHEVAYWYILSIGAQTDFLSVFFSGYTFKHKMVYEDTLTLFPFSGETVFMSMENPGLWILGCHNSDFRNRGMTALLKVSSCDKNTGDYYEDSYEDISAYFDSKNNAIEPRSFSQNPPVLKRHQREITRTTLQSDQEEIDYDDTISVEMKKEDFDIYDEDENQSPRSFQKKTRHYFIAAVERLWDYGMSSSPHVLRNRAQSGSVPQFKKVVFQEFTDGSFTQPLYRGELNEHLGLLGPYIRAEVEDNIMVTFRNQASRPYSFYSSLISYEEDQRQGAEPRKNFVKPNETKTYFWKVQHHMAPTKDEFDCKAWAYFSDVDLEKDVHSGLIGPLLVCHTNTLNPAHGRQVTVQEFALFFTIFDETKSWYFTENMERNCRAPCNIQMEDPTFKENYRFHAINGYIMDTLPGLVMAQDQRIRWYLLSMGSNENIHSIHFSGHVFTVRKKEEYKMALYNLYPGVFETVEMLPSKAGIWRVECLIGEHLHAGMSTLFLVYSNKCQTPLGMASGHIRDRQITASGQYGQWAPKLARLHYSGSINAWSTKEPFSWIKVDLLAPMIIHGIKTQGARQKFSSLYISQFIIMYSLDGKKWQTYRGNSTGTDMVFFGNVDSSGIKHNIFNPPIIARYIRLHPTHYSIRSTLRMELMGCDLNSCSMPLGMESKAISDAQITASSYFTNMFATWSPSKARLHLQGRSNAWRPQVNNPKEWLQVDFQKTMKVTGVTTQGVKSLDTSMYVKEFLISSSQDGHQWTLFFQNGKVKVFQGNQDSFTPVVNSLDPPLLTRYLRIHPQSWEHQIALRMEVLGCEAQDLY

SEQ ID NO: 1155 - DNA, 4371 bp, synthetic construct
  misc_feature 1..4371: note = Variant of human B-domain deleted Factor VIII
  source 1..4371: mol_type = other DNA
atgcagattgaactgtctacctgcttcttcctctgtttgctgaggttctgctttagcgccactagacggtactaccttggcgctgtggagctgtcctgggactatatgcagagtgatttgggagagcttcccgtcgacgcacgatttcctcctcgcgttccaaagtcatttccctttaacacaagcgtggtgtacaagaagacgctcttcgtcgaattcaccgatcacctgttcaatatcgccaaacccagaccaccatggatgggtcttttggggcctaccatacaagcggaggtgtatgacacagttgttatcactctcaagaacatggcttctcatccggtaagtcttcacgcagtgggcgtgtcctactggaaagcttcagaaggagccgagtatgatgatcagacatcccagagggagaaagaagacgacaaggtatttccaggtgggtctcatacctatgtgtggcaagtgctcaaagagaatggccctatggcaagcgatccgccgtgtttgacttacagctacctttcacacgttgacctcgtcaaggacctcaactccgggttgattggagccttgttggtatgcagggaaggatctcttgccaaagagaagacacagaccctccacaagtttatccttctctttgctgtgttcgatgagggcaaaagttggcatagcgaaacgaagaattccctcatgcaggatcgcgacgcagccagcgccagagcttggcccaagatgcacactgtgaacggatatgtcaataggacgcttcctggcttgattgggtgtcatcggaaaagtgtctactggcacgtgatcggaatggggacaacaccagaggtccactccatatttctcgaaggccataccttccttgttcgaaaccacagacaggcatccttggggatctctcccattacctttctcactgcccaaacgctccttatggacttgggtcagttccttctcttttgccatatcccgtcacaccagcatgatggtatggaagcttatgtgaaagtcgacagttgtcctgaggagccacagttgcgcatgaagaataatgaagaagccgaggattacgacgacgatctcaccgattctgagatggacgtggtgaggtttgatgacgacaactctccctccatcattcaagctcggagcgtggcgaagaaacaccccaagacttgggtccactatatagcggcggaagaggaggattgggattacgctcctcttgtattggcaccagatgaccgctcatacaaaagccagtacctcaacaacggaccgcagagaattggccggaagtataagaaagtgcgatttatggcctatacagacgaaacctttaagacaagggaggccatccagcatgagagtgggattttgggacctcttctttacggcgaagttggtgataccctcctcatcatcttcaagaatcaagcttctcgcccctataacatttacccacacgggatcactgacgttaggcctttgtatagcagaagacttcccaaaggcgtgaagcatctcaaagacttccccattttgccaggcgagatctttaagtacaaatggaccgtcacagtggaagatggaccgactaaatcagaccctcgatgccttacgcggtactattcctccttcgtgaatatggagagagatttggcaagcggactcataggaccactcctcatctgttacaaggaatctgtagaccagaggggtaaccagattatgagtgataaacgcaatgtgatcctttttagcgtcttcgacgagaaccggtcctggtacttgaccgagaatatacaaaggttccttcccaaccccgcaggcgttcagttggaagaccctgagtttcaggccagcaatattatgcactcaatcaacggctatgtgtttgatagtctccagctttctgtttgcctccatgaagtagcctattggtacatcttgtcaattggtgctcaaacagacttcctctccgtcttcttctccggctacacctttaagcacaagtgtgtgtatgaggacactctcacactctttccattttctggagaaaccgtgttcatgagcatggagaatccaggcctttggatcttgggttgccacaacagtgattttcgcaatcggggaatgactgctctcctcaaagtcagcagctgtgataagaacacaggcgactattacgaagattcttacgaggacataagtgcctactttgactccaagaataacgccattgagcccagatcattctcccagaatcctcccgtgcttaaaaggcatcagcgcgaaatcaccagaactactcttcagtctgatcaagaggagattgactatgacgacaccataagcgtggaaatgaagaaggaggatttcgatatctatgacgaagatgagaaccagtctccgcggagctttcagaagaagacgcgacactacttcattgcagcagtcgaaaggctttgggactacggtatgtcatcatcccctcatgtgttgcgcaatagagctcagagtggaagtgttccacagttcaagaaagtcgtctttcaagagtttacagatggcagcttcacacagcctctctatcggggcgagcttaacgaacatttgggactccttggtccctatatccgagccgaagtggaggacaacattatggttacctttaggaatcaagcctctcgcccctacagcttctactcctccctcatcagttatgaggaggatcagagacaaggcgctgaaccacggaagaactttgtgaaaccgaatgagacgaagacctacttctggaaagtacagcaccacatggcccccacaaaagacgaattcgattgcaaagcatgggcgtatttttcagacgttgacttggagaaagatgtacattcaggacttattggtcctttgttggtgtgtcacactaacactctcaatccagcccatggcaggcaggtgacagtccaggaattcgctcttttctttaccatctttgatgagaccaagtcctggtacttcacggaaaacatggagcgcaattgcagagccccctgtaacatacagatggaggaccctacctttaaggaaaattatcggttccacgcaatcaacggatacattatggatacactccctggccttgtgatggctcaggaccaacgaatcaggtggtacctcctcagcatgggttctaatgagaacatacactccattcacttttcaggacatgtgttcactgtccggaagaaagaagagtataagatggccctctacaatttgtatccaggcgtgtttgagaccgttgaaatgcttccctctaaagctggcatctggagagtagagtgcttgatcggagaacatcttcacgcaggtatgagcaccttgttcctcgtgtacagcaacaaatgtcagaccccacttggcatggccagtggacacattcgcgactttcagatcacagcatctggccagtatggacaatgggccccaaagttggctcgcctccattactccggtagcataaatgcgtggtccactaaagaacctttcagctggattaaggtcgatcttcttgcccccatgatcatccacggcattaagacacagggagcgaggcagaaattctcctccctctacatctcacagttcattattatgtatagtttggacggcaagaagtggcaaacttatagaggtaacagtactggaacagacatggtgttcttcggcaacgttgatagctctggcatcaaacacaacatctttaatcctcccataatagctcggtacatcagattgcatccgacccactacagcattaggagtacactccgaatggagcttatgggttgcgacttgaattcctgttcaatgccactcggaatggagtctaaagccatctctgatgcacagataaccgccagtagctactttacgaacatgtttgctacgtggtcaccctctaaggcaaggcttcatttgcaaggccggtctaatgcctggagacctcaggtgaacaacccgaaagaatggctccaggtggactttcagaagaccatgaaagtaacaggtgtcactactcagggagttaagtccttggatactagcatgtatgtgaaggagttccttatttcctcatcacaagatggccaccagtggaccctcttctttcagaatggtaaggtcaaagtgtttcagggcaatcaagacagcttcacacccgtggtgaacagtcttgatcctccactcttgacacgataccttcgaatccatccacagtcttgggagcaccagattgcattgcgcatggaagtacttggatgcgaggctcaggacctctac

SEQ ID NO: 1156 - protein, 1457 aa, synthetic construct
  REGION 1..1457: note = Variant of human B-domain deleted Factor VIII
MQIELSTCFFLCLLRFCFSATRRYYLGAVELSWDYMQSDLGELPVDARFPPRVPKSFPFNTSVVYKKTLFVEFTDHLFNIAKPRPPWMGLLGPTIQAEVYDTVVITLKNMASHPVSLHAVGVSYWKASEGAEYDDQTSQREKEDDKVFPGGSHTYVWQVLKENGPMASDPPCLTYSYLSHVDLVKDLNSGLIGALLVCREGSLAKEKTQTLHKFILLFAVFDEGKSWHSETKNSLMQDRDAASARAWPKMHTVNGYVNRTLPGLIGCHRKSVYWHVIGMGTTPEVHSIFLEGHTFLVRNHRQASLGISPITFLTAQTLLMDLGQFLLFCHIPSHQHDGMEAYVKVDSCPEEPQLRMKNNEEAEDYDDDLTDSEMDVVRFDDDNSPSIIQARSVAKKHPKTWVHYIAAEEEDWDYAPLVLAPDDRSYKSQYLNNGPQRIGRKYKKVRFMAYTDETFKTREAIQHESGILGPLLYGEVGDTLLIIFKNQASRPYNIYPHGITDVRPLYSRRLPKGVKHLKDFPILPGEIFKYKWTVTVEDGPTKSDPRCLTRYYSSFVNMERDLASGLIGPLLICYKESVDQRGNQIMSDKRNVILFSVFDENRSWYLTENIQRFLPNPAGVQLEDPEFQASNIMHSINGYVFDSLQLSVCLHEVAYWYILSIGAQTDFLSVFFSGYTFKHKCVYEDTLTLFPFSGETVFMSMENPGLWILGCHNSDFRNRGMTALLKVSSCDKNTGDYYEDSYEDISAYFDSKNNAIEPRSFSQNPPVLKRHQREITRTTLQSDQEEIDYDDTISVEMKKEDFDIYDEDENQSPRSFQKKTRHYFIAAVERLWDYGMSSSPHVLRNRAQSGSVPQFKKVVFQEFTDGSFTQPLYRGELNEHLGLLGPYIRAEVEDNIMVTFRNQASRPYSFYSSLISYEEDQRQGAEPRKNFVKPNETKTYFWKVQHHMAPTKDEFDCKAWAYFSDVDLEKDVHSGLIGPLLVCHTNTLNPAHGRQVTVQEFALFFTIFDETKSWYFTENMERNCRAPCNIQMEDPTFKENYRFHAINGYIMDTLPGLVMAQDQRIRWYLLSMGSNENIHSIHFSGHVFTVRKKEEYKMALYNLYPGVFETVEMLPSKAGIWRVECLIGEHLHAGMSTLFLVYSNKCQTPLGMASGHIRDFQITASGQYGQWAPKLARLHYSGSINAWSTKEPFSWIKVDLLAPMIIHGIKTQGARQKFSSLYISQFIIMYSLDGKKWQTYRGNSTGTDMVFFGNVDSSGIKHNIFNPPIIARYIRLHPTHYSIRSTLRMELMGCDLNSCSMPLGMESKAISDAQITASSYFTNMFATWSPSKARLHLQGRSNAWRPQVNNPKEWLQVDFQKTMKVTGVTTQGVKSLDTSMYVKEFLISSSQDGHQWTLFFQNGKVKVFQGNQDSFTPVVNSLDPPLLTRYLRIHPQSWEHQIALRMEVLGCEAQDLY

SEQ ID NO: 1157 - DNA, 4371 bp, synthetic construct
  misc_feature 1..4371: note = Variant of human B-domain deleted Factor VIII
  source 1..4371: mol_type = other DNA
atgcagattgaactgtctacctgcttcttcctctgtttgctgaggttctgctttagcgccactagacggtactaccttggcgctgtggagctgtcctgggactatatgcagagtgatttgggagagcttcccgtcgacgcacgatttcctcctcgcgttccaaagtcatttccctttaacacaagcgtggtgtacaagaagacgctcttcgtcgaattcaccgatcacctgttcaatatcgccaaacccagaccaccatggatgggtcttttggggcctaccatacaagcggaggtgtatgacacagttgttatcactctcaagaacatggcttctcatccggtaagtcttcacgcagtgggcgtgtcctactggaaagcttcagaaggagccgagtatgatgatcagacatcccagagggagaaagaagacgacaaggtatttccaggtgggtctcatacctatgtgtggcaagtgctcaaagagaatggccctatggcaagcgatccgccgtgtttgacttacagctacctttcacacgttgacctcgtcaaggacctcaactccgggttgattggagccttgttggtatgcagggaaggatctcttgccaaagagaagacacagaccctccacaagtttatccttctctttgctgtgttcgatgagggcaaaagttggcatagcgaaacgaagaattccctcatgcaggatcgcgacgcagccagcgccagagcttggcccaagatgcacactgtgaacggatatgtcaataggacgcttcctggcttgattgggtgtcatcggaaaagtgtctactggcacgtgatcggaatggggacaacaccagaggtccactccatatttctcgaaggccataccttccttgttcgaaaccacagacaggcatccttggggatctctcccattacctttctcactgcccaaacgctccttatggacttgggtcagttccttctccagtgccatatcccgtcacaccagcatgatggtatggaagcttatgtgaaagtcgacagttgtcctgaggagccacagttgcgcatgaagaataatgaagaagccgaggattacgacgacgatctcaccgattctgagatggacgtggtgaggtttgatgacgacaactctccctccatcattcaagctcggagcgtggcgaagaaacaccccaagacttgggtccactatatagcggcggaagaggaggattgggattacgctcctcttgtattggcaccagatgaccgctcatacaaaagccagtacctcaacaacggaccgcagagaattggccggaagtataagaaagtgcgatttatggcctatacagacgaaacctttaagacaagggaggccatccagcatgagagtgggattttgggacctcttctttacggcgaagttggtgataccctcctcatcatcttcaagaatcaagcttctcgcccctataacatttacccacacgggatcactgacgttaggcctttgtatagcagaagacttcccaaaggcgtgaagcatctcaaagacttccccattttgccaggcgagatctttaagtacaaatggaccgtcacagtggaagatggaccgactaaatcagaccctcgatgccttacgcggtactattcctccttcgtgaatatggagagagatttggcaagcggactcataggaccactcctcatctgttacaaggaatctgtagaccagaggggtaaccagattatgagtgataaacgcaatgtgatcctttttagcgtcttcgacgagaaccggtcctggtacttgaccgagaatatacaaaggttccttcccaaccccgcaggcgttcagttggaagaccctgagtttcaggccagcaatattatgcactcaatcaacggctatgtgtttgatagtctccagctttctgtttgcctccatgaagtagcctattggtacatcttgtcaattggtgctcaaacagacttcctctccgtcttcttctccggctacacctttaagcacaagatggtgtatgaggacactctcacactctttccattttctggagaaaccgtgttcatgagcatggagaatccaggcctttggatcttgggttgccacaacagtgattttcgcaatcggggaatgactgctctcctcaaagtcagcagctgtgataagaacacaggcgactattacgaagattcttacgaggacataagtgcctactttgactccaagaataacgccattgagcccagatcattctcccagaatcctcccgtgcttaaaaggcatcagcgcgaaatcaccagaactactcttcagtctgatcaagaggagattgactatgacgacaccataagcgtggaaatgaagaaggaggatttcgatatctatgacgaagatgagaaccagtctccgcggagctttcagaagaagacgcgacactacttcattgcagcagtcgaaaggctttgggactacggtatgtcatcatcccctcatgtgttgcgcaatagagctcagagtggaagtgttccacagttcaagaaagtcgtctttcaagagtttacagatggcagcttcacacagcctctctatcggggcgagcttaacgaacatttgggactccttggtccctatatccgagccgaagtggaggacaacattatggttacctttaggaatcaagcctctcgcccctacagcttctactcctccctcatcagttatgaggaggatcagagacaaggcgctgaaccacggaagaactttgtgaaaccgaatgagacgaagacctacttctggaaagtacagcaccacatggcccccacaaaagacgaattcgattgcaaagcatgggcgtatttttcagacgttgacttggagaaagatgtacattcaggacttattggtcctttgttggtgtgtcacactaacactctcaatccagcccatggcaggcaggtgacagtccaggaattcgctcttttctttaccatctttgatgagaccaagtcctggtacttcacggaaaacatggagcgcaattgcagagccccctgtaacatacagatggaggaccctacctttaaggaaaattatcggttccacgcaatcaacggatacattatggatacactccctggccttgtgatggctcaggaccaacgaatcaggtggtacctcctcagcatgggttctaatgagaacatacactccattcacttttcaggacatgtgttcactgtccggaagaaagaagagtataagatggccctctacaatttgtatccaggcgtgtttgagaccgttgaaatgcttccctctaaagctggcatctggagagtagagtgcttgatcggagaacatcttcacgcaggtatgagcaccttgttcctcgtgtacagcaacaaatgtcagaccccacttggcatggccagtggacacattcgcgactttcagatcacagcatctggccagtatggacaatgggccccaaagttggctcgcctccattactccggtagcataaatgcgtggtccactaaagaacctttcagctggattaaggtcgatcttcttgcccccatgatcatccacggcattaagacacagggagcgaggcagaaattctcctccctctacatctcacagttcattattatgtatagtttggacggcaagaagtggcaaacttatagaggtaacagtactggaacagacatggtgttcttcggcaacgttgatagctctggcatcaaacacaacatctttaatcctcccataatagctcggtacatcagattgcatccgacccactacagcattaggagtacactccgaatggagcttatgggttgcgacttgaattcctgttcaatgccactcggaatggagtctaaagccatctctgatgcacagataaccgccagtagctactttacgaacatgtttgctacgtggtcaccctctaaggcaaggcttcatttgcaaggccggtctaatgcctggagacctcaggtgaacaacccgaaagaatggctccaggtggactttcagaagaccatgaaagtaacaggtgtcactactcagggagttaagtccttggatactagcatgtatgtgaaggagttccttatttcctcatcacaagatggccaccagtggaccctcttctttcagaatggtaaggtcaaagtgtttcagggcaatcaagacagcttcacacccgtggtgaacagtcttgatcctccactcttgacacgataccttcgaatccatccacagtcttgggagcaccagattgcattgcgcatggaagtacttggatgcgaggctcaggacctctac

SEQ ID NO: 1158 - protein, 1457 aa, synthetic construct
  REGION 1..1457: note = Variant of human B-domain deleted Factor VIII
MQIELSTCFFLCLLRFCFSATRRYYLGAVELSWDYMQSDLGELPVDARFPPRVPKSFPFNTSVVYKKTLFVEFTDHLFNIAKPRPPWMGLLGPTIQAEVYDTVVITLKNMASHPVSLHAVGVSYWKASEGAEYDDQTSQREKEDDKVFPGGSHTYVWQVLKENGPMASDPPCLTYSYLSHVDLVKDLNSGLIGALLVCREGSLAKEKTQTLHKFILLFAVFDEGKSWHSETKNSLMQDRDAASARAWPKMHTVNGYVNRTLPGLIGCHRKSVYWHVIGMGTTPEVHSIFLEGHTFLVRNHRQASLGISPITFLTAQTLLMDLGQFLLQCHIPSHQHDGMEAYVKVDSCPEEPQLRMKNNEEAEDYDDDLTDSEMDVVRFDDDNSPSIIQARSVAKKHPKTWVHYIAAEEEDWDYAPLVLAPDDRSYKSQYLNNGPQRIGRKYKKVRFMAYTDETFKTREAIQHESGILGPLLYGEVGDTLLIIFKNQASRPYNIYPHGITDVRPLYSRRLPKGVKHLKDFPILPGEIFKYKWTVTVEDGPTKSDPRCLTRYYSSFVNMERDLASGLIGPLLICYKESVDQRGNQIMSDKRNVILFSVFDENRSWYLTENIQRFLPNPAGVQLEDPEFQASNIMHSINGYVFDSLQLSVCLHEVAYWYILSIGAQTDFLSVFFSGYTFKHKMVYEDTLTLFPFSGETVFMSMENPGLWILGCHNSDFRNRGMTALLKVSSCDKNTGDYYEDSYEDISAYFDSKNNAIEPRSFSQNPPVLKRHQREITRTTLQSDQEEIDYDDTISVEMKKEDFDIYDEDENQSPRSFQKKTRHYFIAAVERLWDYGMSSSPHVLRNRAQSGSVPQFKKVVFQEFTDGSFTQPLYRGELNEHLGLLGPYIRAEVEDNIMVTFRNQASRPYSFYSSLISYEEDQRQGAEPRKNFVKPNETKTYFWKVQHHMAPTKDEFDCKAWAYFSDVDLEKDVHSGLIGPLLVCHTNTLNPAHGRQVTVQEFALFFTIFDETKSWYFTENMERNCRAPCNIQMEDPTFKENYRFHAINGYIMDTLPGLVMAQDQRIRWYLLSMGSNENIHSIHFSGHVFTVRKKEEYKMALYNLYPGVFETVEMLPSKAGIWRVECLIGEHLHAGMSTLFLVYSNKCQTPLGMASGHIRDFQITASGQYGQWAPKLARLHYSGSINAWSTKEPFSWIKVDLLAPMIIHGIKTQGARQKFSSLYISQFIIMYSLDGKKWQTYRGNSTGTDMVFFGNVDSSGIKHNIFNPPIIARYIRLHPTHYSIRSTLRMELMGCDLNSCSMPLGMESKAISDAQITASSYFTNMFATWSPSKARLHLQGRSNAWRPQVNNPKEWLQVDFQKTMKVTGVTTQGVKSLDTSMYVKEFLISSSQDGHQWTLFFQNGKVKVFQGNQDSFTPVVNSLDPPLLTRYLRIHPQSWEHQIALRMEVLGCEAQDLY

SEQ ID NO: 1159 - DNA, 4371 bp, synthetic construct
  misc_feature 1..4371: note = Variant of human B-domain deleted Factor VIII
  source 1..4371: mol_type = other DNA
atgcagattgaactgtctacctgcttcttcctctgtttgctgagtttctgctttagcgccactagacggtactaccttggcgctgtggagctgtcctgggactatatgcagagtgatttgggagagcttcccgtcgacgcacgatttcctcctcgcgttccaaagtcatttccctttaacacaagcgtggtgtacaagaagacgctcttcgtcgaattcaccgatcacctgttcaatatcgccaaacccagaccaccatggatgggtcttttggggcctaccatacaagcggaggtgtatgacacagttgttatcactctcaagaacatggcttctcatccggtaagtcttcacgcagtgggcgtgtcctactggaaagcttcagaaggagccgagtatgatgatcagacatcccagagggagaaagaagacgacaaggtatttccaggtgggtctcatacctatgtgtggcaagtgctcaaagagaatggccctatggcaagcgatccgccgtgtttgacttacagctacctttcacacgttgacctcgtcaaggacctcaactccgggttgattggagccttgttggtatgcagggaaggatctcttgccaaagagaagacacagaccctccacaagtttatccttctctttgctgtgttcgatgagggcaaaagttggcatagcgaaacgaagaattccctcatgcaggatcgcgacgcagccagcgccagagcttggcccaagatgcacactgtgaacggatatgtcaataggacgcttcctggcttgattgggtgtcatcggaaaagtgtctactggcacgtgatcggaatggggacaacaccagaggtccactccatatttctcgaaggccataccttccttgttcgaaaccacagacaggcatccttggggatctctcccattacctttctcactgcccaaacgctccttatggacttgggtcagttccttctcttttgccatatcccgtcacaccagcatgatggtatggaagcttatgtgaaagtcgacagttgtcctgaggagccacagttgcgcatgaagaataatgaagaagccgaggattacgacgacgatctcaccgattctgagatggacgtggtgaggtttgatgacgacaactctccctccatcattcaagctcggagcgtggcgaagaaacaccccaagacttgggtccactatatagcggcggaagaggaggattgggattacgctcctcttgtattggcaccagatgaccgctcatacaaaagccagtacctcaacaacggaccgcagagaattggccggaagtataagaaagtgcgatttatggcctatacagacgaaacctttaagacaagggaggccatccagcatgagagtgggattttgggacctcttctttacggcgaagttggtgataccctcctcatcatcttcaagaatcaagcttctcgcccctataacatttacccacacgggatcactgacgttaggcctttgtatagcagaagacttcccaaaggcgtgaagcatctcaaagacttccccattttgccaggcgagatctttaagtacaaatggaccgtcacagtggaagatggaccgactaaatcagaccctcgatgccttacgcggtactattcctccttcgtgaatatggagagagatttggcaagcggactcataggaccactcctcatctgttacaaggaatctgtagaccagaggggtaaccagattatgagtgataaacgcaatgtgatcctttttagcgtcttcgacgagaaccggtcctggtacttgaccgagaatatacaaaggttccttcccaaccccgcaggcgttcagttggaagaccctgagtttcaggccagcaatattatgcactcaatcaacggctatgtgtttgatagtctccagctttctgtttgcctccatgaagtagcctattggtacatcttgtcaattggtgctcaaacagacttcctctccgtcttcttctccggctacacctttaagcacaagatggtgtatgaggacactctcacactctttccattttctggagaaaccgtgttcatgagcatggagaatccaggcctttggatcttgggttgccacaacagtgattttcgcaatcggggaatgactgctctcctcaaagtcagcagctgtgataagaacacaggcgactattacgaagattcttacgaggacataagtgcctactttgactccaagaataacgccattgagcccagatcattctcccagaatcctcccgtgcttaaaaggcatcagcgcgaaatcaccagaactactcttcagtctgatcaagaggagattgactatgacgacaccataagcgtggaaatgaagaaggaggatttcgatatctatgacgaagatgagaaccagtctccgcggagctttcagaagaagacgcgacactacttcattgcagcagtcgaaaggctttgggactacggtatgtcatcatcccctcatgtgttgcgcaatagagctcagagtggaagtgttccacagttcaagaaagtcgtctttcaagagtttacagatggcagcttcacacagcctctctatcggggcgagcttaacgaacatttgggactccttggtccctatatccgagccgaagtggaggacaacattatggttacctttaggaatcaagcctctcgcccctacagcttctactcctccctcatcagttatgaggaggatcagagacaaggcgctgaaccacggaagaactttgtgaaaccgaatgagacgaagacctacttctggaaagtacagcaccacatggcccccacaaaagacgaattcgattgcaaagcatgggcgtatttttcagacgttgacttggagaaagatgtacattcaggacttattggtcctttgttggtgtgtcacactaacactctcaatccagcccatggcaggcaggtgacagtccaggaattcgctcttttctttaccatctttgatgagaccaagtcctggtacttcacggaaaacatggagcgcaattgcagagccccctgtaacatacagatggaggaccctacctttaaggaaaattatcggttccacgcaatcaacggatacattatggatacactccctggccttgtgatggctcaggaccaacgaatcaggtggtacctcctcagcatgggttctaatgagaacatacactccattcacttttcaggacatgtgttcactgtccggaagaaagaagagtataagatggccctctacaatttgtatccaggcgtgtttgagaccgttgaaatgcttccctctaaagctggcatctggagagtagagtgcttgatcggagaacatcttcacgcaggtatgagcaccttgttcctcgtgtacagcaacaaatgtcagaccccacttggcatggccagtggacacattcgcgactttcagatcacagcatctggccagtatggacaatgggccccaaagttggctcgcctccattactccggtagcataaatgcgtggtccactaaagaacctttcagctggattaaggtcgatcttcttgcccccatgatcatccacggcattaagacacagggagcgaggcagaaattctcctccctctacatctcacagttcattattatgtatagtttggacggcaagaagtggcaaacttatagaggtaacagtactggaacagacatggtgttcttcggcaacgttgatagctctggcatcaaacacaacatctttaatcctcccataatagctcggtacatcagattgcatccgacccactacagcattaggagtacactccgaatggagcttatgggttgcgacttgaattcctgttcaatgccactcggaatggagtctaaagccatctctgatgcacagataaccgccagtagctactttacgaacatgtttgctacgtggtcaccctctaaggcaaggcttcatttgcaaggccggtctaatgcctggagacctcaggtgaacaacccgaaagaatggctccaggtggactttcagaagaccatgaaagtaacaggtgtcactactcagggagttaagtccttggatactagcatgtatgtgaaggagttccttatttcctcatcacaagatggccaccagtggaccctcttctttcagaatggtaaggtcaaagtgtttcagggcaatcaagacagcttcacacccgtggtgaacagtcttgatcctccactcttgacacgataccttcgaatccatccacagtcttgggagcaccagattgcattgcgcatggaagtacttggatgcgaggctcaggacctctac

SEQ ID NO: 1160 - protein, 1457 aa, synthetic construct
  REGION 1..1457: note = Variant of human B-domain deleted Factor VIII
MQIELSTCFFLCLLSFCFSATRRYYLGAVELSWDYMQSDLGELPVDARFPPRVPKSFPFNTSVVYKKTLFVEFTDHLFNIAKPRPPWMGLLGPTIQAEVYDTVVITLKNMASHPVSLHAVGVSYWKASEGAEYDDQTSQREKEDDKVFPGGSHTYVWQVLKENGPMASDPPCLTYSYLSHVDLVKDLNSGLIGALLVCREGSLAKEKTQTLHKFILLFAVFDEGKSWHSETKNSLMQDRDAASARAWPKMHTVNGYVNRTLPGLIGCHRKSVYWHVIGMGTTPEVHSIFLEGHTFLVRNHRQASLGISPITFLTAQTLLMDLGQFLLFCHIPSHQHDGMEAYVKVDSCPEEPQLRMKNNEEAEDYDDDLTDSEMDVVRFDDDNSPSIIQARSVAKKHPKTWVHYIAAEEEDWDYAPLVLAPDDRSYKSQYLNNGPQRIGRKYKKVRFMAYTDETFKTREAIQHESGILGPLLYGEVGDTLLIIFKNQASRPYNIYPHGITDVRPLYSRRLPKGVKHLKDFPILPGEIFKYKWTVTVEDGPTKSDPRCLTRYYSSFVNMERDLASGLIGPLLICYKESVDQRGNQIMSDKRNVILFSVFDENRSWYLTENIQRFLPNPAGVQLEDPEFQASNIMHSINGYVFDSLQLSVCLHEVAYWYILSIGAQTDFLSVFFSGYTFKHKMVYEDTLTLFPFSGETVFMSMENPGLWILGCHNSDFRNRGMTALLKVSSCDKNTGDYYEDSYEDISAYFDSKNNAIEPRSFSQNPPVLKRHQREITRTTLQSDQEEIDYDDTISVEMKKEDFDIYDEDENQSPRSFQKKTRHYFIAAVERLWDYGMSSSPHVLRNRAQSGSVPQFKKVVFQEFTDGSFTQPLYRGELNEHLGLLGPYIRAEVEDNIMVTFRNQASRPYSFYSSLISYEEDQRQGAEPRKNFVKPNETKTYFWKVQHHMAPTKDEFDCKAWAYFSDVDLEKDVHSGLIGPLLVCHTNTLNPAHGRQVTVQEFALFFTIFDETKSWYFTENMERNCRAPCNIQMEDPTFKENYRFHAINGYIMDTLPGLVMAQDQRIRWYLLSMGSNENIHSIHFSGHVFTVRKKEEYKMALYNLYPGVFETVEMLPSKAGIWRVECLIGEHLHAGMSTLFLVYSNKCQTPLGMASGHIRDFQITASGQYGQWAPKLARLHYSGSINAWSTKEPFSWIKVDLLAPMIIHGIKTQGARQKFSSLYISQFIIMYSLDGKKWQTYRGNSTGTDMVFFGNVDSSGIKHNIFNPPIIARYIRLHPTHYSIRSTLRMELMGCDLNSCSMPLGMESKAISDAQITASSYFTNMFATWSPSKARLHLQGRSNAWRPQVNNPKEWLQVDFQKTMKVTGVTTQGVKSLDTSMYVKEFLISSSQDGHQWTLFFQNGKVKVFQGNQDSFTPVVNSLDPPLLTRYLRIHPQSWEHQIALRMEVLGCEAQDLY

SEQ ID NO: 1161 - DNA, 4371 bp, synthetic construct
  misc_feature 1..4371: note = Variant of human B-domain deleted Factor VIII
  source 1..4371: mol_type = other DNA
atgcagattgaactgtctacctgcttcttcctctgtttgctgaggttctgctttagcgccactagacggtactaccttggcgctgtggagctgtcctgggactatatgcagagtgatttgggagagcttcccgtcgacgcacgatttcctcctcgcgttccaaagtcatttccctttaacacaagcgtggtgtacaagaagacgctcttcgtcgaattcaccgatcacctgttcaatatcgccaaacccagaccaccatggatgggtcttttggggcctaccatacaagcggaggtgtatgacacagttgttatcactctcaagaacatggcttctcatccggtaagtcttcacgcagtgggcgtgtcctactggaaagcttcagaaggagccgagtatgatgatcagacatcccagagggagaaagaagacgacaaggtatttccaggtgggtctcatacctatgtgtggcaagtgctcaaagagaatggccctatggcaagcgatccgccgtgtttgacttacagctacctttcacacgttgacctcgtcaaggacctcaactccgggttgattggagccttgttggtatgcagggaaggatctcttgccaaagagaagacacagaccctccacaagtttatccttctctttgctgtgttcgatgagggcaaaagttggcatagcgaaacgaagaattccctcatgcaggatcgcgacgcagccagcgccagagcttggcccaagatgcacactgtgaacggatatgtcaataggacgcttcctggcttgattgggtgtcatcggaaaagtgtctactggcacgtgatcggaatggggacaacaccagaggtccactccatatttctcgaaggccataccttccttgttcgaaaccacagacaggcatccttggggatctctcccattacctttctcactgcccaaacgctccttatggacttgggtcagttccttctcttttgccatatcccgtcacaccagcatgatggtatggaagcttatgtgaaagtcgacagttgtcctgaggagccacagttgcgcatgaagaataatgaagaagccgaggattacgacgacgatctcaccgattctgagatggacgtggtgaggtttgatgacgacaactctccctccatcattcaagctcggagcgtggcgaagaaacaccccaagacttgggtccactatatagcggcggaagaggaggattgggattacgctcctcttgtattggcaccagatgaccgctcatacaaaagccagtacctcaacaacggaccgcagagaattggccggaagtataagaaagtgcgatttatggcctatacagacgaaacctttaagacaagggaggccatccagcatgagagtgggattttgggacctcttctttacggcgaagttggtgataccctcctcatcatcttcaagaatcaagcttctcgcccctataacatttacccacacgggatcactgacgttaggcctttgtatagcagaagacttcccaaaggcgtgaagcatctcaaagacttccccattttgccaggcgagatctttaagtacaaatggaccgtcacaaaggaagatggaccgactaaatcagaccctcgatgccttacgcggtactattcctccttcgtgaatatggagagagatttggcaagcggactcataggaccactcctcatctgttacaaggaatctgtagaccagaggggtaaccagattatgagtgataaacgcaatgtgatcctttttagcgtcttcgacgagaaccggtcctggtacttgaccgagaatatacaaaggttccttcccaaccccgcaggcgttcagttggaagaccctgagtttcaggccagcaatattatgcactcaatcaacggctatgtgtttgatagtctccagctttctgtttgcctccatgaagtagcctattggtacatcttgtcaattggtgctcaaacagacttcctctccgtcttcttctccggctacacctttaagcacaagatggtgtatgaggacactctcacactctttccattttctggagaaaccgtgttcatgagcatggagaatccaggcctttggatcttgggttgccacaacagtgattttcgcaatcggggaatgactgctctcctcaaagtcagcagctgtgataagaacacaggcgactattacgaagattcttacgaggacataagtgcctactttgactccaagaataacgccattgagcccagatcattctcccagaatcctcccgtgcttaaaaggcatcagcgcgaaatcaccagaactactcttcagtctgatcaagaggagattgactatgacgacaccataagcgtggaaatgaagaaggaggatttcgatatctatgacgaagatgagaaccagtctccgcggagctttcagaagaagacgcgacactacttcattgcagcagtcgaaaggctttgggactacggtatgtcatcatcccctcatgtgttgcgcaatagagctcagagtggaagtgttccacagttcaagaaagtcgtctttcaagagtttacagatggcagcttcacacagcctctctatcggggcgagcttaacgaacatttgggactccttggtccctatatccgagccgaagtggaggacaacattatggttacctttaggaatcaagcctctcgcccctacagcttctactcctccctcatcagttatgaggaggatcagagacaaggcgctgaaccacggaagaactttgtgaaaccgaatgagacgaagacctacttctggaaagtacagcaccacatggcccccacaaaagacgaattcgattgcaaagcatgggcgtatttttcagacgttgacttggagaaagatgtacattcaggacttattggtcctttgttggtgtgtcacactaacactctcaatccagcccatggcaggcaggtgacagtccaggaattcgctcttttctttaccatctttgatgagaccaagtcctggtacttcacggaaaacatggagcgcaattgcagagccccctgtaacatacagatggaggaccctacctttaaggaaaattatcggttccacgcaatcaacggatacattatggatacactccctggccttgtgatggctcaggaccaacgaatcaggtggtacctcctcagcatgggttctaatgagaacatacactccattcacttttcaggacatgtgttcactgtccggaagaaagaagagtataagatggccctctacaatttgtatccaggcgtgtttgagaccgttgaaatgcttccctctaaagctggcatctggagagtagagtgcttgatcggagaacatcttcacgcaggtatgagcaccttgttcctcgtgtacagcaacaaatgtcagaccccacttggcatggccagtggacacattcgcgactttcagatcacagcatctggccagtatggacaatgggccccaaagttggctcgcctccattactccggtagcataaatgcgtggtccactaaagaacctttcagctggattaaggtcgatcttcttgcccccatgatcatccacggcattaagacacagggagcgaggcagaaattctcctccctctacatctcacagttcattattatgtatagtttggacggcaagaagtggcaaacttatagaggtaacagtactggaacagacatggtgttcttcggcaacgttgatagctctggcatcaaacacaacatctttaatcctcccataatagctcggtacatcagattgcatccgacccactacagcattaggagtacactccgaatggagcttatgggttgcgacttgaattcctgttcaatgccactcggaatggagtctaaagccatctctgatgcacagataaccgccagtagctactttacgaacatgtttgctacgtggtcaccctctaaggcaaggcttcatttgcaaggccggtctaatgcctggagacctcaggtgaacaacccgaaagaatggctccaggtggactttcagaagaccatgaaagtaacaggtgtcactactcagggagttaagtccttggatactagcatgtatgtgaaggagttccttatttcctcatcacaagatggccaccagtggaccctcttctttcagaatggtaaggtcaaagtgtttcagggcaatcaagacagcttcacacccgtggtgaacagtcttgatcctccactcttgacacgataccttcgaatccatccacagtcttgggagcaccagattgcattgcgcatggaagtacttggatgcgaggctcaggacctctac

SEQ ID NO: 1162 - protein, 1457 aa, synthetic construct
  REGION 1..1457: note = Variant of human B-domain deleted Factor VIII
MQIELSTCFFLCLLRFCFSATRRYYLGAVELSWDYMQSDLGELPVDARFPPRVPKSFPFNTSVVYKKTLFVEFTDHLFNIAKPRPPWMGLLGPTIQAEVYDTVVITLKNMASHPVSLHAVGVSYWKASEGAEYDDQTSQREKEDDKVFPGGSHTYVWQVLKENGPMASDPPCLTYSYLSHVDLVKDLNSGLIGALLVCREGSLAKEKTQTLHKFILLFAVFDEGKSWHSETKNSLMQDRDAASARAWPKMHTVNGYVNRTLPGLIGCHRKSVYWHVIGMGTTPEVHSIFLEGHTFLVRNHRQASLGISPITFLTAQTLLMDLGQFLLFCHIPSHQHDGMEAYVKVDSCPEEPQLRMKNNEEAEDYDDDLTDSEMDVVRFDDDNSPSIIQARSVAKKHPKTWVHYIAAEEEDWDYAPLVLAPDDRSYKSQYLNNGPQRIGRKYKKVRFMAYTDETFKTREAIQHESGILGPLLYGEVGDTLLIIFKNQASRPYNIYPHGITDVRPLYSRRLPKGVKHLKDFPILPGEIFKYKWTVTKEDGPTKSDPRCLTRYYSSFVNMERDLASGLIGPLLICYKESVDQRGNQIMSDKRNVILFSVFDENRSWYLTENIQRFLPNPAGVQLEDPEFQASNIMHSINGYVFDSLQLSVCLHEVAYWYILSIGAQTDFLSVFFSGYTFKHKMVYEDTLTLFPFSGETVFMSMENPGLWILGCHNSDFRNRGMTALLKVSSCDKNTGDYYEDSYEDISAYFDSKNNAIEPRSFSQNPPVLKRHQREITRTTLQSDQEEIDYDDTISVEMKKEDFDIYDEDENQSPRSFQKKTRHYFIAAVERLWDYGMSSSPHVLRNRAQSGSVPQFKKVVFQEFTDGSFTQPLYRGELNEHLGLLGPYIRAEVEDNIMVTFRNQASRPYSFYSSLISYEEDQRQGAEPRKNFVKPNETKTYFWKVQHHMAPTKDEFDCKAWAYFSDVDLEKDVHSGLIGPLLVCHTNTLNPAHGRQVTVQEFALFFTIFDETKSWYFTENMERNCRAPCNIQMEDPTFKENYRFHAINGYIMDTLPGLVMAQDQRIRWYLLSMGSNENIHSIHFSGHVFTVRKKEEYKMALYNLYPGVFETVEMLPSKAGIWRVECLIGEHLHAGMSTLFLVYSNKCQTPLGMASGHIRDFQITASGQYGQWAPKLARLHYSGSINAWSTKEPFSWIKVDLLAPMIIHGIKTQGARQKFSSLYISQFIIMYSLDGKKWQTYRGNSTGTDMVFFGNVDSSGIKHNIFNPPIIARYIRLHPTHYSIRSTLRMELMGCDLNSCSMPLGMESKAISDAQITASSYFTNMFATWSPSKARLHLQGRSNAWRPQVNNPKEWLQVDFQKTMKVTGVTTQGVKSLDTSMYVKEFLISSSQDGHQWTLFFQNGKVKVFQGNQDSFTPVVNSLDPPLLTRYLRIHPQSWEHQIALRMEVLGCEAQDLY

SEQ ID NO: 1163 - DNA, 4371 bp, synthetic construct
  misc_feature 1..4371: note = Variant of human B-domain deleted Factor VIII
  source 1..4371: mol_type = other DNA
atgcagattgaactgtctacctgcttcttcctctgtttgctgaggttctgctttagcgccactagacggtactaccttggcgctgtggagctgtcctgggactatatgcagagtgatttgggagagcttcccgtcgacgcacgatttcctcctcgcgttccaaagtcatttccctttaacacaagcgtggtgtacaagaagacgctcttcgtcgaattcaccgatcacctgttcaatatcgccaaacccagaccaccatggatgggtcttttggggcctaccatacaagcggaggtgtatgacacagttgttatcactctcaagaacatggcttctcatccggtaagtcttcacgcagtgggcgtgtcctactggaaagcttcagaaggagccgagtatgatgatcagacatcccagagggagaaagaagacgacaaggtatttccaggtgggtctcatacctatgtgtggcaagtgctcaaagagaatggccctatggcaagcgatccgccgtgtttgacttacagctacctttcacacgttgacctcgtcaaggacctcaactccgggttgattggagccttgttggtatgcagggaaggatctcttgccaaagagaagacacagaccctccacaagtttatccttctctttgctgtgttcgatgagggcaaaagttggcatagcgaaacgaagaattccctcatgcaggatcgcgacgcagccagcgccagagcttggcccaagatgcacactgtgaacggatatgtcaataggacgcttcctggcttgattgggtgtcatcggaaaagtgtctactggcacgtgatcggaatggggacaacaccagaggtccactccatatttctcgaaggccataccttccttgttcgaaaccacagacaggcatccttggggatctctcccattacctttctcactgcccaaacgctccttatggacttgggtcagttccttctcttttgccatatcccgtcacaccagcatgatggtatggaagcttatgtgaaagtcgacagttgtcctgaggagccacagttgcgcatgaagaataatgaagaagccgaggattacgacgacgatctcaccgattctgagatggacgtggtgaggtttgatgacgacaactctccctccatcattcaagctcggagcgtggcgaagaaacaccccaagacttgggtccactatatagcggcggaagaggaggattgggattacgctcctcttgtattggcaccagatgaccgctcatacaaaagccagtacctcaacaacggaccgcagagaattggccggaagtataagaaagtgcgatttatggcctatacagacgaaacctttaagacaagggaggccatccagcatgagagtgggattttgggacctcttctttacggcgaagttggtgataccctcctcatcatcttcaagaatcaagcttctcgcccctataacatttacccacacgggatcactgacgttaggcctttgtatagcagaagacttcccaaaggcgtgaagcatctcaaagacttccccattttgccaggcgagatctttaagtacaaatggaccgtcacaggggaagatggaccgactaaatcagaccctcgatgccttacgcggtactattcctccttcgtgaatatggagagagatttggcaagcggactcataggaccactcctcatctgttacaaggaatctgtagaccagaggggtaaccagattatgagtgataaacgcaatgtgatcctttttagcgtcttcgacgagaaccggtcctggtacttgaccgagaatatacaaaggttccttcccaaccccgcaggcgttcagttggaagaccctgagtttcaggccagcaatattatgcactcaatcaacggctatgtgtttgatagtctccagctttctgtttgcctccatgaagtagcctattggtacatcttgtcaattggtgctcaaacagacttcctctccgtcttcttctccggctacacctttaagcacaagatggtgtatgaggacactctcacactctttccattttctggagaaaccgtgttcatgagcatggagaatccaggcctttggatcttgggttgccacaacagtgattttcgcaatcggggaatgactgctctcctcaaagtcagcagctgtgataagaacacaggcgactattacgaagattcttacgaggacataagtgcctactttgactccaagaataacgccattgagcccagatcattctcccagaatcctcccgtgcttaaaaggcatcagcgcgaaatcaccagaactactcttcagtctgatcaagaggagattgactatgacgacaccataagcgtggaaatgaagaaggaggatttcgatatctatgacgaagatgagaaccagtctccgcggagctttcagaagaagacgcgacactacttcattgcagcagtcgaaaggctttgggactacggtatgtcatcatcccctcatgtgttgcgcaatagagctcagagtggaagtgttccacagttcaagaaagtcgtctttcaagagtttacagatggcagcttcacacagcctctctatcggggcgagcttaacgaacatttgggactccttggtccctatatccgagccgaagtggaggacaacattatggttacctttaggaatcaagcctctcgcccctacagcttctactcctccctcatcagttatgaggaggatcagagacaaggcgctgaaccacggaagaactttgtgaaaccgaatgagacgaagacctacttctggaaagtacagcaccacatggcccccacaaaagacgaattcgattgcaaagcatgggcgtatttttcagacgttgacttggagaaagatgtacattcaggacttattggtcctttgttggtgtgtcacactaacactctcaatccagcccatggcaggcaggtgacagtccaggaattcgctcttttctttaccatctttgatgagaccaagtcctggtacttcacggaaaacatggagcgcaattgcagagccccctgtaacatacagatggaggaccctacctttaaggaaaattatcggttccacgcaatcaacggatacattatggatacactccctggccttgtgatggctcaggaccaacgaatcaggtggtacctcctcagcatgggttctaatgagaacatacactccattcacttttcaggacatgtgttcactgtccggaagaaagaagagtataagatggccctctacaatttgtatccaggcgtgtttgagaccgttgaaatgcttccctctaaagctggcatctggagagtagagtgcttgatcggagaacatcttcacgcaggtatgagcaccttgttcctcgtgtacagcaacaaatgtcagaccccacttggcatggccagtggacacattcgcgactttcagatcacagcatctggccagtatggacaatgggccccaaagttggctcgcctccattactccggtagcataaatgcgtggtccactaaagaacctttcagctggattaaggtcgatcttcttgcccccatgatcatccacggcattaagacacagggagcgaggcagaaattctcctccctctacatctcacagttcattattatgtatagtttggacggcaagaagtggcaaacttatagaggtaacagtactggaacagacatggtgttcttcggcaacgttgatagctctggcatcaaacacaacatctttaatcctcccataatagctcggtacatcagattgcatccgacccactacagcattaggagtacactccgaatggagcttatgggttgcgacttgaattcctgttcaatgccactcggaatggagtctaaagccatctctgatgcacagataaccgccagtagctactttacgaacatgtttgctacgtggtcaccctctaaggcaaggcttcatttgcaaggccggtctaatgcctggagacctcaggtgaacaacccgaaagaatggctccaggtggactttcagaagaccatgaaagtaacaggtgtcactactcagggagttaagtccttggatactagcatgtatgtgaaggagttccttatttcctcatcacaagatggccaccagtggaccctcttctttcagaatggtaaggtcaaagtgtttcagggcaatcaagacagcttcacacccgtggtgaacagtcttgatcctccactcttgacacgataccttcgaatccatccacagtcttgggagcaccagattgcattgcgcatggaagtacttggatgcgaggctcaggacctctac

SEQ ID NO: 1164 - protein, 1457 aa, synthetic construct
  REGION 1..1457: note = Variant of human B-domain deleted Factor VIII
MQIELSTCFFLCLLRFCFSATRRYYLGAVELSWDYMQSDLGELPVDARFPPRVPKSFPFNTSVVYKKTLFVEFTDHLFNIAKPRPPWMGLLGPTIQAEVYDTVVITLKNMASHPVSLHAVGVSYWKASEGAEYDDQTSQREKEDDKVFPGGSHTYVWQVLKENGPMASDPPCLTYSYLSHVDLVKDLNSGLIGALLVCREGSLAKEKTQTLHKFILLFAVFDEGKSWHSETKNSLMQDRDAASARAWPKMHTVNGYVNRTLPGLIGCHRKSVYWHVIGMGTTPEVHSIFLEGHTFLVRNHRQASLGISPITFLTAQTLLMDLGQFLLFCHIPSHQHDGMEAYVKVDSCPEEPQLRMKNNEEAEDYDDDLTDSEMDVVRFDDDNSPSIIQARSVAKKHPKTWVHYIAAEEEDWDYAPLVLAPDDRSYKSQYLNNGPQRIGRKYKKVRFMAYTDETFKTREAIQHESGILGPLLYGEVGDTLLIIFKNQASRPYNIYPHGITDVRPLYSRRLPKGVKHLKDFPILPGEIFKYKWTVTGEDGPTKSDPRCLTRYYSSFVNMERDLASGLIGPLLICYKESVDQRGNQIMSDKRNVILFSVFDENRSWYLTENIQRFLPNPAGVQLEDPEFQASNIMHSINGYVFDSLQLSVCLHEVAYWYILSIGAQTDFLSVFFSGYTFKHKMVYEDTLTLFPFSGETVFMSMENPGLWILGCHNSDFRNRGMTALLKVSSCDKNTGDYYEDSYEDISAYFDSKNNAIEPRSFSQNPPVLKRHQREITRTTLQSDQEEIDYDDTISVEMKKEDFDIYDEDENQSPRSFQKKTRHYFIAAVERLWDYGMSSSPHVLRNRAQSGSVPQFKKVVFQEFTDGSFTQPLYRGELNEHLGLLGPYIRAEVEDNIMVTFRNQASRPYSFYSSLISYEEDQRQGAEPRKNFVKPNETKTYFWKVQHHMAPTKDEFDCKAWAYFSDVDLEKDVHSGLIGPLLVCHTNTLNPAHGRQVTVQEFALFFTIFDETKSWYFTENMERNCRAPCNIQMEDPTFKENYRFHAINGYIMDTLPGLVMAQDQRIRWYLLSMGSNENIHSIHFSGHVFTVRKKEEYKMALYNLYPGVFETVEMLPSKAGIWRVECLIGEHLHAGMSTLFLVYSNKCQTPLGMASGHIRDFQITASGQYGQWAPKLARLHYSGSINAWSTKEPFSWIKVDLLAPMIIHGIKTQGARQKFSSLYISQFIIMYSLDGKKWQTYRGNSTGTDMVFFGNVDSSGIKHNIFNPPIIARYIRLHPTHYSIRSTLRMELMGCDLNSCSMPLGMESKAISDAQITASSYFTNMFATWSPSKARLHLQGRSNAWRPQVNNPKEWLQVDFQKTMKVTGVTTQGVKSLDTSMYVKEFLISSSQDGHQWTLFFQNGKVKVFQGNQDSFTPVVNSLDPPLLTRYLRIHPQSWEHQIALRMEVLGCEAQDLY

SEQ ID NO: 1165 - DNA, 4371 bp, synthetic construct
  misc_feature 1..4371: note = Variant of human B-domain deleted Factor VIII
  source 1..4371: mol_type = other DNA
atgcagattgaactgtctacctgcttcttcctctgtttgctgaggttctgctttagcgccactagacggtactaccttggcgctgtggagctgtcctgggactatatgcagagtgatttgggagagcttcccgtcgacgcacgatttcctcctcgcgttccaaagtcatttccctttaacacaagcgtggtgtacaagaagacgctcttcgtcgaattcaccgatcacctgttcaatatcgccaaacccagaccaccatggatgggtcttttggggcctaccatacaagcggaggtgtatgacacagttgttatcactctcaagaacatggcttctcatccggtaagtcttcacgcagtgggcgtgtcctactggaaagcttcagaaggagccgagtatgatgatcagacatcccagagggagaaagaagacgacaaggtatttccaggtgggtctcatacctatgtgtggcaagtgctcaaagagaatggccctatggcaagcgatccgccgtgtttgacttacagctacctttcacacgttgacctcgtcaaggacctcaactccgggttgattggagccttgttggtatgcagggaaggatctcttgccaaagagaagacacagaccctccacaagtttatccttctctttgctgtgttcgatgagggcaaaagttggcatagcgaaacgaagaattccctcatgcaggatcgcgacgcagccagcgccagagcttggcccaagatgcacactgtgaacggatatgtcaataggacgcttcctggcttgattgggtgtcatcggaaaagtgtctactggcacgtgatcggaatggggacaacaccagaggtccactccatatttctcgaaggccataccttccttgttcgaaaccacagacaggcatccttggggatctctcccattacctttctcactgcccaaacgctccttatggacttgggtcagttccttctcttttgccatatcccgtcacaccagcatgatggtatggaagcttatgtgaaagtcgacagttgtcctgaggagccacagttgcgcatgaagaataatgaagaagccgaggattacgacgacgatctcaccgattctgagatggacgtggtgaggtttgatgacgacaactctccctccatcattcaagctcggagcgtggcgaagaaacaccccaagacttgggtccactatatagcggcggaagaggaggattgggattacgctcctcttgtattggcaccagatgaccgctcatacaaaagccagtacctcaacaacggaccgcagagaattggccggaagtataagaaagtgcgatttatggcctatacagacgaaacctttaagacaagggaggccatccagcatgagagtgggattttgggacctcttctttacggcgaagttggtgataccctcctcatcatcttcaagaatcaagcttctcgcccctataacatttacccacacgggatcactgacgttaggcctttgtatagcagaagacttcccaaaggcgtgaagcatctcaaagacttccccattttgccaggcgagatctttaagtacaaatggagggtcacagtggaagatggaccgactaaatcagaccctcgatgccttacgcggtactattcctccttcgtgaatatggagagagatttggcaagcggactcataggaccactcctcatctgttacaaggaatctgtagaccagaggggtaaccagattatgagtgataaacgcaatgtgatcctttttagcgtcttcgacgagaaccggtcctggtacttgaccgagaatatacaaaggttccttcccaaccccgcaggcgttcagttggaagaccctgagtttcaggccagcaatattatgcactcaatcaacggctatgtgtttgatagtctccagctttctgtttgcctccatgaagtagcctattggtacatcttgtcaattggtgctcaaacagacttcctctccgtcttcttctccggctacacctttaagcacaagatggtgtatgaggacactctcacactctttccattttctggagaaaccgtgttcatgagcatggagaatccaggcctttggatcttgggttgccacaacagtgattttcgcaatcggggaatgactgctctcctcaaagtcagcagctgtgataagaacacaggcgactattacgaagattcttacgaggacataagtgcctactttgactccaagaataacgccattgagcccagatcattctcccagaatcctcccgtgcttaaaaggcatcagcgcgaaatcaccagaactactcttcagtctgatcaagaggagattgactatgacgacaccataagcgtggaaatgaagaaggaggatttcgatatctatgacgaagatgagaaccagtctccgcggagctttcagaagaagacgcgacactacttcattgcagcagtcgaaaggctttgggactacggtatgtcatcatcccctcatgtgttgcgcaatagagctcagagtggaagtgttccacagttcaagaaagtcgtctttcaagagtttacagatggcagcttcacacagcctctctatcggggcgagcttaacgaacatttgggactccttggtccctatatccgagccgaagtggaggacaacattatggttacctttaggaatcaagcctctcgcccctacagcttctactcctccctcatcagttatgaggaggatcagagacaaggcgctgaaccacggaagaactttgtgaaaccgaatgagacgaagacctacttctggaaagtacagcaccacatggcccccacaaaagacgaattcgattgcaaagcatgggcgtatttttcagacgttgacttggagaaagatgtacattcaggacttattggtcctttgttggtgtgtcacactaacactctcaatccagcccatggcaggcaggtgacagtccaggaattcgctcttttctttaccatctttgatgagaccaagtcctggtacttcacggaaaacatggagcgcaattgcagagccccctgtaacatacagatggaggaccctacctttaaggaaaattatcggttccacgcaatcaacggatacattatggatacactccctggccttgtgatggctcaggaccaacgaatcaggtggtacctcctcagcatgggttctaatgagaacatacactccattcacttttcaggacatgtgttcactgtccggaagaaagaagagtataagatggccctctacaatttgtatccaggcgtgtttgagaccgttgaaatgcttccctctaaagctggcatctggagagtagagtgcttgatcggagaacatcttcacgcaggtatgagcaccttgttcctcgtgtacagcaacaaatgtcagaccccacttggcatggccagtggacacattcgcgactttcagatcacagcatctggccagtatggacaatgggccccaaagttggctcgcctccattactccggtagcataaatgcgtggtccactaaagaacctttcagctggattaaggtcgatcttcttgcccccatgatcatccacggcattaagacacagggagcgaggcagaaattctcctccctctacatctcacagttcattattatgtatagtttggacggcaagaagtggcaaacttatagaggtaacagtactggaacagacatggtgttcttcggcaacgttgatagctctggcatcaaacacaacatctttaatcctcccataatagctcggtacatcagattgcatccgacccactacagcattaggagtacactccgaatggagcttatgggttgcgacttgaattcctgttcaatgccactcggaatggagtctaaagccatctctgatgcacagataaccgccagtagctactttacgaacatgtttgctacgtggtcaccctctaaggcaaggcttcatttgcaaggccggtctaatgcctggagacctcaggtgaacaacccgaaagaatggctccaggtggactttcagaagaccatgaaagtaacaggtgtcactactcagggagttaagtccttggatactagcatgtatgtgaaggagttccttatttcctcatcacaagatggccaccagtggaccctcttctttcagaatggtaaggtcaaagtgtttcagggcaatcaagacagcttcacacccgtggtgaacagtcttgatcctccactcttgacacgataccttcgaatccatccacagtcttgggagcaccagattgcattgcgcatggaagtacttggatgcgaggctcaggacctctac

SEQ ID NO: 1166 - protein, 1457 aa, synthetic construct
  REGION 1..1457: note = Variant of human B-domain deleted Factor VIII
MQIELSTCFFLCLLRFCFSATRRYYLGAVELSWDYMQSDLGELPVDARFPPRVPKSFPFNTSVVYKKTLFVEFTDHLFNIAKPRPPWMGLLGPTIQAEVYDTVVITLKNMASHPVSLHAVGVSYWKASEGAEYDDQTSQREKEDDKVFPGGSHTYVWQVLKENGPMASDPPCLTYSYLSHVDLVKDLNSGLIGALLVCREGSLAKEKTQTLHKFILLFAVFDEGKSWHSETKNSLMQDRDAASARAWPKMHTVNGYVNRTLPGLIGCHRKSVYWHVIGMGTTPEVHSIFLEGHTFLVRNHRQASLGISPITFLTAQTLLMDLGQFLLFCHIPSHQHDGMEAYVKVDSCPEEPQLRMKNNEEAEDYDDDLTDSEMDVVRFDDDNSPSIIQARSVAKKHPKTWVHYIAAEEEDWDYAPLVLAPDDRSYKSQYLNNGPQRIGRKYKKVRFMAYTDETFKTREAIQHESGILGPLLYGEVGDTLLIIFKNQASRPYNIYPHGITDVRPLYSRRLPKGVKHLKDFPILPGEIFKYKWRVTVEDGPTKSDPRCLTRYYSSFVNMERDLASGLIGPLLICYKESVDQRGNQIMSDKRNVILFSVFDENRSWYLTENIQRFLPNPAGVQLEDPEFQASNIMHSINGYVFDSLQLSVCLHEVAYWYILSIGAQTDFLSVFFSGYTFKHKMVYEDTLTLFPFSGETVFMSMENPGLWILGCHNSDFRNRGMTALLKVSSCDKNTGDYYEDSYEDISAYFDSKNNAIEPRSFSQNPPVLKRHQREITRTTLQSDQEEIDYDDTISVEMKKEDFDIYDEDENQSPRSFQKKTRHYFIAAVERLWDYGMSSSPHVLRNRAQSGSVPQFKKVVFQEFTDGSFTQPLYRGELNEHLGLLGPYIRAEVEDNIMVTFRNQASRPYSFYSSLISYEEDQRQGAEPRKNFVKPNETKTYFWKVQHHMAPTKDEFDCKAWAYFSDVDLEKDVHSGLIGPLLVCHTNTLNPAHGRQVTVQEFALFFTIFDETKSWYFTENMERNCRAPCNIQMEDPTFKENYRFHAINGYIMDTLPGLVMAQDQRIRWYLLSMGSNENIHSIHFSGHVFTVRKKEEYKMALYNLYPGVFETVEMLPSKAGIWRVECLIGEHLHAGMSTLFLVYSNKCQTPLGMASGHIRDFQITASGQYGQWAPKLARLHYSGSINAWSTKEPFSWIKVDLLAPMIIHGIKTQGARQKFSSLYISQFIIMYSLDGKKWQTYRGNSTGTDMVFFGNVDSSGIKHNIFNPPIIARYIRLHPTHYSIRSTLRMELMGCDLNSCSMPLGMESKAISDAQITASSYFTNMFATWSPSKARLHLQGRSNAWRPQVNNPKEWLQVDFQKTMKVTGVTTQGVKSLDTSMYVKEFLISSSQDGHQWTLFFQNGKVKVFQGNQDSFTPVVNSLDPPLLTRYLRIHPQSWEHQIALRMEVLGCEAQDLY

SEQ ID NO: 1167 - DNA, 4371 bp, synthetic construct
  misc_feature 1..4371: note = Variant of human B-domain deleted Factor VIII
  source 1..4371: mol_type = other DNA
atgcagattgaactgtctacctgcttcttcctctgtttgctgaggttctgctttagcgccactagacggtactaccttggcgctgtggagctgtcctgggactatatgcagagtgatttgggagagcttcccgtcgacgcacgatttcctcctcgcgttccaaagtcatttccctttaacacaagcgtggtgtacaagaagacgctcttcgtcgaattcaccgatcacctgttcaatatcgccaaacccagaccaccatggatgggtcttttggggcctaccatacaagcggaggtgtatgacacagttgttatcactctcaagaacatggcttctcatccggtaagtcttcacgcagtgggcgtgtcctactggaaagcttcagaaggagccgagtatgatgatcagacatcccagagggagaaagaagacgacaaggtatttccaggtgggtctcatacctatgtgtggcaagtgctcaaagagaatggccctatggcaagcgatccgccgtgtttgacttacagctacctttcacacgttgacctcgtcaaggacctcaactccgggttgattggagccttgttggtatgcagggaaggatctcttgccaaagagaagacacagaccctccacaagtttatccttctctttgctgtgttcgatgagggcaaaagttggcatagcgaaacgaagaattccctcatgcaggatcgcgacgcagccagcgccagagcttggcccaagatgcacactgtgaacggatatgtcaataggacgcttcctggcttgattgggtgtcatcggaaaagtgtctactggcacgtgatcggaatggggacaacaccagaggtccactccatatttctcgaaggccataccttccttgttcgaaaccacagacaggcatccttggggatctctcccattacctttctcactgcccaaacgctccttatggacttgggtcagttccttctcttttgccatatcccgtcacaccagcatgatggtatggaagcttatgtgaaagtcgacagttgtcctgaggagccacagttgcgcatgaagaataatgaagaagccgaggattacgacgacgatctcaccgattctgagatggacgtggtgaggtttgatgacgacaactctccctccatcattcaagctcggagcgtggcgaagaaacaccccaagacttgggtccactatatagcggcggaagaggaggattgggattacgctcctcttgtattggcaccagatgaccgctcatacaaaagccagtacctcaacaacggaccgcagagaattggccggaagtataagaaagtgcgatttatggcctatacagacgaaacctttaagacaagggaggccatccagcatgagagtgggattttgggacctcttctttacggcgaagttggtgataccctcctcatcatcttcaagaatcaagcttctcgcccctataacatttacccacacgggatcactgacgttaggcctttgtatagcagaagacttcccaaaggcgtgaagcatctcaaagacttccccattttgccaggcgagatctttaagtacaaatggaccgtcacagtggaagatggaccgactaaatcagaccctcgatgccttacgcggtactattcctccttcgtgaatatggagagagatttggcaagcggactcataggaccactcctcatctgttacaaggaatctgtagaccagaggggtaaccagattatgagtgataaacgcaatgtgatcctttttagcgtcttcgacgagaaccggtcctggtacttgaccgagaatatacaaaggttccttcccaaccccgcaggcgttcagttggaagaccctgagtttcaggccagcaatattatgcactcaatcaacggctatgtgtttgatagtctccagctttctgtttgcctccatgaagtagcctattggtacatcttgtcaattggtgctcaaacagacttcctctccgtcttcttctccggctacacctttaagcacaaggaggtgtatgaggacactctcacactctttccattttctggagaaaccgtgttcatgagcatggagaatccaggcctttggatcttgggttgccacaacagtgattttcgcaatcggggaatgactgctctcctcaaagtcagcagctgtgataagaacacaggcgactattacgaagattcttacgaggacataagtgcctactttgactccaagaataacgccattgagcccagatcattctcccagaatcctcccgtgcttaaaaggcatcagcgcgaaatcaccagaactactcttcagtctgatcaagaggagattgactatgacgacaccataagcgtggaaatgaagaaggaggatttcgatatctatgacgaagatgagaaccagtctccgcggagctttcagaagaagacgcgacactacttcattgcagcagtcgaaaggctttgggactacggtatgtcatcatcccctcatgtgttgcgcaatagagctcagagtggaagtgttccacagttcaagaaagtcgtctttcaagagtttacagatggcagcttcacacagcctctctatcggggcgagcttaacgaacatttgggactccttggtccctatatccgagccgaagtggaggacaacattatggttacctttaggaatcaagcctctcgcccctacagcttctactcctccctcatcagttatgaggaggatcagagacaaggcgctgaaccacggaagaactttgtgaaaccgaatgagacgaagacctacttctggaaagtacagcaccacatggcccccacaaaagacgaattcgattgcaaagcatgggcgtatttttcagacgttgacttggagaaagatgtacattcaggacttattggtcctttgttggtgtgtcacactaacactctcaatccagcccatggcaggcaggtgacagtccaggaattcgctcttttctttaccatctttgatgagaccaagtcctggtacttcacggaaaacatggagcgcaattgcagagccccctgtaacatacagatggaggaccctacctttaaggaaaattatcggttccacgcaatcaacggatacattatggatacactccctggccttgtgatggctcaggaccaacgaatcaggtggtacctcctcagcatgggttctaatgagaacatacactccattcacttttcaggacatgtgttcactgtccggaagaaagaagagtataagatggccctctacaatttgtatccaggcgtgtttgagaccgttgaaatgcttccctctaaagctggcatctggagagtagagtgcttgatcggagaacatcttcacgcaggtatgagcaccttgttcctcgtgtacagcaacaaatgtcagaccccacttggcatggccagtggacacattcgcgactttcagatcacagcatctggccagtatggacaatgggccccaaagttggctcgcctccattactccggtagcataaatgcgtggtccactaaagaacctttcagctggattaaggtcgatcttcttgcccccatgatcatccacggcattaagacacagggagcgaggcagaaattctcctccctctacatctcacagttcattattatgtatagtttggacggcaagaagtggcaaacttatagaggtaacagtactggaacagacatggtgttcttcggcaacgttgatagctctggcatcaaacacaacatctttaatcctcccataatagctcggtacatcagattgcatccgacccactacagcattaggagtacactccgaatggagcttatgggttgcgacttgaattcctgttcaatgccactcggaatggagtctaaagccatctctgatgcacagataaccgccagtagctactttacgaacatgtttgctacgtggtcaccctctaaggcaaggcttcatttgcaaggccggtctaatgcctggagacctcaggtgaacaacccgaaagaatggctccaggtggactttcagaagaccatgaaagtaacaggtgtcactactcagggagttaagtccttggatactagcatgtatgtgaaggagttccttatttcctcatcacaagatggccaccagtggaccctcttctttcagaatggtaaggtcaaagtgtttcagggcaatcaagacagcttcacacccgtggtgaacagtcttgatcctccactcttgacacgataccttcgaatccatccacagtcttgggagcaccagattgcattgcgcatggaagtacttggatgcgaggctcaggacctctac

SEQ ID NO: 1168 - protein, 1457 aa, synthetic construct
  REGION 1..1457: note = Variant of human B-domain deleted Factor VIII
MQIELSTCFFLCLLRFCFSATRRYYLGAVELSWDYMQSDLGELPVDARFPPRVPKSFPFNTSVVYKKTLFVEFTDHLFNIAKPRPPWMGLLGPTIQAEVYDTVVITLKNMASHPVSLHAVGVSYWKASEGAEYDDQTSQREKEDDKVFPGGSHTYVWQVLKENGPMASDPPCLTYSYLSHVDLVKDLNSGLIGALLVCREGSLAKEKTQTLHKFILLFAVFDEGKSWHSETKNSLMQDRDAASARAWPKMHTVNGYVNRTLPGLIGCHRKSVYWHVIGMGTTPEVHSIFLEGHTFLVRNHRQASLGISPITFLTAQTLLMDLGQFLLFCHIPSHQHDGMEAYVKVDSCPEEPQLRMKNNEEAEDYDDDLTDSEMDVVRFDDDNSPSIIQARSVAKKHPKTWVHYIAAEEEDWDYAPLVLAPDDRSYKSQYLNNGPQRIGRKYKKVRFMAYTDETFKTREAIQHESGILGPLLYGEVGDTLLIIFKNQASRPYNIYPHGITDVRPLYSRRLPKGVKHLKDFPILPGEIFKYKWTVTVEDGPTKSDPRCLTRYYSSFVNMERDLASGLIGPLLICYKESVDQRGNQIMSDKRNVILFSVFDENRSWYLTENIQRFLPNPAGVQLEDPEFQASNIMHSINGYVFDSLQLSVCLHEVAYWYILSIGAQTDFLSVFFSGYTFKHKEVYEDTLTLFPFSGETVFMSMENPGLWILGCHNSDFRNRGMTALLKVSSCDKNTGDYYEDSYEDISAYFDSKNNAIEPRSFSQNPPVLKRHQREITRTTLQSDQEEIDYDDTISVEMKKEDFDIYDEDENQSPRSFQKKTRHYFIAAVERLWDYGMSSSPHVLRNRAQSGSVPQFKKVVFQEFTDGSFTQPLYRGELNEHLGLLGPYIRAEVEDNIMVTFRNQASRPYSFYSSLISYEEDQRQGAEPRKNFVKPNETKTYFWKVQHHMAPTKDEFDCKAWAYFSDVDLEKDVHSGLIGPLLVCHTNTLNPAHGRQVTVQEFALFFTIFDETKSWYFTENMERNCRAPCNIQMEDPTFKENYRFHAINGYIMDTLPGLVMAQDQRIRWYLLSMGSNENIHSIHFSGHVFTVRKKEEYKMALYNLYPGVFETVEMLPSKAGIWRVECLIGEHLHAGMSTLFLVYSNKCQTPLGMASGHIRDFQITASGQYGQWAPKLARLHYSGSINAWSTKEPFSWIKVDLLAPMIIHGIKTQGARQKFSSLYISQFIIMYSLDGKKWQTYRGNSTGTDMVFFGNVDSSGIKHNIFNPPIIARYIRLHPTHYSIRSTLRMELMGCDLNSCSMPLGMESKAISDAQITASSYFTNMFATWSPSKARLHLQGRSNAWRPQVNNPKEWLQVDFQKTMKVTGVTTQGVKSLDTSMYVKEFLISSSQDGHQWTLFFQNGKVKVFQGNQDSFTPVVNSLDPPLLTRYLRIHPQSWEHQIALRMEVLGCEAQDLY

SEQ ID NO: 1169 - DNA, 4371 bp, synthetic construct
  misc_feature 1..4371: note = Variant of human B-domain deleted Factor VIII
  source 1..4371: mol_type = other DNA
atgcagattgaactgtctacctgcttcttcctctgtttgctgaggttctgctttagcgccactagacggtactaccttggcgctgtggagctgtcctgggactatatgcagagtgatttgggagagcttcccgtcgacgcacgatttcctcctcgcgttccaaagtcatttccctttaacacaagcgtggtgtacaagaagacgctcttcgtcgaattcaccgatcacctgttcaatatcgccaaacccagaccaccatggatgggtcttttggggcctaccatacaagcggaggtgtatgacacagttgttatcactctcaagaacatggcttctcatccggtaagtcttcacgcagtgggcgtgtcctactggaaagcttcagaaggagccgagtatgatgatcagacatcccagagggagaaagaagacgacaaggtatttccaggtgggtctcatacctatgtgtggcaagtgctcaaagagaatggccctatggcaagcgatccgccgtgtttgacttacagctacctttcacacgttgacctcgtcaaggacctcaactccgggttgattggagccttgttggtatgcagggaaggatctcttgccaaagagaagacacagaccctccacaagtttatccttctctttgctgtgttcgatgagggcaaaagttggcatagcgaaacgaagaattccctcatgcaggatcgcgacgcagccagcgccagagcttggcccaagatgcacactgtgaacggatatgtcaataggacgcttcctggcttgattgggtgtcatcggaaaagtgtctactggcacgtgatcggaatggggacaacaccagaggtccactccatatttctcgaaggccataccttccttgttcgaaaccacagacaggcatccttggggatctctcccattacctttctcactgcccaaacgctccttatggacttgggtcagttccttctcttttgccatatcccgtcacaccagcatgatggtatggaagcttatgtgaaagtcgacagttgtcctgaggagccacagttgcgcatgaagaataatgaagaagccgaggattacgacgacgatctcaccgattctgagatggacgtggtgaggtttgatgacgacaactctccctccatcattcaagctcggagcgtggcgaagaaacaccccaagacttgggtccactatatagcggcggaagaggaggattgggattacgctcctcttgtattggcaccagatgaccgctcatacaaaagccagtacctcaacaacggaccgcagagaattggccggaagtataagaaagtgcgatttatggcctatacagacgaaacctttaagacaagggaggccatccagcatgagagtgggattttgggacctcttctttacggcgaagttggtgataccctcctcatcatcttcaagaatcaagcttctcgcccctataacatttacccacacgggatcactgacgttaggcctttgtatagcagaagacttcccaaaggcgtgaagcatctcaaagacttccccattttgccaggcgagatctttaagtacaaatggaccgtcacatgggaagatggaccgactaaatcagaccctcgatgccttacgcggtactattcctccttcgtgaatatggagagagatttggcaagcggactcataggaccactcctcatctgttacaaggaatctgtagaccagaggggtaaccagattatgagtgataaacgcaatgtgatcctttttagcgtcttcgacgagaaccggtcctggtacttgaccgagaatatacaaaggttccttcccaaccccgcaggcgttcagttggaagaccctgagtttcaggccagcaatattatgcactcaatcaacggctatgtgtttgatagtctccagctttctgtttgcctccatgaagtagcctattggtacatcttgtcaattggtgctcaaacagacttcctctccgtcttcttctccggctacacctttaagcacaagatggtgtatgaggacactctcacactctttccattttctggagaaaccgtgttcatgagcatggagaatccaggcctttggatcttgggttgccacaacagtgattttcgcaatcggggaatgactgctctcctcaaagtcagcagctgtgataagaacacaggcgactattacgaagattcttacgaggacataagtgcctactttgactccaagaataacgccattgagcccagatcattctcccagaatcctcccgtgcttaaaaggcatcagcgcgaaatcaccagaactactcttcagtctgatcaagaggagattgactatgacgacaccataagcgtggaaatgaagaaggaggatttcgatatctatgacgaagatgagaaccagtctccgcggagctttcagaagaagacgcgacactacttcattgcagcagtcgaaaggctttgggactacggtatgtcatcatcccctcatgtgttgcgcaatagagctcagagtggaagtgttccacagttcaagaaagtcgtctttcaagagtttacagatggcagcttcacacagcctctctatcggggcgagcttaacgaacatttgggactccttggtccctatatccgagccgaagtggaggacaacattatggttacctttaggaatcaagcctctcgcccctacagcttctactcctccctcatcagttatgaggaggatcagagacaaggcgctgaaccacggaagaactttgtgaaaccgaatgagacgaagacctacttctggaaagtacagcaccacatggcccccacaaaagacgaattcgattgcaaagcatgggcgtatttttcagacgttgacttggagaaagatgtacattcaggacttattggtcctttgttggtgtgtcacactaacactctcaatccagcccatggcaggcaggtgacagtccaggaattcgctcttttctttaccatctttgatgagaccaagtcctggtacttcacggaaaacatggagcgcaattgcagagccccctgtaacatacagatggaggaccctacctttaaggaaaattatcggttccacgcaatcaacggatacattatggatacactccctggccttgtgatggctcaggaccaacgaatcaggtggtacctcctcagcatgggttctaatgagaacatacactccattcacttttcaggacatgtgttcactgtccggaagaaagaagagtataagatggccctctacaatttgtatccaggcgtgtttgagaccgttgaaatgcttccctctaaagctggcatctggagagtagagtgcttgatcggagaacatcttcacgcaggtatgagcaccttgttcctcgtgtacagcaacaaatgtcagaccccacttggcatggccagtggacacattcgcgactttcagatcacagcatctggccagtatggacaatgggccccaaagttggctcgcctccattactccggtagcataaatgcgtggtccactaaagaacctttcagctggattaaggtcgatcttcttgcccccatgatcatccacggcattaagacacagggagcgaggcagaaattctcctccctctacatctcacagttcattattatgtatagtttggacggcaagaagtggcaaacttatagaggtaacagtactggaacagacatggtgttcttcggcaacgttgatagctctggcatcaaacacaacatctttaatcctcccataatagctcggtacatcagattgcatccgacccactacagcattaggagtacactccgaatggagcttatgggttgcgacttgaattcctgttcaatgccactcggaatggagtctaaagccatctctgatgcacagataaccgccagtagctactttacgaacatgtttgctacgtggtcaccctctaaggcaaggcttcatttgcaaggccggtctaatgcctggagacctcaggtgaacaacccgaaagaatggctccaggtggactttcagaagaccatgaaagtaacaggtgtcactactcagggagttaagtccttggatactagcatgtatgtgaaggagttccttatttcctcatcacaagatggccaccagtggaccctcttctttcagaatggtaaggtcaaagtgtttcagggcaatcaagacagcttcacacccgtggtgaacagtcttgatcctccactcttgacacgataccttcgaatccatccacagtcttgggagcaccagattgcattgcgcatggaagtacttggatgcgaggctcaggacctctac

SEQ ID NO: 1170 - protein, 1457 aa, synthetic construct
  REGION 1..1457: note = Variant of human B-domain deleted Factor VIII
MQIELSTCFFLCLLRFCFSATRRYYLGAVELSWDYMQSDLGELPVDARFPPRVPKSFPFNTSVVYKKTLFVEFTDHLFNIAKPRPPWMGLLGPTIQAEVYDTVVITLKNMASHPVSLHAVGVSYWKASEGAEYDDQTSQREKEDDKVFPGGSHTYVWQVLKENGPMASDPPCLTYSYLSHVDLVKDLNSGLIGALLVCREGSLAKEKTQTLHKFILLFAVFDEGKSWHSETKNSLMQDRDAASARAWPKMHTVNGYVNRTLPGLIGCHRKSVYWHVIGMGTTPEVHSIFLEGHTFLVRNHRQASLGISPITFLTAQTLLMDLGQFLLFCHIPSHQHDGMEAYVKVDSCPEEPQLRMKNNEEAEDYDDDLTDSEMDVVRFDDDNSPSIIQARSVAKKHPKTWVHYIAAEEEDWDYAPLVLAPDDRSYKSQYLNNGPQRIGRKYKKVRFMAYTDETFKTREAIQHESGILGPLLYGEVGDTLLIIFKNQASRPYNIYPHGITDVRPLYSRRLPKGVKHLKDFPILPGEIFKYKWTVTWEDGPTKSDPRCLTRYYSSFVNMERDLASGLIGPLLICYKESVDQRGNQIMSDKRNVILFSVFDENRSWYLTENIQRFLPNPAGVQLEDPEFQASNIMHSINGYVFDSLQLSVCLHEVAYWYILSIGAQTDFLSVFFSGYTFKHKMVYEDTLTLFPFSGETVFMSMENPGLWILGCHNSDFRNRGMTALLKVSSCDKNTGDYYEDSYEDISAYFDSKNNAIEPRSFSQNPPVLKRHQREITRTTLQSDQEEIDYDDTISVEMKKEDFDIYDEDENQSPRSFQKKTRHYFIAAVERLWDYGMSSSPHVLRNRAQSGSVPQFKKVVFQEFTDGSFTQPLYRGELNEHLGLLGPYIRAEVEDNIMVTFRNQASRPYSFYSSLISYEEDQRQGAEPRKNFVKPNETKTYFWKVQHHMAPTKDEFDCKAWAYFSDVDLEKDVHSGLIGPLLVCHTNTLNPAHGRQVTVQEFALFFTIFDETKSWYFTENMERNCRAPCNIQMEDPTFKENYRFHAINGYIMDTLPGLVMAQDQRIRWYLLSMGSNENIHSIHFSGHVFTVRKKEEYKMALYNLYPGVFETVEMLPSKAGIWRVECLIGEHLHAGMSTLFLVYSNKCQTPLGMASGHIRDFQITASGQYGQWAPKLARLHYSGSINAWSTKEPFSWIKVDLLAPMIIHGIKTQGARQKFSSLYISQFIIMYSLDGKKWQTYRGNSTGTDMVFFGNVDSSGIKHNIFNPPIIARYIRLHPTHYSIRSTLRMELMGCDLNSCSMPLGMESKAISDAQITASSYFTNMFATWSPSKARLHLQGRSNAWRPQVNNPKEWLQVDFQKTMKVTGVTTQGVKSLDTSMYVKEFLISSSQDGHQWTLFFQNGKVKVFQGNQDSFTPVVNSLDPPLLTRYLRIHPQSWEHQIALRMEVLGCEAQDLY

SEQ ID NO: 1171 - DNA, 4371 bp, synthetic construct
  misc_feature 1..4371: note = Variant of human B-domain deleted Factor VIII
  source 1..4371: mol_type = other DNA
atgcagattgaactgtctacctgcttcttcctctgtttgctgaggttctgctttagcgccactagacggtactaccttggcgctgtggagctgtcctgggactatatgcagagtgatttgggagagcttcccgtcgacgcacgatttcctcctcgcgttccaaagtcatttccctttaacacaagcgtggtgtacaagaagacgctcttcgtcgaattcaccgatcacctgttcaatatcgccaaacccagaccaccatggatgggtcttttggggcctaccatacaagcggaggtgtatgacacagttgttatcactctcaagaacatggcttctcatccggtaagtcttcacgcagtgggcgtgtcctactggaaagcttcagaaggagccgagtatgatgatcagacatcccagagggagaaagaagacgacaaggtatttccaggtgggtctcatacctatgtgtggcaagtgctcaaagagaatggccctatggcaagcgatccgccgtgtttgacttacagctacctttcacacgttgacctcgtcaaggacctcaactccgggttgattggagccttgttggtatgcagggaaggatctcttgccaaagagaagacacagaccctccacaagtttatccttctctttgctgtgttcgatgagggcaaaagttggcatagcgaaacgaagaattccctcatgcaggatcgcgacgcagccagcgccagagcttggcccaagatgcacactgtgaacggatatgtcaataggacgcttcctggcttgattgggtgtcatcggaaaagtgtctactggcacgtgatcggaatggggacaacaccagaggtccactccatatttctcgaaggccataccttccttgttcgaaaccacagacaggcatccttggggatctctcccattacctttctcactgcccaaacgctccttatggacttgggtcagttccttctcttttgccatatcccgtcacaccagcatgatggtatggaagcttatgtgaaagtcgacagttgtcctgaggagccacagttgcgcatgaagaataatgaagaagccgaggattacgacgacgatctcaccgattctgagatggacgtggtgaggtttgatgacgacaactctccctccatcattcaagctcggagcgtggcgaagaaacaccccaagacttgggtccactatatagcggcggaagaggaggattgggattacgctcctcttgtattggcaccagatgaccgctcatacaaaagccagtacctcaacaacggaccgcagagaattggccggaagtataagaaagtgcgatttatggcctatacagacgaaacctttaagacaagggaggccatccagcatgagagtgggattttgggacctcttctttacggcgaagttggtgataccctcctcatcatcttcaagaatcaagcttctcgcccctataacatttacccacacgggatcactgacgttaggcctttgtatagcagaagacttcccaaaggcgtgaagcatctcaaagacttccccattttgccaggcgagatctttaagtacaaatggaccgtcacagtggaagatggaccgactaaatcagaccctcgatgccttacgcggtactattcctccttcgtgaatatggagagagatttggcaagcggactcataggaccactcctcatctgttacaaggaatctgtagaccagaggggtaaccagattatgagtgataaacgcaatgtgatcctttttagcgtcttcgacgagaaccggtcctggtacttgaccgagaatatacaaaggttccttcccaaccccgcaggcgttcagttggaagaccctgagtttcaggccagcaatattatgcactcaatcaacggctatgtgtttgatagtctccagctttctgtttgcctccatgaagtagcctattggtacatcttgtcaattggtgctcaaacagacttcctctccgtcttcttctccggctacacctttaagcacaagatggtgtatgaggacactctcacactctttccattttctggagaaaccgtgttcatgagcatggagaatccaggcctttggatcttgggttgccacaacagtgattttcgcaatcggggaatgactgctctcctcaaagtcagcagctgtgataagaacacaggcgactattacgaagattcttacgaggacataagtgcctactttgactccaagaataacgccattgagcccagatcattctcccagaatcctcccgtgcttaaaaggcatcagcgcgaaatcaccagaactactcttcagtctgatcaagaggagattgactatgacgacaccataagcgtggaaatgaagaaggaggatttcgatatctatgacgaagatgagaaccagtctccgcggagctttcagaagaagacgcgacactacttcattgcagcagtcgaaaggctttgggactacggtatgtcatcatcccctcatgtgttgcgcaatagagctcagagtggaagtgttccacagttcaagaaagtcgtctttcaagagtttacagatggcagcttcacacagcctctctatcggggcgagcttaacgaacatttgggactccttggtccctatatccgagccgaagtggaggacaacattatggttacctttaggaatcaagcctctcgcccctacagcttctactcctccctcatcagttatgaggaggatcagagacaaggcgctgaaccacggaagaactttgtgaaaccgaatgagacgaagacctacttctggaaagtacagcaccacatggcccccacaaaagacgaattcgattgcaaagcatgggcgtatttttcagacgttgacttggagaaagatgtacattcaggacttattggtcctttgttggtgtgtcacactaacactctcaatccagcccatggcaggcaggtgacagtccaggaattcgctcttttctttaccatctttgatgagaccaagtcctggtacttcacggaaaacatggagcgcaattgcagagccccctgtaacatacagatggaggaccctacctttaaggaaaattatcggttccacgcaatcaacggatacattatggatacactccctggccttgtgatggctcaggaccaacgaatcaggtggtacctcctcagcatgggttctaatgagaacatacactccattcacttttcaggacatgtgttcactgtccggaagaaagaagagtataagatggccctctacaatttgtatccaggcgtgtttgagaccgttgaaatgcttccctctaaagctggcatctggagagtagagtgcttgatcggagaacatcttcacgcaggtatgagcaccttgttcctcgtgtacagcaacaaatgtcagaccccacttggcatggccagtggaaatattcgcgactttcagatcacagcatctggccagtatggacaatgggccccaaagttggctcgcctccattactccggtagcataaatgcgtggtccactaaagaacctttcagctggattaaggtcgatcttcttgcccccatgatcatccacggcattaagacacagggagcgaggcagaaattctcctccctctacatctcacagttcattattatgtatagtttggacggcaagaagtggcaaacttatagaggtaacagtactggaacagacatggtgttcttcggcaacgttgatagctctggcatcaaacacaacatctttaatcctcccataatagctcggtacatcagattgcatccgacccactacagcattaggagtacactccgaatggagcttatgggttgcgacttgaattcctgttcaatgccactcggaatggagtctaaagccatctctgatgcacagataaccgccagtagctactttacgaacatgtttgctacgtggtcaccctctaaggcaaggcttcatttgcaaggccggtctaatgcctggagacctcaggtgaacaacccgaaagaatggctccaggtggactttcagaagaccatgaaagtaacaggtgtcactactcagggagttaagtccttggatactagcatgtatgtgaaggagttccttatttcctcatcacaagatggccaccagtggaccctcttctttcagaatggtaaggtcaaagtgtttcagggcaatcaagacagcttcacacccgtggtgaacagtcttgatcctccactcttgacacgataccttcgaatccatccacagtcttgggagcaccagattgcattgcgcatggaagtacttggatgcgaggctcaggacctctac

SEQ ID NO: 1172 - protein, 1457 aa, synthetic construct
  REGION 1..1457: note = Variant of human B-domain deleted Factor VIII
MQIELSTCFFLCLLRFCFSATRRYYLGAVELSWDYMQSDLGELPVDARFPPRVPKSFPFNTSVVYKKTLFVEFTDHLFNIAKPRPPWMGLLGPTIQAEVYDTVVITLKNMASHPVSLHAVGVSYWKASEGAEYDDQTSQREKEDDKVFPGGSHTYVWQVLKENGPMASDPPCLTYSYLSHVDLVKDLNSGLIGALLVCREGSLAKEKTQTLHKFILLFAVFDEGKSWHSETKNSLMQDRDAASARAWPKMHTVNGYVNRTLPGLIGCHRKSVYWHVIGMGTTPEVHSIFLEGHTFLVRNHRQASLGISPITFLTAQTLLMDLGQFLLFCHIPSHQHDGMEAYVKVDSCPEEPQLRMKNNEEAEDYDDDLTDSEMDVVRFDDDNSPSIIQARSVAKKHPKTWVHYIAAEEEDWDYAPLVLAPDDRSYKSQYLNNGPQRIGRKYKKVRFMAYTDETFKTREAIQHESGILGPLLYGEVGDTLLIIFKNQASRPYNIYPHGITDVRPLYSRRLPKGVKHLKDFPILPGEIFKYKWTVTVEDGPTKSDPRCLTRYYSSFVNMERDLASGLIGPLLICYKESVDQRGNQIMSDKRNVILFSVFDENRSWYLTENIQRFLPNPAGVQLEDPEFQASNIMHSINGYVFDSLQLSVCLHEVAYWYILSIGAQTDFLSVFFSGYTFKHKMVYEDTLTLFPFSGETVFMSMENPGLWILGCHNSDFRNRGMTALLKVSSCDKNTGDYYEDSYEDISAYFDSKNNAIEPRSFSQNPPVLKRHQREITRTTLQSDQEEIDYDDTISVEMKKEDFDIYDEDENQSPRSFQKKTRHYFIAAVERLWDYGMSSSPHVLRNRAQSGSVPQFKKVVFQEFTDGSFTQPLYRGELNEHLGLLGPYIRAEVEDNIMVTFRNQASRPYSFYSSLISYEEDQRQGAEPRKNFVKPNETKTYFWKVQHHMAPTKDEFDCKAWAYFSDVDLEKDVHSGLIGPLLVCHTNTLNPAHGRQVTVQEFALFFTIFDETKSWYFTENMERNCRAPCNIQMEDPTFKENYRFHAINGYIMDTLPGLVMAQDQRIRWYLLSMGSNENIHSIHFSGHVFTVRKKEEYKMALYNLYPGVFETVEMLPSKAGIWRVECLIGEHLHAGMSTLFLVYSNKCQTPLGMASGNIRDFQITASGQYGQWAPKLARLHYSGSINAWSTKEPFSWIKVDLLAPMIIHGIKTQGARQKFSSLYISQFIIMYSLDGKKWQTYRGNSTGTDMVFFGNVDSSGIKHNIFNPPIIARYIRLHPTHYSIRSTLRMELMGCDLNSCSMPLGMESKAISDAQITASSYFTNMFATWSPSKARLHLQGRSNAWRPQVNNPKEWLQVDFQKTMKVTGVTTQGVKSLDTSMYVKEFLISSSQDGHQWTLFFQNGKVKVFQGNQDSFTPVVNSLDPPLLTRYLRIHPQSWEHQIALRMEVLGCEAQDLY

SEQ ID NO: 1173 - DNA, 4371 bp, synthetic construct
  misc_feature 1..4371: note = Variant of human B-domain deleted Factor VIII
  source 1..4371: mol_type = other DNA
atgcagattgaactgtctacctgcttcttcctctgtttgctgaggccgtgctttagcgccactagacggtactaccttggcgctgtggagctgtcctgggactatatgcagagtgatttgggagagcttcccgtcgacgcacgatttcctcctcgcgttccaaagtcatttccctttaacacaagcgtggtgtacaagaagacgctcttcgtcgaattcaccgatcacctgttcaatatcgccaaacccagaccaccatggatgggtcttttggggcctaccatacaagcggaggtgtatgacacagttgttatcactctcaagaacatggcttctcatccggtaagtcttcacgcagtgggcgtgtcctactggaaagcttcagaaggagccgagtatgatgatcagacatcccagagggagaaagaagacgacaaggtatttccaggtgggtctcatacctatgtgtggcaagtgctcaaagagaatggccctatggcaagcgatccgccgtgtttgacttacagctacctttcacacgttgacctcgtcaaggacctcaactccgggttgattggagccttgttggtatgcagggaaggatctcttgccaaagagaagacacagaccctccacaagtttatccttctctttgctgtgttcgatgagggcaaaagttggcatagcgaaacgaagaattccctcatgcaggatcgcgacgcagccagcgccagagcttggcccaagatgcacactgtgaacggatatgtcaataggacgcttcctggcttgattgggtgtcatcggaaaagtgtctactggcacgtgatcggaatggggacaacaccagaggtccactccatatttctcgaaggccataccttccttgttcgaaaccacagacaggcatccttggggatctctcccattacctttctcactgcccaaacgctccttatggacttgggtcagttccttctcttttgccatatcccgtcacaccagcatgatggtatggaagcttatgtgaaagtcgacagttgtcctgaggagccacagttgcgcatgaagaataatgaagaagccgaggattacgacgacgatctcaccgattctgagatggacgtggtgaggtttgatgacgacaactctccctccatcattcaagctcggagcgtggcgaagaaacaccccaagacttgggtccactatatagcggcggaagaggaggattgggattacgctcctcttgtattggcaccagatgaccgctcatacaaaagccagtacctcaacaacggaccgcagagaattggccggaagtataagaaagtgcgatttatggcctatacagacgaaacctttaagacaagggaggccatccagcatgagagtgggattttgggacctcttctttacggcgaagttggtgataccctcctcatcatcttcaagaatcaagcttctcgcccctataacatttacccacacgggatcactgacgttaggcctttgtatagcagaagacttcccaaaggcgtgaagcatctcaaagacttccccattttgccaggcgagatctttaagtacaaatggaccgtcacagtggaagatggaccgactaaatcagaccctcgatgccttacgcggtactattcctccttcgtgaatatggagagagatttggcaagcggactcataggaccactcctcatctgttacaaggaatctgtagaccagaggggtaaccagattatgagtgataaacgcaatgtgatcctttttagcgtcttcgacgagaaccggtcctggtacttgaccgagaatatacaaaggttccttcccaaccccgcaggcgttcagttggaagaccctgagtttcaggccagcaatattatgcactcaatcaacggctatgtgtttgatagtctccagctttctgtttgcctccatgaagtagcctattggtacatcttgtcaattggtgctcaaacagacttcctctccgtcttcttctccggctacacctttaagcacaagatggtgtatgaggacactctcacactctttccattttctggagaaaccgtgttcatgagcatggagaatccaggcctttggatcttgggttgccacaacagtgattttcgcaatcggggaatgactgctctcctcaaagtcagcagctgtgataagaacacaggcgactattacgaagattcttacgaggacataagtgcctactttgactccaagaataacgccattgagcccagatcattctcccagaatcctcccgtgcttaaaaggcatcagcgcgaaatcaccagaactactcttcagtctgatcaagaggagattgactatgacgacaccataagcgtggaaatgaagaaggaggatttcgatatctatgacgaagatgagaaccagtctccgcggagctttcagaagaagacgcgacactacttcattgcagcagtcgaaaggctttgggactacggtatgtcatcatcccctcatgtgttgcgcaatagagctcagagtggaagtgttccacagttcaagaaagtcgtctttcaagagtttacagatggcagcttcacacagcctctctatcggggcgagcttaacgaacatttgggactccttggtccctatatccgagccgaagtggaggacaacattatggttacctttaggaatcaagcctctcgcccctacagcttctactcctccctcatcagttatgaggaggatcagagacaaggcgctgaaccacggaagaactttgtgaaaccgaatgagacgaagacctacttctggaaagtacagcaccacatggcccccacaaaagacgaattcgattgcaaagcatgggcgtatttttcagacgttgacttggagaaagatgtacattcaggacttattggtcctttgttggtgtgtcacactaacactctcaatccagcccatggcaggcaggtgacagtccaggaattcgctcttttctttaccatctttgatgagaccaagtcctggtacttcacggaaaacatggagcgcaattgcagagccccctgtaacatacagatggaggaccctacctttaaggaaaattatcggttccacgcaatcaacggatacattatggatacactccctggccttgtgatggctcaggaccaacgaatcaggtggtacctcctcagcatgggttctaatgagaacatacactccattcacttttcaggacatgtgttcactgtccggaagaaagaagagtataagatggccctctacaatttgtatccaggcgtgtttgagaccgttgaaatgcttccctctaaagctggcatctggagagtagagtgcttgatcggagaacatcttcacgcaggtatgagcaccttgttcctcgtgtacagcaacaaatgtcagaccccacttggcatggccagtggacacattcgcgactttcagatcacagcatctggccagtatggacaatgggccccaaagttggctcgcctccattactccggtagcataaatgcgtggtccactaaagaacctttcagctggattaaggtcgatcttcttgcccccatgatcatccacggcattaagacacagggagcgaggcagaaattctcctccctctacatctcacagttcattattatgtatagtttggacggcaagaagtggcaaacttatagaggtaacagtactggaacagacatggtgttcttcggcaacgttgatagctctggcatcaaacacaacatctttaatcctcccataatagctcggtacatcagattgcatccgacccactacagcattaggagtacactccgaatggagcttatgggttgcgacttgaattcctgttcaatgccactcggaatggagtctaaagccatctctgatgcacagataaccgccagtagctactttacgaacatgtttgctacgtggtcaccctctaaggcaaggcttcatttgcaaggccggtctaatgcctggagacctcaggtgaacaacccgaaagaatggctccaggtggactttcagaagaccatgaaagtaacaggtgtcactactcagggagttaagtccttggatactagcatgtatgtgaaggagttccttatttcctcatcacaagatggccaccagtggaccctcttctttcagaatggtaaggtcaaagtgtttcagggcaatcaagacagcttcacacccgtggtgaacagtcttgatcctccactcttgacacgataccttcgaatccatccacagtcttgggagcaccagattgcattgcgcatggaagtacttggatgcgaggctcaggacctctac

SEQ ID NO: 1174 - protein, 1457 aa, synthetic construct
  REGION 1..1457: note = Variant of human B-domain deleted Factor VIII
MQIELSTCFFLCLLRPCFSATRRYYLGAVELSWDYMQSDLGELPVDARFPPRVPKSFPFNTSVVYKKTLFVEFTDHLFNIAKPRPPWMGLLGPTIQAEVYDTVVITLKNMASHPVSLHAVGVSYWKASEGAEYDDQTSQREKEDDKVFPGGSHTYVWQVLKENGPMASDPPCLTYSYLSHVDLVKDLNSGLIGALLVCREGSLAKEKTQTLHKFILLFAVFDEGKSWHSETKNSLMQDRDAASARAWPKMHTVNGYVNRTLPGLIGCHRKSVYWHVIGMGTTPEVHSIFLEGHTFLVRNHRQASLGISPITFLTAQTLLMDLGQFLLFCHIPSHQHDGMEAYVKVDSCPEEPQLRMKNNEEAEDYDDDLTDSEMDVVRFDDDNSPSIIQARSVAKKHPKTWVHYIAAEEEDWDYAPLVLAPDDRSYKSQYLNNGPQRIGRKYKKVRFMAYTDETFKTREAIQHESGILGPLLYGEVGDTLLIIFKNQASRPYNIYPHGITDVRPLYSRRLPKGVKHLKDFPILPGEIFKYKWTVTVEDGPTKSDPRCLTRYYSSFVNMERDLASGLIGPLLICYKESVDQRGNQIMSDKRNVILFSVFDENRSWYLTENIQRFLPNPAGVQLEDPEFQASNIMHSINGYVFDSLQLSVCLHEVAYWYILSIGAQTDFLSVFFSGYTFKHKMVYEDTLTLFPFSGETVFMSMENPGLWILGCHNSDFRNRGMTALLKVSSCDKNTGDYYEDSYEDISAYFDSKNNAIEPRSFSQNPPVLKRHQREITRTTLQSDQEEIDYDDTISVEMKKEDFDIYDEDENQSPRSFQKKTRHYFIAAVERLWDYGMSSSPHVLRNRAQSGSVPQFKKVVFQEFTDGSFTQPLYRGELNEHLGLLGPYIRAEVEDNIMVTFRNQASRPYSFYSSLISYEEDQRQGAEPRKNFVKPNETKTYFWKVQHHMAPTKDEFDCKAWAYFSDVDLEKDVHSGLIGPLLVCHTNTLNPAHGRQVTVQEFALFFTIFDETKSWYFTENMERNCRAPCNIQMEDPTFKENYRFHAINGYIMDTLPGLVMAQDQRIRWYLLSMGSNENIHSIHFSGHVFTVRKKEEYKMALYNLYPGVFETVEMLPSKAGIWRVECLIGEHLHAGMSTLFLVYSNKCQTPLGMASGHIRDFQITASGQYGQWAPKLARLHYSGSINAWSTKEPFSWIKVDLLAPMIIHGIKTQGARQKFSSLYISQFIIMYSLDGKKWQTYRGNSTGTDMVFFGNVDSSGIKHNIFNPPIIARYIRLHPTHYSIRSTLRMELMGCDLNSCSMPLGMESKAISDAQITASSYFTNMFATWSPSKARLHLQGRSNAWRPQVNNPKEWLQVDFQKTMKVTGVTTQGVKSLDTSMYVKEFLISSSQDGHQWTLFFQNGKVKVFQGNQDSFTPVVNSLDPPLLTRYLRIHPQSWEHQIALRMEVLGCEAQDLY

SEQ ID NO: 1175 - DNA, 4371 bp, synthetic construct
  misc_feature 1..4371: note = Variant of human B-domain deleted Factor VIII
  source 1..4371: mol_type = other DNA
atgcagattgaactgtctacctgcttcttcctctgtttgctgaggttctgctttagcgccactagacggtactaccttggcgctgtggagctgtcctgggactatatgcagagtgatttgggagagcttcccgtcgacgcacgatttcctcctcgcgttccaaagtcatttccctttaacacaagcgtggtgtacaagaagacgctcttcgtcgaattcaccgatcacctgttcaatatcgccaaacccagaccaccatggatgggtcttttggggcctaccatacaagcggaggtgtatgacacagttgttatcactctcaagaacatggcttctcatccggtaagtcttcacgcagtgggcgtgtcctactggaaagcttcagaaggagccgagtatgatgatcagacatcccagagggagaaagaagacgacaaggtatttccaggtgggtctcatacctatgtgtggcaagtgctcaaagagaatggccctatggcaagcgatccgccgtgtttgacttacagctacctttcacacgttgacctcgtcaaggacctcaactccgggttgattggagccttgttggtatgcagggaaggatctcttgccaaagagaagacacagaccctccacaagtttatccttctctttgctgtgttcgatgagggcaaaagttggcatagcgaaacgaagaattccctcatgcaggatcgcgacgcagccagcgccagagcttggcccaagatgcacactgtgaacggatatgtcaataggacgcttcctggcttgattgggtgtcatcggaaaagtgtctactggcacgtgatcggaatggggacaacaccagaggtccactccatatttctcgaaggccataccttccttgttcgaaaccacagacaggcatccttggggatctctcccattacctttctcactgcccaaacgctccttatggacttgggtcagttccttctcttttgccatatcccgtcacaccagcatgatggtatggaagcttatgtgaaagtcgacagttgtcctgaggagccacagttgcgcatgaagaataatgaagaagccgaggattacgacgacgatctcaccgattctgagatggacgtggtgaggtttgatgacgacaactctccctccatcattcaagctcggagcgtggcgaagaaacaccccaagacttgggtccactatatagcggcggaagaggaggattgggattacgctcctcttgtattggcaccagatgaccgctcatacaaaagccagtacctcaacaacggaccgcagagaattggccggaagtataagaaagtgcgatttatggcctatacagacgaaacctttaagacaagggaggccatccagcatgagagtgggattttgggacctcttctttacggcgaagttggtgataccctcctcatcatcttcaagaatcaagcttctcgcccctataacatttacccacacgggatcactgacgttaggcctttgtatagcagaagacttcccaaaggcgtgaagcatctcaaagacttccccattttgccaggcgagatctttaagtacaaatggaccgtcacagtggaagatggaccgactaaatcagaccctcgatgccttacgcggtactattcctccttcgtgaatatggagagagatttggcaagcggactcataggaccactcctcatctgttacaaggaatctgtagaccagaggggtaaccagattatgagtgataaacgcaatgtgatcctttttagcgtcttcgacgagaaccggtcctggtacttgaccgagaatatacaaaggttccttcccaaccccgcaggcgttcagttggaagaccctgagtttcaggccagcaatattatgcactcaatcaacggctatgtgtttgatagtctccagctttctgtttgcctccatgaagtagcctattggtacatcttgtcaattggtgctcaaacagacttcctctccgtcttcttctccggctacacctttaagcacaagatggtgtatgaggacactctcacactctttccattttctggagaaaccgtgttcatgagcatggagaatccaggcctttggatcttgggttgccacaacagtgattttcgcaatcggggaatgactgctctcctcaaagtcagcagctgtgataagaacacaggcgactattacgaagattcttacgaggacataagtgcctactttgactccaagaataacgccattgagcccagatcattctcccagaatcctcccgtgcttaaaaggcatcagcgcgaaatcaccagaactactcttcagtctgatcaagaggagattgactatgacgacaccataagcgtggaaatgaagaaggaggatttcgatatctatgacgaagatgagaaccagtctccgcggagctttgcgaagaagacgcgacactacttcattgcagcagtcgaaaggctttgggactacggtatgtcatcatcccctcatgtgttgcgcaatagagctcagagtggaagtgttccacagttcaagaaagtcgtctttcaagagtttacagatggcagcttcacacagcctctctatcggggcgagcttaacgaacatttgggactccttggtccctatatccgagccgaagtggaggacaacattatggttacctttaggaatcaagcctctcgcccctacagcttctactcctccctcatcagttatgaggaggatcagagacaaggcgctgaaccacggaagaactttgtgaaaccgaatgagacgaagacctacttctggaaagtacagcaccacatggcccccacaaaagacgaattcgattgcaaagcatgggcgtatttttcagacgttgacttggagaaagatgtacattcaggacttattggtcctttgttggtgtgtcacactaacactctcaatccagcccatggcaggcaggtgacagtccaggaattcgctcttttctttaccatctttgatgagaccaagtcctggtacttcacggaaaacatggagcgcaattgcagagccccctgtaacatacagatggaggaccctacctttaaggaaaattatcggttccacgcaatcaacggatacattatggatacactccctggccttgtgatggctcaggaccaacgaatcaggtggtacctcctcagcatgggttctaatgagaacatacactccattcacttttcaggacatgtgttcactgtccggaagaaagaagagtataagatggccctctacaatttgtatccaggcgtgtttgagaccgttgaaatgcttccctctaaagctggcatctggagagtagagtgcttgatcggagaacatcttcacgcaggtatgagcaccttgttcctcgtgtacagcaacaaatgtcagaccccacttggcatggccagtggacacattcgcgactttcagatcacagcatctggccagtatggacaatgggccccaaagttggctcgcctccattactccggtagcataaatgcgtggtccactaaagaacctttcagctggattaaggtcgatcttcttgcccccatgatcatccacggcattaagacacagggagcgaggcagaaattctcctccctctacatctcacagttcattattatgtatagtttggacggcaagaagtggcaaacttatagaggtaacagtactggaacagacatggtgttcttcggcaacgttgatagctctggcatcaaacacaacatctttaatcctcccataatagctcggtacatcagattgcatccgacccactacagcattaggagtacactccgaatggagcttatgggttgcgacttgaattcctgttcaatgccactcggaatggagtctaaagccatctctgatgcacagataaccgccagtagctactttacgaacatgtttgctacgtggtcaccctctaaggcaaggcttcatttgcaaggccggtctaatgcctggagacctcaggtgaacaacccgaaagaatggctccaggtggactttcagaagaccatgaaagtaacaggtgtcactactcagggagttaagtccttggatactagcatgtatgtgaaggagttccttatttcctcatcacaagatggccaccagtggaccctcttctttcagaatggtaaggtcaaagtgtttcagggcaatcaagacagcttcacacccgtggtgaacagtcttgatcctccactcttgacacgataccttcgaatccatccacagtcttgggagcaccagattgcattgcgcatggaagtacttggatgcgaggctcaggacctctac

SEQ ID NO: 1176 - protein, 1457 aa, synthetic construct
  REGION 1..1457: note = Variant of human B-domain deleted Factor VIII
MQIELSTCFFLCLLRFCFSATRRYYLGAVELSWDYMQSDLGELPVDARFPPRVPKSFPFNTSVVYKKTLFVEFTDHLFNIAKPRPPWMGLLGPTIQAEVYDTVVITLKNMASHPVSLHAVGVSYWKASEGAEYDDQTSQREKEDDKVFPGGSHTYVWQVLKENGPMASDPPCLTYSYLSHVDLVKDLNSGLIGALLVCREGSLAKEKTQTLHKFILLFAVFDEGKSWHSETKNSLMQDRDAASARAWPKMHTVNGYVNRTLPGLIGCHRKSVYWHVIGMGTTPEVHSIFLEGHTFLVRNHRQASLGISPITFLTAQTLLMDLGQFLLFCHIPSHQHDGMEAYVKVDSCPEEPQLRMKNNEEAEDYDDDLTDSEMDVVRFDDDNSPSIIQARSVAKKHPKTWVHYIAAEEEDWDYAPLVLAPDDRSYKSQYLNNGPQRIGRKYKKVRFMAYTDETFKTREAIQHESGILGPLLYGEVGDTLLIIFKNQASRPYNIYPHGITDVRPLYSRRLPKGVKHLKDFPILPGEIFKYKWTVTVEDGPTKSDPRCLTRYYSSFVNMERDLASGLIGPLLICYKESVDQRGNQIMSDKRNVILFSVFDENRSWYLTENIQRFLPNPAGVQLEDPEFQASNIMHSINGYVFDSLQLSVCLHEVAYWYILSIGAQTDFLSVFFSGYTFKHKMVYEDTLTLFPFSGETVFMSMENPGLWILGCHNSDFRNRGMTALLKVSSCDKNTGDYYEDSYEDISAYFDSKNNAIEPRSFSQNPPVLKRHQREITRTTLQSDQEEIDYDDTISVEMKKEDFDIYDEDENQSPRSFAKKTRHYFIAAVERLWDYGMSSSPHVLRNRAQSGSVPQFKKVVFQEFTDGSFTQPLYRGELNEHLGLLGPYIRAEVEDNIMVTFRNQASRPYSFYSSLISYEEDQRQGAEPRKNFVKPNETKTYFWKVQHHMAPTKDEFDCKAWAYFSDVDLEKDVHSGLIGPLLVCHTNTLNPAHGRQVTVQEFALFFTIFDETKSWYFTENMERNCRAPCNIQMEDPTFKENYRFHAINGYIMDTLPGLVMAQDQRIRWYLLSMGSNENIHSIHFSGHVFTVRKKEEYKMALYNLYPGVFETVEMLPSKAGIWRVECLIGEHLHAGMSTLFLVYSNKCQTPLGMASGHIRDFQITASGQYGQWAPKLARLHYSGSINAWSTKEPFSWIKVDLLAPMIIHGIKTQGARQKFSSLYISQFIIMYSLDGKKWQTYRGNSTGTDMVFFGNVDSSGIKHNIFNPPIIARYIRLHPTHYSIRSTLRMELMGCDLNSCSMPLGMESKAISDAQITASSYFTNMFATWSPSKARLHLQGRSNAWRPQVNNPKEWLQVDFQKTMKVTGVTTQGVKSLDTSMYVKEFLISSSQDGHQWTLFFQNGKVKVFQGNQDSFTPVVNSLDPPLLTRYLRIHPQSWEHQIALRMEVLGCEAQDLY

SEQ ID NO: 1177 - DNA, 4371 bp, synthetic construct
  misc_feature 1..4371: note = Variant of human B-domain deleted Factor VIII
  source 1..4371: mol_type = other DNA
atgcagattgaactgtctacctgcttcttcctctgtttgctgaggttctgcaggagcgccactagacggtactaccttggcgctgtggagctgtcctgggactatatgcagagtgatttgggagagcttcccgtcgacgcacgatttcctcctcgcgttccaaagtcatttccctttaacacaagcgtggtgtacaagaagacgctcttcgtcgaattcaccgatcacctgttcaatatcgccaaacccagaccaccatggatgggtcttttggggcctaccatacaagcggaggtgtatgacacagttgttatcactctcaagaacatggcttctcatccggtaagtcttcacgcagtgggcgtgtcctactggaaagcttcagaaggagccgagtatgatgatcagacatcccagagggagaaagaagacgacaaggtatttccaggtgggtctcatacctatgtgtggcaagtgctcaaagagaatggccctatggcaagcgatccgccgtgtttgacttacagctacctttcacacgttgacctcgtcaaggacctcaactccgggttgattggagccttgttggtatgcagggaaggatctcttgccaaagagaagacacagaccctccacaagtttatccttctctttgctgtgttcgatgagggcaaaagttggcatagcgaaacgaagaattccctcatgcaggatcgcgacgcagccagcgccagagcttggcccaagatgcacactgtgaacggatatgtcaataggacgcttcctggcttgattgggtgtcatcggaaaagtgtctactggcacgtgatcggaatggggacaacaccagaggtccactccatatttctcgaaggccataccttccttgttcgaaaccacagacaggcatccttggggatctctcccattacctttctcactgcccaaacgctccttatggacttgggtcagttccttctcttttgccatatcccgtcacaccagcatgatggtatggaagcttatgtgaaagtcgacagttgtcctgaggagccacagttgcgcatgaagaataatgaagaagccgaggattacgacgacgatctcaccgattctgagatggacgtggtgaggtttgatgacgacaactctccctccatcattcaagctcggagcgtggcgaagaaacaccccaagacttgggtccactatatagcggcggaagaggaggattgggattacgctcctcttgtattggcaccagatgaccgctcatacaaaagccagtacctcaacaacggaccgcagagaattggccggaagtataagaaagtgcgatttatggcctatacagacgaaacctttaagacaagggaggccatccagcatgagagtgggattttgggacctcttctttacggcgaagttggtgataccctcctcatcatcttcaagaatcaagcttctcgcccctataacatttacccacacgggatcactgacgttaggcctttgtatagcagaagacttcccaaaggcgtgaagcatctcaaagacttccccattttgccaggcgagatctttaagtacaaatggaccgtcacagtggaagatggaccgactaaatcagaccctcgatgccttacgcggtactattcctccttcgtgaatatggagagagatttggcaagcggactcataggaccactcctcatctgttacaaggaatctgtagaccagaggggtaaccagattatgagtgataaacgcaatgtgatcctttttagcgtcttcgacgagaaccggtcctggtacttgaccgagaatatacaaaggttccttcccaaccccgcaggcgttcagttggaagaccctgagtttcaggccagcaatattatgcactcaatcaacggctatgtgtttgatagtctccagctttctgtttgcctccatgaagtagcctattggtacatcttgtcaattggtgctcaaacagacttcctctccgtcttcttctccggctacacctttaagcacaagatggtgtatgaggacactctcacactctttccattttctggagaaaccgtgttcatgagcatggagaatccaggcctttggatcttgggttgccacaacagtgattttcgcaatcggggaatgactgctctcctcaaagtcagcagctgtgataagaacacaggcgactattacgaagattcttacgaggacataagtgcctactttgactccaagaataacgccattgagcccagatcattctcccagaatcctcccgtgcttaaaaggcatcagcgcgaaatcaccagaactactcttcagtctgatcaagaggagattgactatgacgacaccataagcgtggaaatgaagaaggaggatttcgatatctatgacgaagatgagaaccagtctccgcggagctttcagaagaagacgcgacactacttcattgcagcagtcgaaaggctttgggactacggtatgtcatcatcccctcatgtgttgcgcaatagagctcagagtggaagtgttccacagttcaagaaagtcgtctttcaagagtttacagatggcagcttcacacagcctctctatcggggcgagcttaacgaacatttgggactccttggtccctatatccgagccgaagtggaggacaacattatggttacctttaggaatcaagcctctcgcccctacagcttctactcctccctcatcagttatgaggaggatcagagacaaggcgctgaaccacggaagaactttgtgaaaccgaatgagacgaagacctacttctggaaagtacagcaccacatggcccccacaaaagacgaattcgattgcaaagcatgggcgtatttttcagacgttgacttggagaaagatgtacattcaggacttattggtcctttgttggtgtgtcacactaacactctcaatccagcccatggcaggcaggtgacagtccaggaattcgctcttttctttaccatctttgatgagaccaagtcctggtacttcacggaaaacatggagcgcaattgcagagccccctgtaacatacagatggaggaccctacctttaaggaaaattatcggttccacgcaatcaacggatacattatggatacactccctggccttgtgatggctcaggaccaacgaatcaggtggtacctcctcagcatgggttctaatgagaacatacactccattcacttttcaggacatgtgttcactgtccggaagaaagaagagtataagatggccctctacaatttgtatccaggcgtgtttgagaccgttgaaatgcttccctctaaagctggcatctggagagtagagtgcttgatcggagaacatcttcacgcaggtatgagcaccttgttcctcgtgtacagcaacaaatgtcagaccccacttggcatggccagtggacacattcgcgactttcagatcacagcatctggccagtatggacaatgggccccaaagttggctcgcctccattactccggtagcataaatgcgtggtccactaaagaacctttcagctggattaaggtcgatcttcttgcccccatgatcatccacggcattaagacacagggagcgaggcagaaattctcctccctctacatctcacagttcattattatgtatagtttggacggcaagaagtggcaaacttatagaggtaacagtactggaacagacatggtgttcttcggcaacgttgatagctctggcatcaaacacaacatctttaatcctcccataatagctcggtacatcagattgcatccgacccactacagcattaggagtacactccgaatggagcttatgggttgcgacttgaattcctgttcaatgccactcggaatggagtctaaagccatctctgatgcacagataaccgccagtagctactttacgaacatgtttgctacgtggtcaccctctaaggcaaggcttcatttgcaaggccggtctaatgcctggagacctcaggtgaacaacccgaaagaatggctccaggtggactttcagaagaccatgaaagtaacaggtgtcactactcagggagttaagtccttggatactagcatgtatgtgaaggagttccttatttcctcatcacaagatggccaccagtggaccctcttctttcagaatggtaaggtcaaagtgtttcagggcaatcaagacagcttcacacccgtggtgaacagtcttgatcctccactcttgacacgataccttcgaatccatccacagtcttgggagcaccagattgcattgcgcatggaagtacttggatgcgaggctcaggacctctac

SEQ ID NO: 1178 - protein, 1457 aa, synthetic construct
  REGION 1..1457: note = Variant of human B-domain deleted Factor VIII
MQIELSTCFFLCLLRFCRSATRRYYLGAVELSWDYMQSDLGELPVDARFPPRVPKSFPFNTSVVYKKTLFVEFTDHLFNIAKPRPPWMGLLGPTIQAEVYDTVVITLKNMASHPVSLHAVGVSYWKASEGAEYDDQTSQREKEDDKVFPGGSHTYVWQVLKENGPMASDPPCLTYSYLSHVDLVKDLNSGLIGALLVCREGSLAKEKTQTLHKFILLFAVFDEGKSWHSETKNSLMQDRDAASARAWPKMHTVNGYVNRTLPGLIGCHRKSVYWHVIGMGTTPEVHSIFLEGHTFLVRNHRQASLGISPITFLTAQTLLMDLGQFLLFCHIPSHQHDGMEAYVKVDSCPEEPQLRMKNNEEAEDYDDDLTDSEMDVVRFDDDNSPSIIQARSVAKKHPKTWVHYIAAEEEDWDYAPLVLAPDDRSYKSQYLNNGPQRIGRKYKKVRFMAYTDETFKTREAIQHESGILGPLLYGEVGDTLLIIFKNQASRPYNIYPHGITDVRPLYSRRLPKGVKHLKDFPILPGEIFKYKWTVTVEDGPTKSDPRCLTRYYSSFVNMERDLASGLIGPLLICYKESVDQRGNQIMSDKRNVILFSVFDENRSWYLTENIQRFLPNPAGVQLEDPEFQASNIMHSINGYVFDSLQLSVCLHEVAYWYILSIGAQTDFLSVFFSGYTFKHKMVYEDTLTLFPFSGETVFMSMENPGLWILGCHNSDFRNRGMTALLKVSSCDKNTGDYYEDSYEDISAYFDSKNNAIEPRSFSQNPPVLKRHQREITRTTLQSDQEEIDYDDTISVEMKKEDFDIYDEDENQSPRSFQKKTRHYFIAAVERLWDYGMSSSPHVLRNRAQSGSVPQFKKVVFQEFTDGSFTQPLYRGELNEHLGLLGPYIRAEVEDNIMVTFRNQASRPYSFYSSLISYEEDQRQGAEPRKNFVKPNETKTYFWKVQHHMAPTKDEFDCKAWAYFSDVDLEKDVHSGLIGPLLVCHTNTLNPAHGRQVTVQEFALFFTIFDETKSWYFTENMERNCRAPCNIQMEDPTFKENYRFHAINGYIMDTLPGLVMAQDQRIRWYLLSMGSNENIHSIHFSGHVFTVRKKEEYKMALYNLYPGVFETVEMLPSKAGIWRVECLIGEHLHAGMSTLFLVYSNKCQTPLGMASGHIRDFQITASGQYGQWAPKLARLHYSGSINAWSTKEPFSWIKVDLLAPMIIHGIKTQGARQKFSSLYISQFIIMYSLDGKKWQTYRGNSTGTDMVFFGNVDSSGIKHNIFNPPIIARYIRLHPTHYSIRSTLRMELMGCDLNSCSMPLGMESKAISDAQITASSYFTNMFATWSPSKARLHLQGRSNAWRPQVNNPKEWLQVDFQKTMKVTGVTTQGVKSLDTSMYVKEFLISSSQDGHQWTLFFQNGKVKVFQGNQDSFTPVVNSLDPPLLTRYLRIHPQSWEHQIALRMEVLGCEAQDLY

SEQ ID NO: 1179 - DNA, 4371 bp, synthetic construct
  misc_feature 1..4371: note = Variant of human B-domain deleted Factor VIII
  source 1..4371: mol_type = other DNA
atgcagattgaactgtctacctgcttcttcctctgtttgctgaggttctgctttagcgccactagacggtactaccttggcgctgtggagctgtcctgggactatatgcagagtgatttgggagagcttcccgtcgacgcacgatttcctcctcgcgttccaaagtcatttccctttaacacaagcgtggtgtacaagaagacgctcttcgtcgaattcaccgatcacctgttcaatatcgccaaacccagaccaccatggatgggtcttttggggcctaccatacaagcggaggtgtatgacacagttgttatcactctcaagaacatggcttctcatccggtaagtcttcacgcagtgggcgtgtcctactggaaagcttcagaaggagccgagtatgatgatcagacatcccagagggagaaagaagacgacaaggtatttccaggtgggtctcatacctatgtgtggcaagtgctcaaagagaatggccctatggcaagcgatccgccgtgtttgacttacagctacctttcacacgttgacctcgtcaaggacctcaactccgggttgattggagccttgttggtatgcagggaaggatctcttgccaaagagaagacacagaccctccacaagtttatccttctctttgctgtgttcgatgagggcaaaagttggcatagcgaaacgaagaattccctcatgcaggatcgcgacgcagccagcgccagagcttggcccaagatgcacactgtgaacggatatgtcaataggacgcttcctggcttgattgggtgtcatcggaaaagtgtctactggcacgtgatcggaatggggacaacaccagaggtccactccatatttctcgaaggccataccttccttgttcgaaaccacagacaggcatccttggggatctctcccattacctttctcactgcccaaacgctccttatggacttgggtcagttccttctcttttgccatatcccgtcacaccagcatgatggtatggaagcttatgtgaaagtcgacagttgtcctgaggagccacagttgcgcatgaagaataatgaagaagccgaggattacgacgacgatctcaccgattctgagatggacgtggtgaggtttgatgacgacaactctccctccatcattcaagctcggagcgtggcgaagaaacaccccaagacttgggtccactatatagcggcggaagaggaggattgggattacgctcctcttgtattggcaccagatgaccgctcatacaaaagccagtacctcaacaacggaccgcagagaattggccggaagtataagaaagtgcgatttatggcctatacagacgaaacctttaagacaagggaggccatccagcatgagagtgggattttgggacctcttctttacggcgaagttggtgataccctcctcatcatcttcaagaatcaagcttctcgcccctataacatttacccacacgggatcactgacgttaggcctttgtatagcagaagacttcccaaaggcgtgaagcatctcaaagacttccccattttgccaggcgagatctttaagtacaaatggaccgtcacagtggaagatggaccgactaaatcagaccctcgatgccttacgcggtggtattcctccttcgtgaatatggagagagatttggcaagcggactcataggaccactcctcatctgttacaaggaatctgtagaccagaggggtaaccagattatgagtgataaacgcaatgtgatcctttttagcgtcttcgacgagaaccggtcctggtacttgaccgagaatatacaaaggttccttcccaaccccgcaggcgttcagttggaagaccctgagtttcaggccagcaatattatgcactcaatcaacggctatgtgtttgatagtctccagctttctgtttgcctccatgaagtagcctattggtacatcttgtcaattggtgctcaaacagacttcctctccgtcttcttctccggctacacctttaagcacaagatggtgtatgaggacactctcacactctttccattttctggagaaaccgtgttcatgagcatggagaatccaggcctttggatcttgggttgccacaacagtgattttcgcaatcggggaatgactgctctcctcaaagtcagcagctgtgataagaacacaggcgactattacgaagattcttacgaggacataagtgcctactttgactccaagaataacgccattgagcccagatcattctcccagaatcctcccgtgcttaaaaggcatcagcgcgaaatcaccagaactactcttcagtctgatcaagaggagattgactatgacgacaccataagcgtggaaatgaagaaggaggatttcgatatctatgacgaagatgagaaccagtctccgcggagctttcagaagaagacgcgacactacttcattgcagcagtcgaaaggctttgggactacggtatgtcatcatcccctcatgtgttgcgcaatagagctcagagtggaagtgttccacagttcaagaaagtcgtctttcaagagtttacagatggcagcttcacacagcctctctatcggggcgagcttaacgaacatttgggactccttggtccctatatccgagccgaagtggaggacaacattatggttacctttaggaatcaagcctctcgcccctacagcttctactcctccctcatcagttatgaggaggatcagagacaaggcgctgaaccacggaagaactttgtgaaaccgaatgagacgaagacctacttctggaaagtacagcaccacatggcccccacaaaagacgaattcgattgcaaagcatgggcgtatttttcagacgttgacttggagaaagatgtacattcaggacttattggtcctttgttggtgtgtcacactaacactctcaatccagcccatggcaggcaggtgacagtccaggaattcgctcttttctttaccatctttgatgagaccaagtcctggtacttcacggaaaacatggagcgcaattgcagagccccctgtaacatacagatggaggaccctacctttaaggaaaattatcggttccacgcaatcaacggatacattatggatacactccctggccttgtgatggctcaggaccaacgaatcaggtggtacctcctcagcatgggttctaatgagaacatacactccattcacttttcaggacatgtgttcactgtccggaagaaagaagagtataagatggccctctacaatttgtatccaggcgtgtttgagaccgttgaaatgcttccctctaaagctggcatctggagagtagagtgcttgatcggagaacatcttcacgcaggtatgagcaccttgttcctcgtgtacagcaacaaatgtcagaccccacttggcatggccagtggacacattcgcgactttcagatcacagcatctggccagtatggacaatgggccccaaagttggctcgcctccattactccggtagcataaatgcgtggtccactaaagaacctttcagctggattaaggtcgatcttcttgcccccatgatcatccacggcattaagacacagggagcgaggcagaaattctcctccctctacatctcacagttcattattatgtatagtttggacggcaagaagtggcaaacttatagaggtaacagtactggaacagacatggtgttcttcggcaacgttgatagctctggcatcaaacacaacatctttaatcctcccataatagctcggtacatcagattgcatccgacccactacagcattaggagtacactccgaatggagcttatgggttgcgacttgaattcctgttcaatgccactcggaatggagtctaaagccatctctgatgcacagataaccgccagtagctactttacgaacatgtttgctacgtggtcaccctctaaggcaaggcttcatttgcaaggccggtctaatgcctggagacctcaggtgaacaacccgaaagaatggctccaggtggactttcagaagaccatgaaagtaacaggtgtcactactcagggagttaagtccttggatactagcatgtatgtgaaggagttccttatttcctcatcacaagatggccaccagtggaccctcttctttcagaatggtaaggtcaaagtgtttcagggcaatcaagacagcttcacacccgtggtgaacagtcttgatcctccactcttgacacgataccttcgaatccatccacagtcttgggagcaccagattgcattgcgcatggaagtacttggatgcgaggctcaggacctctac

SEQ ID NO: 1180 - protein, 1457 aa, synthetic construct
  REGION 1..1457: note = Variant of human B-domain deleted Factor VIII
MQIELSTCFFLCLLRFCFSATRRYYLGAVELSWDYMQSDLGELPVDARFPPRVPKSFPFNTSVVYKKTLFVEFTDHLFNIAKPRPPWMGLLGPTIQAEVYDTVVITLKNMASHPVSLHAVGVSYWKASEGAEYDDQTSQREKEDDKVFPGGSHTYVWQVLKENGPMASDPPCLTYSYLSHVDLVKDLNSGLIGALLVCREGSLAKEKTQTLHKFILLFAVFDEGKSWHSETKNSLMQDRDAASARAWPKMHTVNGYVNRTLPGLIGCHRKSVYWHVIGMGTTPEVHSIFLEGHTFLVRNHRQASLGISPITFLTAQTLLMDLGQFLLFCHIPSHQHDGMEAYVKVDSCPEEPQLRMKNNEEAEDYDDDLTDSEMDVVRFDDDNSPSIIQARSVAKKHPKTWVHYIAAEEEDWDYAPLVLAPDDRSYKSQYLNNGPQRIGRKYKKVRFMAYTDETFKTREAIQHESGILGPLLYGEVGDTLLIIFKNQASRPYNIYPHGITDVRPLYSRRLPKGVKHLKDFPILPGEIFKYKWTVTVEDGPTKSDPRCLTRWYSSFVNMERDLASGLIGPLLICYKESVDQRGNQIMSDKRNVILFSVFDENRSWYLTENIQRFLPNPAGVQLEDPEFQASNIMHSINGYVFDSLQLSVCLHEVAYWYILSIGAQTDFLSVFFSGYTFKHKMVYEDTLTLFPFSGETVFMSMENPGLWILGCHNSDFRNRGMTALLKVSSCDKNTGDYYEDSYEDISAYFDSKNNAIEPRSFSQNPPVLKRHQREITRTTLQSDQEEIDYDDTISVEMKKEDFDIYDEDENQSPRSFQKKTRHYFIAAVERLWDYGMSSSPHVLRNRAQSGSVPQFKKVVFQEFTDGSFTQPLYRGELNEHLGLLGPYIRAEVEDNIMVTFRNQASRPYSFYSSLISYEEDQRQGAEPRKNFVKPNETKTYFWKVQHHMAPTKDEFDCKAWAYFSDVDLEKDVHSGLIGPLLVCHTNTLNPAHGRQVTVQEFALFFTIFDETKSWYFTENMERNCRAPCNIQMEDPTFKENYRFHAINGYIMDTLPGLVMAQDQRIRWYLLSMGSNENIHSIHFSGHVFTVRKKEEYKMALYNLYPGVFETVEMLPSKAGIWRVECLIGEHLHAGMSTLFLVYSNKCQTPLGMASGHIRDFQITASGQYGQWAPKLARLHYSGSINAWSTKEPFSWIKVDLLAPMIIHGIKTQGARQKFSSLYISQFIIMYSLDGKKWQTYRGNSTGTDMVFFGNVDSSGIKHNIFNPPIIARYIRLHPTHYSIRSTLRMELMGCDLNSCSMPLGMESKAISDAQITASSYFTNMFATWSPSKARLHLQGRSNAWRPQVNNPKEWLQVDFQKTMKVTGVTTQGVKSLDTSMYVKEFLISSSQDGHQWTLFFQNGKVKVFQGNQDSFTPVVNSLDPPLLTRYLRIHPQSWEHQIALRMEVLGCEAQDLY

SEQ ID NO: 1181 - DNA, 4371 bp, synthetic construct
  misc_feature 1..4371: note = Variant of human B-domain deleted Factor VIII
  source 1..4371: mol_type = other DNA
atgcagattgaactgtctacctgcttcttcctctgtttgctgaggttctgctttagcgccactagacggtactaccttggcgctgtggagctgtcctgggactatatgcagagtgatttgggagagcttcccgtcgacgcacgatttcctcctcgcgttccaaagtcatttccctttaacacaagcgtggtgtacaagaagacgctcttcgtcgaattcaccgatcacctgttcaatatcgccaaacccagaccaccatggatgggtcttttggggcctaccatacaagcggaggtgtatgacacagttgttatcactctcaagaacatggcttctcatccggtaagtcttcacgcagtgggcgtgtcctactggaaagcttcagaaggagccgagtatgatgatcagacatcccagagggagaaagaagacgacaaggtatttccaggtgggtctcatacctatgtgtggcaagtgctcaaagagaatggccctatggcaagcgatccgccgtgtttgacttacagctacctttcacacgttgacctcgtcaaggacctcaactccgggttgattggagccttgttggtatgcagggaaggatctcttgccaaagagaagacacagaccctccacaagtttatccttctctttgctgtgttcgatgagggcaaaagttggcatagcgaaacgaagaattccctcatgcaggatcgcgacgcagccagcgccagagcttggcccaagatgcacactgtgaacggatatgtcaataggacgcttcctggcttgattgggtgtcatcggaaaagtgtctactggcacgtgatcggaatggggacaacaccagaggtccactccatatttctcgaaggccataccttccttgttcgaaaccacagacaggcatccttggggatctctcccattacctttctcactgcccaaacgctccttatggacttgggtcagttccttctcttttgccatatcccgtcacaccagcatgatggtatggaagcttatgtgaaagtcgacagttgtcctgaggagccacagttgcgcatgaagaataatgaagaagccgaggattacgacgacgatctcaccgattctgagatggacgtggtgaggtttgatgacgacaactctccctccatcattcaagctcggagcgtggcgaagaaacaccccaagacttgggtccactatatagcggcggaagaggaggattgggattacgctcctcttgtattggcaccagatgaccgctcatacaaaagccagtacctcaacaacggaccgcagagaattggccggaagtataagaaagtgcgatttatggcctatacagacgaaacctttaagacaagggaggccatccagcatgagagtgggattttgggacctcttctttacggcgaagttggtgataccctcctcatcatcttcaagaatcaagcttctcgcccctataacatttacccacacgggatcactgacgttaggcctttgtatagcagaagacttcccaaaggcgtgaagcatctcaaagacttccccattttgccaggcgagatctttaagtacaaatggaccgtcacagtggaagatggaccgactaaatcagaccctcgatgccttacgcggtactattcctccacggtgaatatggagagagatttggcaagcggactcataggaccactcctcatctgttacaaggaatctgtagaccagaggggtaaccagattatgagtgataaacgcaatgtgatcctttttagcgtcttcgacgagaaccggtcctggtacttgaccgagaatatacaaaggttccttcccaaccccgcaggcgttcagttggaagaccctgagtttcaggccagcaatattatgcactcaatcaacggctatgtgtttgatagtctccagctttctgtttgcctccatgaagtagcctattggtacatcttgtcaattggtgctcaaacagacttcctctccgtcttcttctccggctacacctttaagcacaagatggtgtatgaggacactctcacactctttccattttctggagaaaccgtgttcatgagcatggagaatccaggcctttggatcttgggttgccacaacagtgattttcgcaatcggggaatgactgctctcctcaaagtcagcagctgtgataagaacacaggcgactattacgaagattcttacgaggacataagtgcctactttgactccaagaataacgccattgagcccagatcattctcccagaatcctcccgtgcttaaaaggcatcagcgcgaaatcaccagaactactcttcagtctgatcaagaggagattgactatgacgacaccataagcgtggaaatgaagaaggaggatttcgatatctatgacgaagatgagaaccagtctccgcggagctttcagaagaagacgcgacactacttcattgcagcagtcgaaaggctttgggactacggtatgtcatcatcccctcatgtgttgcgcaatagagctcagagtggaagtgttccacagttcaagaaagtcgtctttcaagagtttacagatggcagcttcacacagcctctctatcggggcgagcttaacgaacatttgggactccttggtccctatatccgagccgaagtggaggacaacattatggttacctttaggaatcaagcctctcgcccctacagcttctactcctccctcatcagttatgaggaggatcagagacaaggcgctgaaccacggaagaactttgtgaaaccgaatgagacgaagacctacttctggaaagtacagcaccacatggcccccacaaaagacgaattcgattgcaaagcatgggcgtatttttcagacgttgacttggagaaagatgtacattcaggacttattggtcctttgttggtgtgtcacactaacactctcaatccagcccatggcaggcaggtgacagtccaggaattcgctcttttctttaccatctttgatgagaccaagtcctggtacttcacggaaaacatggagcgcaattgcagagccccctgtaacatacagatggaggaccctacctttaaggaaaattatcggttccacgcaatcaacggatacattatggatacactccctggccttgtgatggctcaggaccaacgaatcaggtggtacctcctcagcatgggttctaatgagaacatacactccattcacttttcaggacatgtgttcactgtccggaagaaagaagagtataagatggccctctacaatttgtatccaggcgtgtttgagaccgttgaaatgcttccctctaaagctggcatctggagagtagagtgcttgatcggagaacatcttcacgcaggtatgagcaccttgttcctcgtgtacagcaacaaatgtcagaccccacttggcatggccagtggacacattcgcgactttcagatcacagcatctggccagtatggacaatgggccccaaagttggctcgcctccattactccggtagcataaatgcgtggtccactaaagaacctttcagctggattaaggtcgatcttcttgcccccatgatcatccacggcattaagacacagggagcgaggcagaaattctcctccctctacatctcacagttcattattatgtatagtttggacggcaagaagtggcaaacttatagaggtaacagtactggaacagacatggtgttcttcggcaacgttgatagctctggcatcaaacacaacatctttaatcctcccataatagctcggtacatcagattgcatccgacccactacagcattaggagtacactccgaatggagcttatgggttgcgacttgaattcctgttcaatgccactcggaatggagtctaaagccatctctgatgcacagataaccgccagtagctactttacgaacatgtttgctacgtggtcaccctctaaggcaaggcttcatttgcaaggccggtctaatgcctggagacctcaggtgaacaacccgaaagaatggctccaggtggactttcagaagaccatgaaagtaacaggtgtcactactcagggagttaagtccttggatactagcatgtatgtgaaggagttccttatttcctcatcacaagatggccaccagtggaccctcttctttcagaatggtaaggtcaaagtgtttcagggcaatcaagacagcttcacacccgtggtgaacagtcttgatcctccactcttgacacgataccttcgaatccatccacagtcttgggagcaccagattgcattgcgcatggaagtacttggatgcgaggctcaggacctctac

SEQ ID NO: 1182 - protein, 1457 aa, synthetic construct
  REGION 1..1457: note = Variant of human B-domain deleted Factor VIII
MQIELSTCFFLCLLRFCFSATRRYYLGAVELSWDYMQSDLGELPVDARFPPRVPKSFPFNTSVVYKKTLFVEFTDHLFNIAKPRPPWMGLLGPTIQAEVYDTVVITLKNMASHPVSLHAVGVSYWKASEGAEYDDQTSQREKEDDKVFPGGSHTYVWQVLKENGPMASDPPCLTYSYLSHVDLVKDLNSGLIGALLVCREGSLAKEKTQTLHKFILLFAVFDEGKSWHSETKNSLMQDRDAASARAWPKMHTVNGYVNRTLPGLIGCHRKSVYWHVIGMGTTPEVHSIFLEGHTFLVRNHRQASLGISPITFLTAQTLLMDLGQFLLFCHIPSHQHDGMEAYVKVDSCPEEPQLRMKNNEEAEDYDDDLTDSEMDVVRFDDDNSPSIIQARSVAKKHPKTWVHYIAAEEEDWDYAPLVLAPDDRSYKSQYLNNGPQRIGRKYKKVRFMAYTDETFKTREAIQHESGILGPLLYGEVGDTLLIIFKNQASRPYNIYPHGITDVRPLYSRRLPKGVKHLKDFPILPGEIFKYKWTVTVEDGPTKSDPRCLTRYYSSTVNMERDLASGLIGPLLICYKESVDQRGNQIMSDKRNVILFSVFDENRSWYLTENIQRFLPNPAGVQLEDPEFQASNIMHSINGYVFDSLQLSVCLHEVAYWYILSIGAQTDFLSVFFSGYTFKHKMVYEDTLTLFPFSGETVFMSMENPGLWILGCHNSDFRNRGMTALLKVSSCDKNTGDYYEDSYEDISAYFDSKNNAIEPRSFSQNPPVLKRHQREITRTTLQSDQEEIDYDDTISVEMKKEDFDIYDEDENQSPRSFQKKTRHYFIAAVERLWDYGMSSSPHVLRNRAQSGSVPQFKKVVFQEFTDGSFTQPLYRGELNEHLGLLGPYIRAEVEDNIMVTFRNQASRPYSFYSSLISYEEDQRQGAEPRKNFVKPNETKTYFWKVQHHMAPTKDEFDCKAWAYFSDVDLEKDVHSGLIGPLLVCHTNTLNPAHGRQVTVQEFALFFTIFDETKSWYFTENMERNCRAPCNIQMEDPTFKENYRFHAINGYIMDTLPGLVMAQDQRIRWYLLSMGSNENIHSIHFSGHVFTVRKKEEYKMALYNLYPGVFETVEMLPSKAGIWRVECLIGEHLHAGMSTLFLVYSNKCQTPLGMASGHIRDFQITASGQYGQWAPKLARLHYSGSINAWSTKEPFSWIKVDLLAPMIIHGIKTQGARQKFSSLYISQFIIMYSLDGKKWQTYRGNSTGTDMVFFGNVDSSGIKHNIFNPPIIARYIRLHPTHYSIRSTLRMELMGCDLNSCSMPLGMESKAISDAQITASSYFTNMFATWSPSKARLHLQGRSNAWRPQVNNPKEWLQVDFQKTMKVTGVTTQGVKSLDTSMYVKEFLISSSQDGHQWTLFFQNGKVKVFQGNQDSFTPVVNSLDPPLLTRYLRIHPQSWEHQIALRMEVLGCEAQDLY

SEQ ID NO: 1183 - DNA, 4371 bp, synthetic construct
  misc_feature 1..4371: note = Variant of human B-domain deleted Factor VIII
  source 1..4371: mol_type = other DNA
atgcagattgaactgtctacctgcttcttcctctgtttgctgaggttctgctttagcgccactagacggtactaccttggcgctgtggagctgtcctgggactatatgcagagtgatttgggagagcttcccgtcgacgcacgatttcctcctcgcgttccaaagtcatttccctttaacacaagcgtggtgtacaagaagacgctcttcgtcgaattcaccgatcacctgttcaatatcgccaaacccagaccaccatggatgggtcttttggggcctaccatacaagcggaggtgtatgacacagttgttatcactctcaagaacatggcttctcatccggtaagtcttcacgcagtgggcgtgtcctactggaaagcttcagaaggagccgagtatgatgatcagacatcccagagggagaaagaagacgacaaggtatttccaggtgggtctcatacctatgtgtggcaagtgctcaaagagaatggccctatggcaagcgatccgccgtgtttgacttacagctacctttcacacgttgacctcgtcaaggacctcaactccgggttgattggagccttgttggtatgcagggaaggatctcttgccaaagagaagacacagaccctccacaagtttatccttctctttgctgtgttcgatgagggcaaaagttggcatagcgaaacgaagaattccctcatgcaggatcgcgacgcagccagcgccagagcttggcccaagatgcacactgtgaacggatatgtcaataggacgcttcctggcttgattgggtgtcatcggaaaagtgtctactggcacgtgatcggaatggggacaacaccagaggtccactccatatttctcgaaggccataccttccttgttcgaaaccacagacaggcatccttggggatctctcccattacctttctcactgcccaaacgctccttatggacttgggtcagttccttctcttttgccatatcccgtcacaccagcatgatggtatggaagcttatgtgaaagtcgacagttgtcctgaggagccacagttgcgcatgaagaataatgaagaagccgaggattacgacgacgatctcaccgattctgagatggacgtggtgaggtttgatgacgacaactctccctccatcattcaagctcggagcgtggcgaagaaacaccccaagacttgggtccactatatagcggcggaagaggaggattgggattacgctcctcttgtattggcaccagatgaccgctcatacaaaagccagtacctcaacaacggaccgcagagaattggccggaagtataagaaagtgcgatttatggcctatacagacgaaacctttaagacaagggaggccatccagcatgagagtgggattttgggacctcttctttacggcgaagttggtgataccctcctcatcatcttcaagaatcaagcttctcgcccctataacatttacccacacgggatcactgacgttaggcctttgtatagcagaagacttcccaaaggcgtgaagcatctcaaagacttccccattttgccaggcgagatctttaagtacaaatggaccgtcacagtggaagatggaccgactaaatcagaccctcgatgccttacgcggtactattcctccttcgtgaatatggagagagatttggcaagcggactcataggaccactcctcatctgttacaaggaatctgtagaccagaggggtaaccagattatgagtgataaacgcaatgtgatcctttttagcgtcttcgacgagaaccggtcctggtacttgaccgagaatatacaaaggttccttcccaaccccgcaggcgttcagttggaagaccctgagtttcaggccagcaatattatgcactcaatcaacggctatgtgtttgatagtctccagctttctgtttgcctccatgaagtagcctattggtacatcttgtcaattggtgctcaaacagacttcctctccgtcttcttctccggctacacctttaagcacaagggggtgtatgaggacactctcacactctttccattttctggagaaaccgtgttcatgagcatggagaatccaggcctttggatcttgggttgccacaacagtgattttcgcaatcggggaatgactgctctcctcaaagtcagcagctgtgataagaacacaggcgactattacgaagattcttacgaggacataagtgcctactttgactccaagaataacgccattgagcccagatcattctcccagaatcctcccgtgcttaaaaggcatcagcgcgaaatcaccagaactactcttcagtctgatcaagaggagattgactatgacgacaccataagcgtggaaatgaagaaggaggatttcgatatctatgacgaagatgagaaccagtctccgcggagctttcagaagaagacgcgacactacttcattgcagcagtcgaaaggctttgggactacggtatgtcatcatcccctcatgtgttgcgcaatagagctcagagtggaagtgttccacagttcaagaaagtcgtctttcaagagtttacagatggcagcttcacacagcctctctatcggggcgagcttaacgaacatttgggactccttggtccctatatccgagccgaagtggaggacaacattatggttacctttaggaatcaagcctctcgcccctacagcttctactcctccctcatcagttatgaggaggatcagagacaaggcgctgaaccacggaagaactttgtgaaaccgaatgagacgaagacctacttctggaaagtacagcaccacatggcccccacaaaagacgaattcgattgcaaagcatgggcgtatttttcagacgttgacttggagaaagatgtacattcaggacttattggtcctttgttggtgtgtcacactaacactctcaatccagcccatggcaggcaggtgacagtccaggaattcgctcttttctttaccatctttgatgagaccaagtcctggtacttcacggaaaacatggagcgcaattgcagagccccctgtaacatacagatggaggaccctacctttaaggaaaattatcggttccacgcaatcaacggatacattatggatacactccctggccttgtgatggctcaggaccaacgaatcaggtggtacctcctcagcatgggttctaatgagaacatacactccattcacttttcaggacatgtgttcactgtccggaagaaagaagagtataagatggccctctacaatttgtatccaggcgtgtttgagaccgttgaaatgcttccctctaaagctggcatctggagagtagagtgcttgatcggagaacatcttcacgcaggtatgagcaccttgttcctcgtgtacagcaacaaatgtcagaccccacttggcatggccagtggacacattcgcgactttcagatcacagcatctggccagtatggacaatgggccccaaagttggctcgcctccattactccggtagcataaatgcgtggtccactaaagaacctttcagctggattaaggtcgatcttcttgcccccatgatcatccacggcattaagacacagggagcgaggcagaaattctcctccctctacatctcacagttcattattatgtatagtttggacggcaagaagtggcaaacttatagaggtaacagtactggaacagacatggtgttcttcggcaacgttgatagctctggcatcaaacacaacatctttaatcctcccataatagctcggtacatcagattgcatccgacccactacagcattaggagtacactccgaatggagcttatgggttgcgacttgaattcctgttcaatgccactcggaatggagtctaaagccatctctgatgcacagataaccgccagtagctactttacgaacatgtttgctacgtggtcaccctctaaggcaaggcttcatttgcaaggccggtctaatgcctggagacctcaggtgaacaacccgaaagaatggctccaggtggactttcagaagaccatgaaagtaacaggtgtcactactcagggagttaagtccttggatactagcatgtatgtgaaggagttccttatttcctcatcacaagatggccaccagtggaccctcttctttcagaatggtaaggtcaaagtgtttcagggcaatcaagacagcttcacacccgtggtgaacagtcttgatcctccactcttgacacgataccttcgaatccatccacagtcttgggagcaccagattgcattgcgcatggaagtacttggatgcgaggctcaggacctctac

SEQ ID NO: 1184 - protein, 1457 aa, synthetic construct
  REGION 1..1457: note = Variant of human B-domain deleted Factor VIII
MQIELSTCFFLCLLRFCFSATRRYYLGAVELSWDYMQSDLGELPVDARFPPRVPKSFPFNTSVVYKKTLFVEFTDHLFNIAKPRPPWMGLLGPTIQAEVYDTVVITLKNMASHPVSLHAVGVSYWKASEGAEYDDQTSQREKEDDKVFPGGSHTYVWQVLKENGPMASDPPCLTYSYLSHVDLVKDLNSGLIGALLVCREGSLAKEKTQTLHKFILLFAVFDEGKSWHSETKNSLMQDRDAASARAWPKMHTVNGYVNRTLPGLIGCHRKSVYWHVIGMGTTPEVHSIFLEGHTFLVRNHRQASLGISPITFLTAQTLLMDLGQFLLFCHIPSHQHDGMEAYVKVDSCPEEPQLRMKNNEEAEDYDDDLTDSEMDVVRFDDDNSPSIIQARSVAKKHPKTWVHYIAAEEEDWDYAPLVLAPDDRSYKSQYLNNGPQRIGRKYKKVRFMAYTDETFKTREAIQHESGILGPLLYGEVGDTLLIIFKNQASRPYNIYPHGITDVRPLYSRRLPKGVKHLKDFPILPGEIFKYKWTVTVEDGPTKSDPRCLTRYYSSFVNMERDLASGLIGPLLICYKESVDQRGNQIMSDKRNVILFSVFDENRSWYLTENIQRFLPNPAGVQLEDPEFQASNIMHSINGYVFDSLQLSVCLHEVAYWYILSIGAQTDFLSVFFSGYTFKHKGVYEDTLTLFPFSGETVFMSMENPGLWILGCHNSDFRNRGMTALLKVSSCDKNTGDYYEDSYEDISAYFDSKNNAIEPRSFSQNPPVLKRHQREITRTTLQSDQEEIDYDDTISVEMKKEDFDIYDEDENQSPRSFQKKTRHYFIAAVERLWDYGMSSSPHVLRNRAQSGSVPQFKKVVFQEFTDGSFTQPLYRGELNEHLGLLGPYIRAEVEDNIMVTFRNQASRPYSFYSSLISYEEDQRQGAEPRKNFVKPNETKTYFWKVQHHMAPTKDEFDCKAWAYFSDVDLEKDVHSGLIGPLLVCHTNTLNPAHGRQVTVQEFALFFTIFDETKSWYFTENMERNCRAPCNIQMEDPTFKENYRFHAINGYIMDTLPGLVMAQDQRIRWYLLSMGSNENIHSIHFSGHVFTVRKKEEYKMALYNLYPGVFETVEMLPSKAGIWRVECLIGEHLHAGMSTLFLVYSNKCQTPLGMASGHIRDFQITASGQYGQWAPKLARLHYSGSINAWSTKEPFSWIKVDLLAPMIIHGIKTQGARQKFSSLYISQFIIMYSLDGKKWQTYRGNSTGTDMVFFGNVDSSGIKHNIFNPPIIARYIRLHPTHYSIRSTLRMELMGCDLNSCSMPLGMESKAISDAQITASSYFTNMFATWSPSKARLHLQGRSNAWRPQVNNPKEWLQVDFQKTMKVTGVTTQGVKSLDTSMYVKEFLISSSQDGHQWTLFFQNGKVKVFQGNQDSFTPVVNSLDPPLLTRYLRIHPQSWEHQIALRMEVLGCEAQDLY

SEQ ID NO: 1185 - DNA, 4371 bp, synthetic construct
  misc_feature 1..4371: note = Variant of human B-domain deleted Factor VIII
  source 1..4371: mol_type = other DNA
atgcagattgaactgtctacctgcttcttcctctgtttgctgaggttctgctttagcgccactagacggtactaccttggcgctgtggagctgtcctgggactatatgcagagtgatttgggagagcttcccgtcgacgcacgatttcctcctcgcgttccaaagtcatttccctttaacacaagcgtggtgtacaagaagacgctcttcgtcgaattcaccgatcacctgttcaatatcgccaaacccagaccaccatggatgggtcttttggggcctaccatacaagcggaggtgtatgacacagttgttatcactctcaagaacatggcttctcatccggtaagtcttcacgcagtgggcgtgtcctactggaaagcttcagaaggagccgagtatgatgatcagacatcccagagggagaaagaagacgacaaggtatttccaggtgggtctcatacctatgtgtggcaagtgctcaaagagaatggccctatggcaagcgatccgccgtgtttgacttacagctacctttcacacgttgacctcgtcaaggacctcaactccgggttgattggagccttgttggtatgcagggaaggatctcttgccaaagagaagacacagaccctcgctaagtttatccttctctttgctgtgttcgatgagggcaaaagttggcatagcgaaacgaagaattccctcatgcaggatcgcgacgcagccagcgccagagcttggcccaagatgcacactgtgaacggatatgtcaataggacgcttcctggcttgattgggtgtcatcggaaaagtgtctactggcacgtgatcggaatggggacaacaccagaggtccactccatatttctcgaaggccataccttccttgttcgaaaccacagacaggcatccttggggatctctcccattacctttctcactgcccaaacgctccttatggacttgggtcagttccttctcttttgccatatcccgtcacaccagcatgatggtatggaagcttatgtgaaagtcgacagttgtcctgaggagccacagttgcgcatgaagaataatgaagaagccgaggattacgacgacgatctcaccgattctgagatggacgtggtgaggtttgatgacgacaactctccctccatcattcaagctcggagcgtggcgaagaaacaccccaagacttgggtccactatatagcggcggaagaggaggattgggattacgctcctcttgtattggcaccagatgaccgctcatacaaaagccagtacctcaacaacggaccgcagagaattggccggaagtataagaaagtgcgatttatggcctatacagacgaaacctttaagacaagggaggccatccagcatgagagtgggattttgggacctcttctttacggcgaagttggtgataccctcctcatcatcttcaagaatcaagcttctcgcccctataacatttacccacacgggatcactgacgttaggcctttgtatagcagaagacttcccaaaggcgtgaagcatctcaaagacttccccattttgccaggcgagatctttaagtacaaatggaccgtcacagtggaagatggaccgactaaatcagaccctcgatgccttacgcggtactattcctccttcgtgaatatggagagagatttggcaagcggactcataggaccactcctcatctgttacaaggaatctgtagaccagaggggtaaccagattatgagtgataaacgcaatgtgatcctttttagcgtcttcgacgagaaccggtcctggtacttgaccgagaatatacaaaggttccttcccaaccccgcaggcgttcagttggaagaccctgagtttcaggccagcaatattatgcactcaatcaacggctatgtgtttgatagtctccagctttctgtttgcctccatgaagtagcctattggtacatcttgtcaattggtgctcaaacagacttcctctccgtcttcttctccggctacacctttaagcacaagatggtgtatgaggacactctcacactctttccattttctggagaaaccgtgttcatgagcatggagaatccaggcctttggatcttgggttgccacaacagtgattttcgcaatcggggaatgactgctctcctcaaagtcagcagctgtgataagaacacaggcgactattacgaagattcttacgaggacataagtgcctactttgactccaagaataacgccattgagcccagatcattctcccagaatcctcccgtgcttaaaaggcatcagcgcgaaatcaccagaactactcttcagtctgatcaagaggagattgactatgacgacaccataagcgtggaaatgaagaaggaggatttcgatatctatgacgaagatgagaaccagtctccgcggagctttcagaagaagacgcgacactacttcattgcagcagtcgaaaggctttgggactacggtatgtcatcatcccctcatgtgttgcgcaatagagctcagagtggaagtgttccacagttcaagaaagtcgtctttcaagagtttacagatggcagcttcacacagcctctctatcggggcgagcttaacgaacatttgggactccttggtccctatatccgagccgaagtggaggacaacattatggttacctttaggaatcaagcctctcgcccctacagcttctactcctccctcatcagttatgaggaggatcagagacaaggcgctgaaccacggaagaactttgtgaaaccgaatgagacgaagacctacttctggaaagtacagcaccacatggcccccacaaaagacgaattcgattgcaaagcatgggcgtatttttcagacgttgacttggagaaagatgtacattcaggacttattggtcctttgttggtgtgtcacactaacactctcaatccagcccatggcaggcaggtgacagtccaggaattcgctcttttctttaccatctttgatgagaccaagtcctggtacttcacggaaaacatggagcgcaattgcagagccccctgtaacatacagatggaggaccctacctttaaggaaaattatcggttccacgcaatcaacggatacattatggatacactccctggccttgtgatggctcaggaccaacgaatcaggtggtacctcctcagcatgggttctaatgagaacatacactccattcacttttcaggacatgtgttcactgtccggaagaaagaagagtataagatggccctctacaatttgtatccaggcgtgtttgagaccgttgaaatgcttccctctaaagctggcatctggagagtagagtgcttgatcggagaacatcttcacgcaggtatgagcaccttgttcctcgtgtacagcaacaaatgtcagaccccacttggcatggccagtggacacattcgcgactttcagatcacagcatctggccagtatggacaatgggccccaaagttggctcgcctccattactccggtagcataaatgcgtggtccactaaagaacctttcagctggattaaggtcgatcttcttgcccccatgatcatccacggcattaagacacagggagcgaggcagaaattctcctccctctacatctcacagttcattattatgtatagtttggacggcaagaagtggcaaacttatagaggtaacagtactggaacagacatggtgttcttcggcaacgttgatagctctggcatcaaacacaacatctttaatcctcccataatagctcggtacatcagattgcatccgacccactacagcattaggagtacactccgaatggagcttatgggttgcgacttgaattcctgttcaatgccactcggaatggagtctaaagccatctctgatgcacagataaccgccagtagctactttacgaacatgtttgctacgtggtcaccctctaaggcaaggcttcatttgcaaggccggtctaatgcctggagacctcaggtgaacaacccgaaagaatggctccaggtggactttcagaagaccatgaaagtaacaggtgtcactactcagggagttaagtccttggatactagcatgtatgtgaaggagttccttatttcctcatcacaagatggccaccagtggaccctcttctttcagaatggtaaggtcaaagtgtttcagggcaatcaagacagcttcacacccgtggtgaacagtcttgatcctccactcttgacacgataccttcgaatccatccacagtcttgggagcaccagattgcattgcgcatggaagtacttggatgcgaggctcaggacctctac

SEQ ID NO: 1186 - protein, 1457 aa, synthetic construct
  REGION 1..1457: note = Variant of human B-domain deleted Factor VIII
MQIELSTCFFLCLLRFCFSATRRYYLGAVELSWDYMQSDLGELPVDARFPPRVPKSFPFNTSVVYKKTLFVEFTDHLFNIAKPRPPWMGLLGPTIQAEVYDTVVITLKNMASHPVSLHAVGVSYWKASEGAEYDDQTSQREKEDDKVFPGGSHTYVWQVLKENGPMASDPPCLTYSYLSHVDLVKDLNSGLIGALLVCREGSLAKEKTQTLAKFILLFAVFDEGKSWHSETKNSLMQDRDAASARAWPKMHTVNGYVNRTLPGLIGCHRKSVYWHVIGMGTTPEVHSIFLEGHTFLVRNHRQASLGISPITFLTAQTLLMDLGQFLLFCHIPSHQHDGMEAYVKVDSCPEEPQLRMKNNEEAEDYDDDLTDSEMDVVRFDDDNSPSIIQARSVAKKHPKTWVHYIAAEEEDWDYAPLVLAPDDRSYKSQYLNNGPQRIGRKYKKVRFMAYTDETFKTREAIQHESGILGPLLYGEVGDTLLIIFKNQASRPYNIYPHGITDVRPLYSRRLPKGVKHLKDFPILPGEIFKYKWTVTVEDGPTKSDPRCLTRYYSSFVNMERDLASGLIGPLLICYKESVDQRGNQIMSDKRNVILFSVFDENRSWYLTENIQRFLPNPAGVQLEDPEFQASNIMHSINGYVFDSLQLSVCLHEVAYWYILSIGAQTDFLSVFFSGYTFKHKMVYEDTLTLFPFSGETVFMSMENPGLWILGCHNSDFRNRGMTALLKVSSCDKNTGDYYEDSYEDISAYFDSKNNAIEPRSFSQNPPVLKRHQREITRTTLQSDQEEIDYDDTISVEMKKEDFDIYDEDENQSPRSFQKKTRHYFIAAVERLWDYGMSSSPHVLRNRAQSGSVPQFKKVVFQEFTDGSFTQPLYRGELNEHLGLLGPYIRAEVEDNIMVTFRNQASRPYSFYSSLISYEEDQRQGAEPRKNFVKPNETKTYFWKVQHHMAPTKDEFDCKAWAYFSDVDLEKDVHSGLIGPLLVCHTNTLNPAHGRQVTVQEFALFFTIFDETKSWYFTENMERNCRAPCNIQMEDPTFKENYRFHAINGYIMDTLPGLVMAQDQRIRWYLLSMGSNENIHSIHFSGHVFTVRKKEEYKMALYNLYPGVFETVEMLPSKAGIWRVECLIGEHLHAGMSTLFLVYSNKCQTPLGMASGHIRDFQITASGQYGQWAPKLARLHYSGSINAWSTKEPFSWIKVDLLAPMIIHGIKTQGARQKFSSLYISQFIIMYSLDGKKWQTYRGNSTGTDMVFFGNVDSSGIKHNIFNPPIIARYIRLHPTHYSIRSTLRMELMGCDLNSCSMPLGMESKAISDAQITASSYFTNMFATWSPSKARLHLQGRSNAWRPQVNNPKEWLQVDFQKTMKVTGVTTQGVKSLDTSMYVKEFLISSSQDGHQWTLFFQNGKVKVFQGNQDSFTPVVNSLDPPLLTRYLRIHPQSWEHQIALRMEVLGCEAQDLY

SEQ ID NO: 1187 - DNA, 4371 bp, synthetic construct
  misc_feature 1..4371: note = Variant of human B-domain deleted Factor VIII
  source 1..4371: mol_type = other DNA
atgcagattgaactgtctacctgcttcttcctctgtttgctgagggggtgctttagcgccactagacggtactaccttggcgctgtggagctgtcctgggactatatgcagagtgatttgggagagcttcccgtcgacgcacgatttcctcctcgcgttccaaagtcatttccctttaacacaagcgtggtgtacaagaagacgctcttcgtcgaattcaccgatcacctgttcaatatcgccaaacccagaccaccatggatgggtcttttggggcctaccatacaagcggaggtgtatgacacagttgttatcactctcaagaacatggcttctcatccggtaagtcttcacgcagtgggcgtgtcctactggaaagcttcagaaggagccgagtatgatgatcagacatcccagagggagaaagaagacgacaaggtatttccaggtgggtctcatacctatgtgtggcaagtgctcaaagagaatggccctatggcaagcgatccgccgtgtttgacttacagctacctttcacacgttgacctcgtcaaggacctcaactccgggttgattggagccttgttggtatgcagggaaggatctcttgccaaagagaagacacagaccctccacaagtttatccttctctttgctgtgttcgatgagggcaaaagttggcatagcgaaacgaagaattccctcatgcaggatcgcgacgcagccagcgccagagcttggcccaagatgcacactgtgaacggatatgtcaataggacgcttcctggcttgattgggtgtcatcggaaaagtgtctactggcacgtgatcggaatggggacaacaccagaggtccactccatatttctcgaaggccataccttccttgttcgaaaccacagacaggcatccttggggatctctcccattacctttctcactgcccaaacgctccttatggacttgggtcagttccttctcttttgccatatcccgtcacaccagcatgatggtatggaagcttatgtgaaagtcgacagttgtcctgaggagccacagttgcgcatgaagaataatgaagaagccgaggattacgacgacgatctcaccgattctgagatggacgtggtgaggtttgatgacgacaactctccctccatcattcaagctcggagcgtggcgaagaaacaccccaagacttgggtccactatatagcggcggaagaggaggattgggattacgctcctcttgtattggcaccagatgaccgctcatacaaaagccagtacctcaacaacggaccgcagagaattggccggaagtataagaaagtgcgatttatggcctatacagacgaaacctttaagacaagggaggccatccagcatgagagtgggattttgggacctcttctttacggcgaagttggtgataccctcctcatcatcttcaagaatcaagcttctcgcccctataacatttacccacacgggatcactgacgttaggcctttgtatagcagaagacttcccaaaggcgtgaagcatctcaaagacttccccattttgccaggcgagatctttaagtacaaatggaccgtcacagtggaagatggaccgactaaatcagaccctcgatgccttacgcggtactattcctccttcgtgaatatggagagagatttggcaagcggactcataggaccactcctcatctgttacaaggaatctgtagaccagaggggtaaccagattatgagtgataaacgcaatgtgatcctttttagcgtcttcgacgagaaccggtcctggtacttgaccgagaatatacaaaggttccttcccaaccccgcaggcgttcagttggaagaccctgagtttcaggccagcaatattatgcactcaatcaacggctatgtgtttgatagtctccagctttctgtttgcctccatgaagtagcctattggtacatcttgtcaattggtgctcaaacagacttcctctccgtcttcttctccggctacacctttaagcacaagatggtgtatgaggacactctcacactctttccattttctggagaaaccgtgttcatgagcatggagaatccaggcctttggatcttgggttgccacaacagtgattttcgcaatcggggaatgactgctctcctcaaagtcagcagctgtgataagaacacaggcgactattacgaagattcttacgaggacataagtgcctactttgactccaagaataacgccattgagcccagatcattctcccagaatcctcccgtgcttaaaaggcatcagcgcgaaatcaccagaactactcttcagtctgatcaagaggagattgactatgacgacaccataagcgtggaaatgaagaaggaggatttcgatatctatgacgaagatgagaaccagtctccgcggagctttcagaagaagacgcgacactacttcattgcagcagtcgaaaggctttgggactacggtatgtcatcatcccctcatgtgttgcgcaatagagctcagagtggaagtgttccacagttcaagaaagtcgtctttcaagagtttacagatggcagcttcacacagcctctctatcggggcgagcttaacgaacatttgggactccttggtccctatatccgagccgaagtggaggacaacattatggttacctttaggaatcaagcctctcgcccctacagcttctactcctccctcatcagttatgaggaggatcagagacaaggcgctgaaccacggaagaactttgtgaaaccgaatgagacgaagacctacttctggaaagtacagcaccacatggcccccacaaaagacgaattcgattgcaaagcatgggcgtatttttcagacgttgacttggagaaagatgtacattcaggacttattggtcctttgttggtgtgtcacactaacactctcaatccagcccatggcaggcaggtgacagtccaggaattcgctcttttctttaccatctttgatgagaccaagtcctggtacttcacggaaaacatggagcgcaattgcagagccccctgtaacatacagatggaggaccctacctttaaggaaaattatcggttccacgcaatcaacggatacattatggatacactccctggccttgtgatggctcaggaccaacgaatcaggtggtacctcctcagcatgggttctaatgagaacatacactccattcacttttcaggacatgtgttcactgtccggaagaaagaagagtataagatggccctctacaatttgtatccaggcgtgtttgagaccgttgaaatgcttccctctaaagctggcatctggagagtagagtgcttgatcggagaacatcttcacgcaggtatgagcaccttgttcctcgtgtacagcaacaaatgtcagaccccacttggcatggccagtggacacattcgcgactttcagatcacagcatctggccagtatggacaatgggccccaaagttggctcgcctccattactccggtagcataaatgcgtggtccactaaagaacctttcagctggattaaggtcgatcttcttgcccccatgatcatccacggcattaagacacagggagcgaggcagaaattctcctccctctacatctcacagttcattattatgtatagtttggacggcaagaagtggcaaacttatagaggtaacagtactggaacagacatggtgttcttcggcaacgttgatagctctggcatcaaacacaacatctttaatcctcccataatagctcggtacatcagattgcatccgacccactacagcattaggagtacactccgaatggagcttatgggttgcgacttgaattcctgttcaatgccactcggaatggagtctaaagccatctctgatgcacagataaccgccagtagctactttacgaacatgtttgctacgtggtcaccctctaaggcaaggcttcatttgcaaggccggtctaatgcctggagacctcaggtgaacaacccgaaagaatggctccaggtggactttcagaagaccatgaaagtaacaggtgtcactactcagggagttaagtccttggatactagcatgtatgtgaaggagttccttatttcctcatcacaagatggccaccagtggaccctcttctttcagaatggtaaggtcaaagtgtttcagggcaatcaagacagcttcacacccgtggtgaacagtcttgatcctccactcttgacacgataccttcgaatccatccacagtcttgggagcaccagattgcattgcgcatggaagtacttggatgcgaggctcaggacctctac

SEQ ID NO: 1188 - protein, 1457 aa, synthetic construct
  REGION 1..1457: note = Variant of human B-domain deleted Factor VIII
MQIELSTCFFLCLLRGCFSATRRYYLGAVELSWDYMQSDLGELPVDARFPPRVPKSFPFNTSVVYKKTLFVEFTDHLFNIAKPRPPWMGLLGPTIQAEVYDTVVITLKNMASHPVSLHAVGVSYWKASEGAEYDDQTSQREKEDDKVFPGGSHTYVWQVLKENGPMASDPPCLTYSYLSHVDLVKDLNSGLIGALLVCREGSLAKEKTQTLHKFILLFAVFDEGKSWHSETKNSLMQDRDAASARAWPKMHTVNGYVNRTLPGLIGCHRKSVYWHVIGMGTTPEVHSIFLEGHTFLVRNHRQASLGISPITFLTAQTLLMDLGQFLLFCHIPSHQHDGMEAYVKVDSCPEEPQLRMKNNEEAEDYDDDLTDSEMDVVRFDDDNSPSIIQARSVAKKHPKTWVHYIAAEEEDWDYAPLVLAPDDRSYKSQYLNNGPQRIGRKYKKVRFMAYTDETFKTREAIQHESGILGPLLYGEVGDTLLIIFKNQASRPYNIYPHGITDVRPLYSRRLPKGVKHLKDFPILPGEIFKYKWTVTVEDGPTKSDPRCLTRYYSSFVNMERDLASGLIGPLLICYKESVDQRGNQIMSDKRNVILFSVFDENRSWYLTENIQRFLPNPAGVQLEDPEFQASNIMHSINGYVFDSLQLSVCLHEVAYWYILSIGAQTDFLSVFFSGYTFKHKMVYEDTLTLFPFSGETVFMSMENPGLWILGCHNSDFRNRGMTALLKVSSCDKNTGDYYEDSYEDISAYFDSKNNAIEPRSFSQNPPVLKRHQREITRTTLQSDQEEIDYDDTISVEMKKEDFDIYDEDENQSPRSFQKKTRHYFIAAVERLWDYGMSSSPHVLRNRAQSGSVPQFKKVVFQEFTDGSFTQPLYRGELNEHLGLLGPYIRAEVEDNIMVTFRNQASRPYSFYSSLISYEEDQRQGAEPRKNFVKPNETKTYFWKVQHHMAPTKDEFDCKAWAYFSDVDLEKDVHSGLIGPLLVCHTNTLNPAHGRQVTVQEFALFFTIFDETKSWYFTENMERNCRAPCNIQMEDPTFKENYRFHAINGYIMDTLPGLVMAQDQRIRWYLLSMGSNENIHSIHFSGHVFTVRKKEEYKMALYNLYPGVFETVEMLPSKAGIWRVECLIGEHLHAGMSTLFLVYSNKCQTPLGMASGHIRDFQITASGQYGQWAPKLARLHYSGSINAWSTKEPFSWIKVDLLAPMIIHGIKTQGARQKFSSLYISQFIIMYSLDGKKWQTYRGNSTGTDMVFFGNVDSSGIKHNIFNPPIIARYIRLHPTHYSIRSTLRMELMGCDLNSCSMPLGMESKAISDAQITASSYFTNMFATWSPSKARLHLQGRSNAWRPQVNNPKEWLQVDFQKTMKVTGVTTQGVKSLDTSMYVKEFLISSSQDGHQWTLFFQNGKVKVFQGNQDSFTPVVNSLDPPLLTRYLRIHPQSWEHQIALRMEVLGCEAQDLY

SEQ ID NO: 1189 - DNA, 4371 bp, synthetic construct
  misc_feature 1..4371: note = Variant of human B-domain deleted Factor VIII
  source 1..4371: mol_type = other DNA
atgcagattgaactgtctacctgcttcttcctctgtttgctgaggttctgctttagcgccactagacggtactaccttggcgctgtggagctgtcctgggactatatgcagagtgatttgggagagcttcccgtcgacgcacgatttcctcctcgcgttccaaagtcatttccctttaacacaagcgtggtgtacaagaagacgctcttcgtcgaattcaccgatcacctgttcaatatcgccaaacccagaccaccatggatgggtcttttggggcctaccatacaagcggaggtgtatgacacagttgttatcactctcaagaacatggcttctcatccggtaagtcttcacgcagtgggcgtgtcctactggaaagcttcagaaggagccgagtatgatgatcagacatcccagagggagaaagaagacgacaaggtatttccaggtgggtctcatacctatgtgtggcaagtgctcaaagagaatggccctatggcaagcgatccgccgtgtttgacttacagctacctttcacacgttgacctcgtcaaggacctcaactccgggttgattggagccttgttggtatgcagggaaggatctcttgccaaagagaagacacagaccctccacaagtttatccttctctttgctgtgttcgatgagggcaaaagttggcatagcgaaacgaagaattccctcatgcaggatcgcgacgcagccagcgccagagcttggcccaagatgcacactgtgaacggatatgtcaataggacgcttcctggcttgattgggtgtcatcggaaaagtgtctactggcacgtgatcggaatggggacaacaccagaggtccactccatatttctcgaaggccataccttccttgttcgaaaccacagacaggcatccttggggatctctcccattacctttctcactgcccaaacgctccttatggacttgggtcagttccttctcttttgccatatcccgtcacaccagcatgatggtatggaagcttatgtgaaagtcgacagttgtcctgaggagccacagttgcgcatgaagaataatgaagaagccgaggattacgacgacgatctcaccgattctgagatggacgtggtgaggtttgatgacgacaactctccctccatcattcaagctcggagcgtggcgaagaaacaccccaagacttgggtccactatatagcggcggaagaggaggattgggattacgctcctcttgtattggcaccagatgaccgctcatacaaaagccagtacctcaacaacggaccgcagagaattggccggaagtataagaaagtgcgatttatggcctatacagacgaaacctttaagacaagggaggccatccagcatgagagtgggattttgggacctcttctttacggcgaagttggtgataccctcctcatcatcttcaagaatcaagcttctcgcccctataacatttacccacacgggatcactgacgttaggcctttgtatagcagaagacttcccaaaggcgtgaagcatctcaaagacttccccattttgccaggcgagatctttaagtacaaatggaccgtcacagtggaagatggaccgactaaatcagaccctcgatgccttacgcggtactattcctccttcgtgaatatggagagagatttggcaagcggactcataggaccactcctcatctgttacaaggaatctgtagaccagaggggtaaccagattatgagtgataaacgcaatgtgatcctttttagcgtcttcgacgagaaccggtcctggtacttgaccgagaatatacaaaggttccttcccaaccccgcaggcgttcagttggaagaccctgagtttcaggccagcaatattatgcactcaatcaacggctatgtgtttgatagtctccagctttctgtttgcctccatgaagtagcctattggtacatcttgtcaattggtgctcaaacagacttcctctccgtcttcttctccggctacacctttaagcacaagatggtgtatgaggacactctcacactctttccattttctggagaaaccgtgttcatgagcatggagaatccaggcctttggatcttgggttgccacaacagtgattttcgcaatcggggaatgactgctctcctcaaagtcagcagctgtgataagaacacaggcgactattacgaagattcttacgaggacataagtgcctactttgactccaagaataacgccattgagcccagatcattctcccagaatcctcccgtgcttaaaaggcatcagcgcgaaatcaccagaactactcttcagtctgatcaagaggagattgactatgacgacaccataagcgtggaaatgaagaaggaggatttcgatatctatgacgaagatgagaaccagtctccgcggagctttcagaagaagacgcgacactacttcattgcagcagtcgaaaggctttgggactacggtatgtcagggtcccctcatgtgttgcgcaatagagctcagagtggaagtgttccacagttcaagaaagtcgtctttcaagagtttacagatggcagcttcacacagcctctctatcggggcgagcttaacgaacatttgggactccttggtccctatatccgagccgaagtggaggacaacattatggttacctttaggaatcaagcctctcgcccctacagcttctactcctccctcatcagttatgaggaggatcagagacaaggcgctgaaccacggaagaactttgtgaaaccgaatgagacgaagacctacttctggaaagtacagcaccacatggcccccacaaaagacgaattcgattgcaaagcatgggcgtatttttcagacgttgacttggagaaagatgtacattcaggacttattggtcctttgttggtgtgtcacactaacactctcaatccagcccatggcaggcaggtgacagtccaggaattcgctcttttctttaccatctttgatgagaccaagtcctggtacttcacggaaaacatggagcgcaattgcagagccccctgtaacatacagatggaggaccctacctttaaggaaaattatcggttccacgcaatcaacggatacattatggatacactccctggccttgtgatggctcaggaccaacgaatcaggtggtacctcctcagcatgggttctaatgagaacatacactccattcacttttcaggacatgtgttcactgtccggaagaaagaagagtataagatggccctctacaatttgtatccaggcgtgtttgagaccgttgaaatgcttccctctaaagctggcatctggagagtagagtgcttgatcggagaacatcttcacgcaggtatgagcaccttgttcctcgtgtacagcaacaaatgtcagaccccacttggcatggccagtggacacattcgcgactttcagatcacagcatctggccagtatggacaatgggccccaaagttggctcgcctccattactccggtagcataaatgcgtggtccactaaagaacctttcagctggattaaggtcgatcttcttgcccccatgatcatccacggcattaagacacagggagcgaggcagaaattctcctccctctacatctcacagttcattattatgtatagtttggacggcaagaagtggcaaacttatagaggtaacagtactggaacagacatggtgttcttcggcaacgttgatagctctggcatcaaacacaacatctttaatcctcccataatagctcggtacatcagattgcatccgacccactacagcattaggagtacactccgaatggagcttatgggttgcgacttgaattcctgttcaatgccactcggaatggagtctaaagccatctctgatgcacagataaccgccagtagctactttacgaacatgtttgctacgtggtcaccctctaaggcaaggcttcatttgcaaggccggtctaatgcctggagacctcaggtgaacaacccgaaagaatggctccaggtggactttcagaagaccatgaaagtaacaggtgtcactactcagggagttaagtccttggatactagcatgtatgtgaaggagttccttatttcctcatcacaagatggccaccagtggaccctcttctttcagaatggtaaggtcaaagtgtttcagggcaatcaagacagcttcacacccgtggtgaacagtcttgatcctccactcttgacacgataccttcgaatccatccacagtcttgggagcaccagattgcattgcgcatggaagtacttggatgcgaggctcaggacctctac

SEQ ID NO: 1190 - protein, 1457 aa, synthetic construct
  REGION 1..1457: note = Variant of human B-domain deleted Factor VIII
MQIELSTCFFLCLLRFCFSATRRYYLGAVELSWDYMQSDLGELPVDARFPPRVPKSFPFNTSVVYKKTLFVEFTDHLFNIAKPRPPWMGLLGPTIQAEVYDTVVITLKNMASHPVSLHAVGVSYWKASEGAEYDDQTSQREKEDDKVFPGGSHTYVWQVLKENGPMASDPPCLTYSYLSHVDLVKDLNSGLIGALLVCREGSLAKEKTQTLHKFILLFAVFDEGKSWHSETKNSLMQDRDAASARAWPKMHTVNGYVNRTLPGLIGCHRKSVYWHVIGMGTTPEVHSIFLEGHTFLVRNHRQASLGISPITFLTAQTLLMDLGQFLLFCHIPSHQHDGMEAYVKVDSCPEEPQLRMKNNEEAEDYDDDLTDSEMDVVRFDDDNSPSIIQARSVAKKHPKTWVHYIAAEEEDWDYAPLVLAPDDRSYKSQYLNNGPQRIGRKYKKVRFMAYTDETFKTREAIQHESGILGPLLYGEVGDTLLIIFKNQASRPYNIYPHGITDVRPLYSRRLPKGVKHLKDFPILPGEIFKYKWTVTVEDGPTKSDPRCLTRYYSSFVNMERDLASGLIGPLLICYKESVDQRGNQIMSDKRNVILFSVFDENRSWYLTENIQRFLPNPAGVQLEDPEFQASNIMHSINGYVFDSLQLSVCLHEVAYWYILSIGAQTDFLSVFFSGYTFKHKMVYEDTLTLFPFSGETVFMSMENPGLWILGCHNSDFRNRGMTALLKVSSCDKNTGDYYEDSYEDISAYFDSKNNAIEPRSFSQNPPVLKRHQREITRTTLQSDQEEIDYDDTISVEMKKEDFDIYDEDENQSPRSFQKKTRHYFIAAVERLWDYGMSGSPHVLRNRAQSGSVPQFKKVVFQEFTDGSFTQPLYRGELNEHLGLLGPYIRAEVEDNIMVTFRNQASRPYSFYSSLISYEEDQRQGAEPRKNFVKPNETKTYFWKVQHHMAPTKDEFDCKAWAYFSDVDLEKDVHSGLIGPLLVCHTNTLNPAHGRQVTVQEFALFFTIFDETKSWYFTENMERNCRAPCNIQMEDPTFKENYRFHAINGYIMDTLPGLVMAQDQRIRWYLLSMGSNENIHSIHFSGHVFTVRKKEEYKMALYNLYPGVFETVEMLPSKAGIWRVECLIGEHLHAGMSTLFLVYSNKCQTPLGMASGHIRDFQITASGQYGQWAPKLARLHYSGSINAWSTKEPFSWIKVDLLAPMIIHGIKTQGARQKFSSLYISQFIIMYSLDGKKWQTYRGNSTGTDMVFFGNVDSSGIKHNIFNPPIIARYIRLHPTHYSIRSTLRMELMGCDLNSCSMPLGMESKAISDAQITASSYFTNMFATWSPSKARLHLQGRSNAWRPQVNNPKEWLQVDFQKTMKVTGVTTQGVKSLDTSMYVKEFLISSSQDGHQWTLFFQNGKVKVFQGNQDSFTPVVNSLDPPLLTRYLRIHPQSWEHQIALRMEVLGCEAQDLY

SEQ ID NO: 1191 - DNA, 4371 bp, synthetic construct
  misc_feature 1..4371: note = Variant of human B-domain deleted Factor VIII
  source 1..4371: mol_type = other DNA
atgcagattgaactgtctacctgcttcttcctctgtttgctgaggttctgctttagcgccactagacggtactaccttggcgctgtggagctgtcctgggactatatgcagagtgatttgggagagcttcccgtcgacgcacgatttcctcctcgcgttccaaagtcatttccctttaacacaagcgtggtgtacaagaagacgctcttcgtcgaattcaccgatcacctgttcaatatcgccaaacccagaccaccatggatgggtcttttggggcctaccatacaagcggaggtgtatgacacagttgttatcactctcaagaacatggcttctcatccggtaagtcttcacgcagtgggcgtgtcctactggaaagcttcagaaggagccgagtatgatgatcagacatcccagagggagaaagaagacgacaaggtatttccaggtgggtctcatacctatgtgtggcaagtgctcaaagagaatggccctatggcaagcgatccgccgtgtttgacttacagctacctttcacacgttgacctcgtcaaggacctcaactccgggttgattggagccttgttggtatgcagggaaggatctcttgccaaagagaagacacagaccctccacaagtttatccttctctttgctgtgttcgatgagggcaaaagttggcatagcgaaacgaagaattccctcatgcaggatcgcgacgcagccagcgccagagcttggcccaagatgcacactgtgaacggatatgtcaataggacgcttcctggcttgattgggtgtcatcggaaaagtgtctactggcacgtgatcggaatggggacaacaccagaggtccactccatatttctcgaaggccataccttccttgttcgaaaccacagacaggcatccttggggatctctcccattacctttctcactgcccaaacgctccttatggacttgggtcagttccttctcttttgccatatcccgtcacaccagcatgatggtatggaagcttatgtgaaagtcgacagttgtcctgaggagccacagttgcgcatgaagaataatgaagaagccgaggattacgacgacgatctcaccgattctgagatggacgtggtgaggtttgatgacgacaactctccctccatcattcaagctcggagcgtggcgaagaaacaccccaagacttgggtccactatatagcggcggaagaggaggattgggattacgctcctcttgtattggcaccagatgaccgctcatacaaaagccagtacctcaacaacggaccgcagagaattggccggaagtataagaaagtgcgatttatggcctatacagacgaaacctttaagacaagggaggccatccagcatgagagtgggattttgggacctcttctttacggcgaagttggtgataccctcctcatcatcttcaagaatcaagcttctcgcccctataacatttacccacacgggatcactgacgttaggcctttgtatagcagaagacttcccaaaggcgtgaagcatctcaaagacttccccattttgccaggcgagatctttaagtacaaatggaccgtcacagtggaagatggaccgactaaatcagaccctcgatgccttacgcggtactattcctccttcgtgaatatggagagagatttggcaagcggactcataggaccactcctcatctgttacaaggaatctgtagaccagaggggtaaccagattatgagtgataaacgcaatgtgatcctttttagcgtcttcgacgagaaccggtcctggtacttgaccgagaatatacaaaggttccttcccaaccccgcaggcgttcagttggaagaccctgagtttcaggccagcaatattatgcactcaatcaacggctatgtgtttgatagtctccagctttctgtttgcctccatgaagtagcctattggtacatcttgtcaattggtgctcaaacagacttcctctccgtcttcttctccggctacacctttaagcacaagagggtgtatgaggacactctcacactctttccattttctggagaaaccgtgttcatgagcatggagaatccaggcctttggatcttgggttgccacaacagtgattttcgcaatcggggaatgactgctctcctcaaagtcagcagctgtgataagaacacaggcgactattacgaagattcttacgaggacataagtgcctactttgactccaagaataacgccattgagcccagatcattctcccagaatcctcccgtgcttaaaaggcatcagcgcgaaatcaccagaactactcttcagtctgatcaagaggagattgactatgacgacaccataagcgtggaaatgaagaaggaggatttcgatatctatgacgaagatgagaaccagtctccgcggagctttcagaagaagacgcgacactacttcattgcagcagtcgaaaggctttgggactacggtatgtcatcatcccctcatgtgttgcgcaatagagctcagagtggaagtgttccacagttcaagaaagtcgtctttcaagagtttacagatggcagcttcacacagcctctctatcggggcgagcttaacgaacatttgggactccttggtccctatatccgagccgaagtggaggacaacattatggttacctttaggaatcaagcctctcgcccctacagcttctactcctccctcatcagttatgaggaggatcagagacaaggcgctgaaccacggaagaactttgtgaaaccgaatgagacgaagacctacttctggaaagtacagcaccacatggcccccacaaaagacgaattcgattgcaaagcatgggcgtatttttcagacgttgacttggagaaagatgtacattcaggacttattggtcctttgttggtgtgtcacactaacactctcaatccagcccatggcaggcaggtgacagtccaggaattcgctcttttctttaccatctttgatgagaccaagtcctggtacttcacggaaaacatggagcgcaattgcagagccccctgtaacatacagatggaggaccctacctttaaggaaaattatcggttccacgcaatcaacggatacattatggatacactccctggccttgtgatggctcaggaccaacgaatcaggtggtacctcctcagcatgggttctaatgagaacatacactccattcacttttcaggacatgtgttcactgtccggaagaaagaagagtataagatggccctctacaatttgtatccaggcgtgtttgagaccgttgaaatgcttccctctaaagctggcatctggagagtagagtgcttgatcggagaacatcttcacgcaggtatgagcaccttgttcctcgtgtacagcaacaaatgtcagaccccacttggcatggccagtggacacattcgcgactttcagatcacagcatctggccagtatggacaatgggccccaaagttggctcgcctccattactccggtagcataaatgcgtggtccactaaagaacctttcagctggattaaggtcgatcttcttgcccccatgatcatccacggcattaagacacagggagcgaggcagaaattctcctccctctacatctcacagttcattattatgtatagtttggacggcaagaagtggcaaacttatagaggtaacagtactggaacagacatggtgttcttcggcaacgttgatagctctggcatcaaacacaacatctttaatcctcccataatagctcggtacatcagattgcatccgacccactacagcattaggagtacactccgaatggagcttatgggttgcgacttgaattcctgttcaatgccactcggaatggagtctaaagccatctctgatgcacagataaccgccagtagctactttacgaacatgtttgctacgtggtcaccctctaaggcaaggcttcatttgcaaggccggtctaatgcctggagacctcaggtgaacaacccgaaagaatggctccaggtggactttcagaagaccatgaaagtaacaggtgtcactactcagggagttaagtccttggatactagcatgtatgtgaaggagttccttatttcctcatcacaagatggccaccagtggaccctcttctttcagaatggtaaggtcaaagtgtttcagggcaatcaagacagcttcacacccgtggtgaacagtcttgatcctccactcttgacacgataccttcgaatccatccacagtcttgggagcaccagattgcattgcgcatggaagtacttggatgcgaggctcaggacctctac

SEQ ID NO: 1192 - protein, 1457 aa, synthetic construct
  REGION 1..1457: note = Variant of human B-domain deleted Factor VIII
MQIELSTCFFLCLLRFCFSATRRYYLGAVELSWDYMQSDLGELPVDARFPPRVPKSFPFNTSVVYKKTLFVEFTDHLFNIAKPRPPWMGLLGPTIQAEVYDTVVITLKNMASHPVSLHAVGVSYWKASEGAEYDDQTSQREKEDDKVFPGGSHTYVWQVLKENGPMASDPPCLTYSYLSHVDLVKDLNSGLIGALLVCREGSLAKEKTQTLHKFILLFAVFDEGKSWHSETKNSLMQDRDAASARAWPKMHTVNGYVNRTLPGLIGCHRKSVYWHVIGMGTTPEVHSIFLEGHTFLVRNHRQASLGISPITFLTAQTLLMDLGQFLLFCHIPSHQHDGMEAYVKVDSCPEEPQLRMKNNEEAEDYDDDLTDSEMDVVRFDDDNSPSIIQARSVAKKHPKTWVHYIAAEEEDWDYAPLVLAPDDRSYKSQYLNNGPQRIGRKYKKVRFMAYTDETFKTREAIQHESGILGPLLYGEVGDTLLIIFKNQASRPYNIYPHGITDVRPLYSRRLPKGVKHLKDFPILPGEIFKYKWTVTVEDGPTKSDPRCLTRYYSSFVNMERDLASGLIGPLLICYKESVDQRGNQIMSDKRNVILFSVFDENRSWYLTENIQRFLPNPAGVQLEDPEFQASNIMHSINGYVFDSLQLSVCLHEVAYWYILSIGAQTDFLSVFFSGYTFKHKRVYEDTLTLFPFSGETVFMSMENPGLWILGCHNSDFRNRGMTALLKVSSCDKNTGDYYEDSYEDISAYFDSKNNAIEPRSFSQNPPVLKRHQREITRTTLQSDQEEIDYDDTISVEMKKEDFDIYDEDENQSPRSFQKKTRHYFIAAVERLWDYGMSSSPHVLRNRAQSGSVPQFKKVVFQEFTDGSFTQPLYRGELNEHLGLLGPYIRAEVEDNIMVTFRNQASRPYSFYSSLISYEEDQRQGAEPRKNFVKPNETKTYFWKVQHHMAPTKDEFDCKAWAYFSDVDLEKDVHSGLIGPLLVCHTNTLNPAHGRQVTVQEFALFFTIFDETKSWYFTENMERNCRAPCNIQMEDPTFKENYRFHAINGYIMDTLPGLVMAQDQRIRWYLLSMGSNENIHSIHFSGHVFTVRKKEEYKMALYNLYPGVFETVEMLPSKAGIWRVECLIGEHLHAGMSTLFLVYSNKCQTPLGMASGHIRDFQITASGQYGQWAPKLARLHYSGSINAWSTKEPFSWIKVDLLAPMIIHGIKTQGARQKFSSLYISQFIIMYSLDGKKWQTYRGNSTGTDMVFFGNVDSSGIKHNIFNPPIIARYIRLHPTHYSIRSTLRMELMGCDLNSCSMPLGMESKAISDAQITASSYFTNMFATWSPSKARLHLQGRSNAWRPQVNNPKEWLQVDFQKTMKVTGVTTQGVKSLDTSMYVKEFLISSSQDGHQWTLFFQNGKVKVFQGNQDSFTPVVNSLDPPLLTRYLRIHPQSWEHQIALRMEVLGCEAQDLY

SEQ ID NO: 1193 - DNA, 4371 bp, synthetic construct
  misc_feature 1..4371: note = Variant of human B-domain deleted Factor VIII
  source 1..4371: mol_type = other DNA
atgcagattgaactgtctacctgcttcttcctctgtttgctgaggttctgctttagcgccactagacggtactaccttggcgctgtggagctgtcctgggactatatgcagagtgatttgggagagcttcccgtcgacgcacgatttcctcctcgcgttccaaagtcatttccctttaacacaagcgtcgtgtacaagaagacgctcttcgtcgaattcaccgatcacctgttcaatatcgccaaacccagaccaccatggatgggtcttttggggcctaccatacaagcggaggtgtatgacacagttgttatcactctcaagaacatggcttctcatccggtaagtcttcacgcagtgggcgtgtcctactggaaagcttcagaaggagccgagtatgatgatcagacatcccagagggagaaagaagacgacaaggtatttccaggtgggtctcatacctatgtgtggcaagtgctcaaagagaatggccctatggcaagcgatccgccgtgtttgacttacagctacctttcacacgttgacctcgtcaaggacctcaactccgggttgattggagccttgttggtatgcagggaaggatctcttgccaaagagaagacacagaccctccacaagtttatccttctctttgctgtgttcgatgagggcaaaagttggcatagcgaaacgaagaattccctcatgcaggatcgcgacgcagccagcgccagagcttggcccaagatgcacactgtgaacggatatgtcaataggacgcttcctggcttgattgggtgtcatcggaaaagtgtctactggcacgtgatcggaatggggacaacaccagaggtccactccatatttctcgaaggccataccttccttgttcgaaaccacagacaggcatccttggggatctctcccattacctttctcactgcccaaacgctccttatggacttgggtcagttccttctcttttgccatatcccgtcacaccagcatgatggtatggaagcttatgtgaaagtcgacagttgtcctgaggagccacagttgcgcatgaagaataatgaagaagccgaggattacgacgacgatctcaccgattctgagatggacgtggtgaggtttgatgacgacaactctccctccatcattcaagctcggagcggggcgaagaaacaccccaagacttgggtccactatatagcggcggaagaggaggattgggattacgctcctcttgtattggcaccagatgaccgctcatacaaaagccagtacctcaacaacggaccgcagagaattggccggaagtataagaaagtgcgatttatggcctatacagacgaaacctttaagacaagggaggccatccagcatgagagtgggattttgggacctcttctttacggcgaagttggtgataccctcctcatcatcttcaagaatcaagcttctcgcccctataacatttacccacacgggatcactgacgttaggcctttgtatagcagaagacttcccaaaggcgtgaagcatctcaaagacttccccattttgccaggcgagatctttaagtacaaatggaccgtcacagtggaagatggaccgactaaatcagaccctcgatgccttacgcggtactattcctccttcgtgaatatggagagagatttggcaagcggactcataggaccactcctcatctgttacaaggaatctgtagaccagaggggtaaccagattatgagtgataaacgcaatgtgatcctttttagcgtcttcgacgagaaccggtcctggtacttgaccgagaatatacaaaggttccttcccaaccccgcaggcgttcagttggaagaccctgagtttcaggccagcaatattatgcactcaatcaacggctatgtgtttgatagtctccagctttctgtttgcctccatgaagtagcctattggtacatcttgtcaattggtgctcaaacagacttcctctccgtcttcttctccggctacacctttaagcacaagatggtgtatgaggacactctcacactctttccattttctggagaaaccgtgttcatgagcatggagaatccaggcctttggatcttgggttgccacaacagtgattttcgcaatcggggaatgactgctctcctcaaagtcagcagctgtgataagaacacaggcgactattacgaagattcttacgaggacataagtgcctactttgactccaagaataacgccattgagcccagatcattctcccagaatcctcccgtgcttaaaaggcatcagcgcgaaatcaccagaactactcttcagtctgatcaagaggagattgactatgacgacaccataagcgtggaaatgaagaaggaggatttcgatatctatgacgaagatgagaaccagtctccgcggagctttcagaagaagacgcgacactacttcattgcagcagtcgaaaggctttgggactacggtatgtcatcatcccctcatgtgttgcgcaatagagctcagagtggaagtgttccacagttcaagaaagtcgtctttcaagagtttacagatggcagcttcacacagcctctctatcggggcgagcttaacgaacatttgggactccttggtccctatatccgagccgaagtggaggacaacattatggttacctttaggaatcaagcctctcgcccctacagcttctactcctccctcatcagttatgaggaggatcagagacaaggcgctgaaccacggaagaactttgtgaaaccgaatgagacgaagacctacttctggaaagtacagcaccacatggcccccacaaaagacgaattcgattgcaaagcatgggcgtatttttcagacgttgacttggagaaagatgtacattcaggacttattggtcctttgttggtgtgtcacactaacactctcaatccagcccatggcaggcaggtgacagtccaggaattcgctcttttctttaccatctttgatgagaccaagtcctggtacttcacggaaaacatggagcgcaattgcagagccccctgtaacatacagatggaggaccctacctttaaggaaaattatcggttccacgcaatcaacggatacattatggatacactccctggccttgtgatggctcaggaccaacgaatcaggtggtacctcctcagcatgggttctaatgagaacatacactccattcacttttcaggacatgtgttcactgtccggaagaaagaagagtataagatggccctctacaatttgtatccaggcgtgtttgagaccgttgaaatgcttccctctaaagctggcatctggagagtagagtgcttgatcggagaacatcttcacgcaggtatgagcaccttgttcctcgtgtacagcaacaaatgtcagaccccacttggcatggccagtggacacattcgcgactttcagatcacagcatctggccagtatggacaatgggccccaaagttggctcgcctccattactccggtagcataaatgcgtggtccactaaagaacctttcagctggattaaggtcgatcttcttgcccccatgatcatccacggcattaagacacagggagcgaggcagaaattctcctccctctacatctcacagttcattattatgtatagtttggacggcaagaagtggcaaacttatagaggtaacagtactggaacagacatggtgttcttcggcaacgttgatagctctggcatcaaacacaacatctttaatcctcccataatagctcggtacatcagattgcatccgacccactacagcattaggagtacactccgaatggagcttatgggttgcgacttgaattcctgttcaatgccactcggaatggagtctaaagccatctctgatgcacagataaccgccagtagctactttacgaacatgtttgctacgtggtcaccctctaaggcaaggcttcatttgcaaggccggtctaatgcctggagacctcaggtgaacaacccgaaagaatggctccaggtggactttcagaagaccatgaaagtaacaggtgtcactactcagggagttaagtccttggatactagcatgtatgtgaaggagttccttatttcctcatcacaagatggccaccagtggaccctcttctttcagaatggtaaggtcaaagtgtttcagggcaatcaagacagcttcacacccgtggtgaacagtcttgatcctccactcttgacacgataccttcgaatccatccacagtcttgggagcaccagattgcattgcgcatggaagtacttggatgcgaggctcaggacctctac

SEQ ID NO: 1194 - protein, 1457 aa, synthetic construct
  REGION 1..1457: note = Variant of human B-domain deleted Factor VIII
MQIELSTCFFLCLLRFCFSATRRYYLGAVELSWDYMQSDLGELPVDARFPPRVPKSFPFNTSVVYKKTLFVEFTDHLFNIAKPRPPWMGLLGPTIQAEVYDTVVITLKNMASHPVSLHAVGVSYWKASEGAEYDDQTSQREKEDDKVFPGGSHTYVWQVLKENGPMASDPPCLTYSYLSHVDLVKDLNSGLIGALLVCREGSLAKEKTQTLHKFILLFAVFDEGKSWHSETKNSLMQDRDAASARAWPKMHTVNGYVNRTLPGLIGCHRKSVYWHVIGMGTTPEVHSIFLEGHTFLVRNHRQASLGISPITFLTAQTLLMDLGQFLLFCHIPSHQHDGMEAYVKVDSCPEEPQLRMKNNEEAEDYDDDLTDSEMDVVRFDDDNSPSIIQARSGAKKHPKTWVHYIAAEEEDWDYAPLVLAPDDRSYKSQYLNNGPQRIGRKYKKVRFMAYTDETFKTREAIQHESGILGPLLYGEVGDTLLIIFKNQASRPYNIYPHGITDVRPLYSRRLPKGVKHLKDFPILPGEIFKYKWTVTVEDGPTKSDPRCLTRYYSSFVNMERDLASGLIGPLLICYKESVDQRGNQIMSDKRNVILFSVFDENRSWYLTENIQRFLPNPAGVQLEDPEFQASNIMHSINGYVFDSLQLSVCLHEVAYWYILSIGAQTDFLSVFFSGYTFKHKMVYEDTLTLFPFSGETVFMSMENPGLWILGCHNSDFRNRGMTALLKVSSCDKNTGDYYEDSYEDISAYFDSKNNAIEPRSFSQNPPVLKRHQREITRTTLQSDQEEIDYDDTISVEMKKEDFDIYDEDENQSPRSFQKKTRHYFIAAVERLWDYGMSSSPHVLRNRAQSGSVPQFKKVVFQEFTDGSFTQPLYRGELNEHLGLLGPYIRAEVEDNIMVTFRNQASRPYSFYSSLISYEEDQRQGAEPRKNFVKPNETKTYFWKVQHHMAPTKDEFDCKAWAYFSDVDLEKDVHSGLIGPLLVCHTNTLNPAHGRQVTVQEFALFFTIFDETKSWYFTENMERNCRAPCNIQMEDPTFKENYRFHAINGYIMDTLPGLVMAQDQRIRWYLLSMGSNENIHSIHFSGHVFTVRKKEEYKMALYNLYPGVFETVEMLPSKAGIWRVECLIGEHLHAGMSTLFLVYSNKCQTPLGMASGHIRDFQITASGQYGQWAPKLARLHYSGSINAWSTKEPFSWIKVDLLAPMIIHGIKTQGARQKFSSLYISQFIIMYSLDGKKWQTYRGNSTGTDMVFFGNVDSSGIKHNIFNPPIIARYIRLHPTHYSIRSTLRMELMGCDLNSCSMPLGMESKAISDAQITASSYFTNMFATWSPSKARLHLQGRSNAWRPQVNNPKEWLQVDFQKTMKVTGVTTQGVKSLDTSMYVKEFLISSSQDGHQWTLFFQNGKVKVFQGNQDSFTPVVNSLDPPLLTRYLRIHPQSWEHQIALRMEVLGCEAQDLY

SEQ ID NO: 1195 - DNA, 4371 bp, synthetic construct
  misc_feature 1..4371: note = Variant of human B-domain deleted Factor VIII
  source 1..4371: mol_type = other DNA
atgcagattgaactgtctacctgcttcttcctctgtttgctgaggttctgctttagcgccactagacggtactaccttggcgctgtggagctgtcctgggactatatgcagagtgatttgggagagcttcccgtcgacgcacgatttcctcctcgcgttccaaagtcatttccctttaacacaagcgtcgtgtacaagaagacgctcttcgtcgaattcaccgatcacctgttcaatatcgccaaacccagaccaccatggatgggtcttttggggcctaccatacaagcggaggtgtatgacacagttgttatcactctcaagaacatggcttctcatccggtaagtcttcacgcagtgggcgtgtcctactggaaagcttcagaaggagccgagtatgatgatcagacatcccagagggagaaagaagacgacaaggtatttccaggtgggtctcatacctatgtgtggcaagtgctcaaagagaatggccctatggcaagcgatccgccgtgtttgacttacagctacctttcacacgttgacctcgtcaaggacctcaactccgggttgattggagccttgttggtatgcagggaaggatctcttgccaaagagaagacacagaccctccacaagtttatccttctctttgctgtgttcgatgagggcaaaagttggcatagcgaaacgaagaattccctcatgcaggatcgcgacgcagccagcgccagagcttggcccaagatgcacactgtgaacggatatgtcaataggacgcttcctggcttgattgggtgtcatcggaaaagtgtctactggcacgtgatcggaatggggacaacaccagaggtccactccatatttctcgaaggccataccttccttgttcgaaaccacagacaggcatccttggggatctctcccattacctttctcactgcccaaacgctccttatggacttgggtcagttccttctcttttgccatatcccgtcacaccagcatgatggtatggaagcttatgtgaaagtcgacagttgtcctgaggagccacagttgcgcatgaagaataatgaagaagccgaggattacgacgacgatctcaccgattctgagatggacgtggtgaggtttgatgacgacaactctccctccatcattcaagctcggagcggggcgaagaaacaccccaagacttgggtccactatatagcggcggaagaggaggattgggattacgctcctcttgtattggcaccagatgaccgctcatacaaaagccagtacctcaacaacggaccgcagagaattggccggaagtataagaaagtgcgatttatggcctatacagacgaaacctttaagacaagggaggccatccagcatgagagtgggattttgggacctcttctttacggcgaagttggtgataccctcctcatcatcttcaagaatcaagcttctcgcccctataacatttacccacacgggatcactgacgttaggcctttgtatagcagaagacttcccaaaggcgtgaagcatctcaaagacttccccattttgccaggcgagatctttaagtacaaatggaccgtcacagtggaagatggaccgactaaatcagaccctcgatgccttacgcggtactattcctccttcgtgaatatggagagagatttggcaagcggactcataggaccactcctcatctgttacaaggaatctgtagaccagaggggtaaccagattatgagtgataaacgcaatgtgatcctttttagcgtcttcgacgagaaccggtcctggtacttgaccgagaatatacaaaggttccttcccaaccccgcaggcgttcagttggaagaccctgagtttcaggccagcaatattatgcactcaatcaacggctatgtgtttgatagtctccagctttctgtttgcctccatgaagtagcctattggtacatcttgtcaattggtgctcaaacagacttcctctccgtcttcttctccggctacacctttaagcacaagatggtgtatgaggacactctcacactctttccattttctggagaaaccgtgttcatgagcatggagaatccaggcctttggatcttgggttgccacaacagtgattttcgcaatcggggaatgactgctctcctcaaagtcagcagctgtgataagaacacaggcgactattacgaagattcttacgaggacataagtgactactttgactcgggcaataacgccattgagcccagatcattctcccagaatcctcccgtgcttaaaaggcatcagcgcgaaatcaccagaactactcttcagtctgatcaagaggagattgactatgacgacaccattagcgtggaaatgaagaaggaggatttcgatatctatgacgaagatgagaacttctctccgcggagctttcagaaggtcacgcgacactacttcattgcagcagtcgaaaggctttgggactacggtatgtcatcatcccctcatgtgttgcgcaatagagctcagagtggaagtgttccacagttcaagaaagtcgtctttcaagagtttacagatggcagcttcacacagcctctctatcggggcgagcttaacgaacatttgggactccttggtccctatatccgagccgaagtggaggacaacattatggttacctttaggaatcaagcctctcgcccctacagcttctactcctccctcatcagttatgaggaggatcagagaatgggcgctgaaccacggaagaactttgtgaaaccgaatgagacgaagacctacttctggaaagtacagcaccacatggcccccacaaaagacgaattcgattgcaaagcatgggcgtatttttcagacgttgacttggagaaagatgtacattcaggacttattggtcctttgttggtgtgtcacactaacactctcaatccagcccatggcaggcaggtgacagtccaggaattcgctcttttctttaccatctttgatgagaccaagtcctggtacttcacggaaaacatggagcgcaattgcagagccccctgtaacatacagatggaggaccctacctttaaggaaaattatcggttccacgcaatcaacggatacattatggatacactccctggccttgtgatggctcaggaccaacgaatcaggtggtacctcctcagcatgggttctaatgagaacatacactccattcacttttcaggacatgtgttcactgtccggaagaaagaagagtataagatggccctctacaatttgtatccaggcgtgtttgagaccgttgaaatgcttccctctaaagctggcatctggagagtagagtgcttgatcggagaacatcttcacgcaggtatgagcaccttgttcctcgtgtacagcaacaaatgtcagaatccacttggcatggccagtggacacattcgcgactttcagatcacagcatctggccagtatggacaatgggccccaaagttggctcgcctccattactccggtagcataaatgcgtggtccactaaagaacctttcagctggattaaggtcgatcttcttgcccccatgatcatccacggcattaagacacagggagcgaggcagaaattctcctccctctacatctcacagttcattattatgtatagtttggacggcaagaagtggcaaacttatagaggtaacagtactggaacagacatggtgttcttcggcaacgttgatagctctggcatcaaacacaacatctttaatcctcccataatagctcggtacatcagattgcatccgacccactacagcattaggagtacactccgaatggagcttatgggttgcgacttgaattcctgttcaatgccactcggaatggagtctaaagccatctctgatgcacagataaccgccagtagctactttacgaacatgtttgctacgtggtcaccctctaaggcaaggcttcatttgcaaggccggtctaatgcctggagacctcaggtgaacaacccgaaagaatggctccaggtggactttcagaagaccatgaaagtaacaggtgtcactactcagggagttaagtccttggatactagcatgtatgtgaaggagttccttatttcctcatcacaagatggccaccagtggaccctcttctttcagaatggtaaggtcaaagtgtttcagggcaatcaagacagcttcacacccgtggtgaacagtcttgatcctccactcttgacacgataccttcgaatccatccacagtcttgggagcaccagattgcattgcgcatggaagtacttggatgcgaggctcaggacctctac

SEQ ID NO: 1196 - protein, 1457 aa, synthetic construct
  REGION 1..1457: note = Variant of human B-domain deleted Factor VIII
MQIELSTCFFLCLLRFCFSATRRYYLGAVELSWDYMQSDLGELPVDARFPPRVPKSFPFNTSVVYKKTLFVEFTDHLFNIAKPRPPWMGLLGPTIQAEVYDTVVITLKNMASHPVSLHAVGVSYWKASEGAEYDDQTSQREKEDDKVFPGGSHTYVWQVLKENGPMASDPPCLTYSYLSHVDLVKDLNSGLIGALLVCREGSLAKEKTQTLHKFILLFAVFDEGKSWHSETKNSLMQDRDAASARAWPKMHTVNGYVNRTLPGLIGCHRKSVYWHVIGMGTTPEVHSIFLEGHTFLVRNHRQASLGISPITFLTAQTLLMDLGQFLLFCHIPSHQHDGMEAYVKVDSCPEEPQLRMKNNEEAEDYDDDLTDSEMDVVRFDDDNSPSIIQARSGAKKHPKTWVHYIAAEEEDWDYAPLVLAPDDRSYKSQYLNNGPQRIGRKYKKVRFMAYTDETFKTREAIQHESGILGPLLYGEVGDTLLIIFKNQASRPYNIYPHGITDVRPLYSRRLPKGVKHLKDFPILPGEIFKYKWTVTVEDGPTKSDPRCLTRYYSSFVNMERDLASGLIGPLLICYKESVDQRGNQIMSDKRNVILFSVFDENRSWYLTENIQRFLPNPAGVQLEDPEFQASNIMHSINGYVFDSLQLSVCLHEVAYWYILSIGAQTDFLSVFFSGYTFKHKMVYEDTLTLFPFSGETVFMSMENPGLWILGCHNSDFRNRGMTALLKVSSCDKNTGDYYEDSYEDISDYFDSGNNAIEPRSFSQNPPVLKRHQREITRTTLQSDQEEIDYDDTISVEMKKEDFDIYDEDENFSPRSFQKVTRHYFIAAVERLWDYGMSSSPHVLRNRAQSGSVPQFKKVVFQEFTDGSFTQPLYRGELNEHLGLLGPYIRAEVEDNIMVTFRNQASRPYSFYSSLISYEEDQRMGAEPRKNFVKPNETKTYFWKVQHHMAPTKDEFDCKAWAYFSDVDLEKDVHSGLIGPLLVCHTNTLNPAHGRQVTVQEFALFFTIFDETKSWYFTENMERNCRAPCNIQMEDPTFKENYRFHAINGYIMDTLPGLVMAQDQRIRWYLLSMGSNENIHSIHFSGHVFTVRKKEEYKMALYNLYPGVFETVEMLPSKAGIWRVECLIGEHLHAGMSTLFLVYSNKCQNPLGMASGHIRDFQITASGQYGQWAPKLARLHYSGSINAWSTKEPFSWIKVDLLAPMIIHGIKTQGARQKFSSLYISQFIIMYSLDGKKWQTYRGNSTGTDMVFFGNVDSSGIKHNIFNPPIIARYIRLHPTHYSIRSTLRMELMGCDLNSCSMPLGMESKAISDAQITASSYFTNMFATWSPSKARLHLQGRSNAWRPQVNNPKEWLQVDFQKTMKVTGVTTQGVKSLDTSMYVKEFLISSSQDGHQWTLFFQNGKVKVFQGNQDSFTPVVNSLDPPLLTRYLRIHPQSWEHQIALRMEVLGCEAQDLY

SEQ ID NO: 1197 - DNA, 4371 bp, synthetic construct
  misc_feature 1..4371: note = Variant of human B-domain deleted Factor VIII
  source 1..4371: mol_type = other DNA
atgcagattgaactgtctacctgcttcttcctctgtttgctgaggttctgctttagcgccactagacggtactaccttggcgctgtggagctgtcctgggactatatgcagagtgatttgggagagcttcccgtcgacgcacgatttcctcctcgcgttccaaagtcatttccctttaacacaagcgtcgtgtacaagaagacgctcttcgtcgaattcaccgatcacctgttcaatatcgccaaacccagaccaccatggatgggtcttttggggcctaccatacaagcggaggtgtatgacacagttgttatcactctcaagaacatggcttctcatccggtaagtcttcacgcagtgggcgtgtcctactggaaagcttcagaaggagccgagtatgatgatcagacatcccagagggagaaagaagacgacaaggtatttccaggtgggtctcatacctatgtgtggcaagtgctcaaagagaatggccctatggcaagcgatccgccgtgtttgacttacagctacctttcacacgttgacctcgtcaaggacctcaactccgggttgattggagccttgttggtatgcagggaaggatctcttgccaaagagaagacacagaccctccacaagtttatccttctctttgctgtgttcgatgagggcaaaagttggcatagcgaaacgaagaattccctcatgcaggatcgcgacgcagccagcgccagagcttggcccaagatgcacactgtgaacggatatgtcaataggacgcttcctggcttgattgggtgtcatcggaaaagtgtctactggcacgtgatcggaatggggacaacaccagaggtccactccatatttctcgaaggccataccttccttgttcgaaaccacagacaggcatccttggggatctctcccattacctttctcactgcccaaacgctccttatggacttgggtcagttccttctcttttgccatatcccgtcacaccagcatgatggtatggaagcttatgtgaaagtcgacagttgtcctgaggagccacagttgcgcatgaagaataatgaagaagccgaggattacgacgacgatctcaccgattctgagatggacgtggtgaggtttgatgacgacaactctccctccatcattcaagctcggagcggggcgaagaaacaccccaagacttgggtccactatatagcggcggaagaggaggattgggattacgctcctcttgtattggcaccagatgaccgctcatacaaaagccagtacctcaacaacggaccgcagagaattggccggaagtataagaaagtgcgatttatggcctatacagacgaaacctttaagacaagggaggccatccagcatgagagtgggattttgggacctcttctttacggcgaagttggtgataccctcctcatcatcttcaagaatcaagcttctcgcccctataacatttacccacacgggatcactgacgttaggcctttgtatagcagaagacttcccaaaggcgtgaagcatctcaaagacttccccattttgccaggcgagatctttaagtacaaatggaccgtcacagtggaagatggaccgactaaatcagaccctcgatgccttacgcggtactattcctccttcgtgaatatggagagagatttggcaagcggactcataggaccactcctcatctgttacaaggaatctgtagaccagaggggtaaccagattatgagtgataaacgcaatgtgatcctttttagcgtcttcgacgagaaccggtcctggtacttgaccgagaatatacaaaggttccttcccaaccccgcaggcgttcagttggaagaccctgagtttcaggccagcaatattatgcactcaatcaacggctatgtgtttgatagtctccagctttctgtttgcctccatgaagtagcctattggtacatcttgtcaattggtgctcaaacagacttcctctccgtcttcttctccggctacacctttaagcacaagatggtgtatgaggacactctcacactctttccattttctggagaaaccgtgttcatgagcatggagaatccaggcctttggatcttgggttgccacaacagtgattttcgcaatcggggaatgactgctctcctcaaagtcagcagctgtgataagaacacaggcgactattacgaagattcttacgaggacataagtgcctactttgactacaaaaataacgccattgagcccagatcattctcccagaatcctcccgtgcttaaaaggcatcagcgcgaaggtaccagaactactcttcagtctgatcaagaggagattgactatgacgacaccataagcgtggaaatgaagaaggaggatttcgatatctatgacgaagatgagaaccagtctccgcggagctttcagaagaagacgcgacactacttcattgcagcagtcgaaaggctttgggactacggtatgtcatcatcccctcatgtgttgcgcaatagagctcagagtggaagtgttccacagttcaagaaagtcgtctttcaagagtttacagatggcagcttcacacagcctctctatcggggcgagcttaacgaacatttgggactccttggtccctatatccgagccgaagtggaggacaacattatggttacctttaggaatcaagcctctcgcccctacagcttctactcctccctcatcagttatgaggaggatcagagacaaggcgctgaaccacggaagaactttgtgaaaccgaatgagacgaagacctacttctggaaagtacagcaccacatggcccccacaaaagacgaattcgattgcaaagcatgggcgtatttttcagacgttgacttggagaaagatgtacattcaggacttattggtcctttgttggtgtgtcacactaacactctcaatccagcccatggcaggcaggtgacagtccaggaattcgctcttttctttaccatctttgatgagaccaagtcctggtacttcacggaaaacatggagcgcaattgcagagccccctgtaacatacagatggaggaccctacctttaaggaaaattatcggttccacgcaatcaacggatacattatggatacactccctggccttgtgatggctcaggaccaacgaatcaggtggtacctcctcagcatgggttctaatgagaacatacactccattcacttttcaggacatgtgttcactgtccggaagaaagaagagtataagatggccctctacaatttgtatccaggcgtgtttgagaccgttgaaatgcttccctctaaagctggcatctggagagtagagtgcttgatcggagaacatcttcacgcaggtatgagcaccttgttcctcgtgtacagcaacaaatgtcagaccccacttggcatggccagtggacacattcgcgactttcagatcacagcatctggccagtatggacaatgggccccaaagttggctcgcctccattactccggtagcataaatgcgtggtccactaaagaacctttcagctggattaaggtcgatcttcttgcccccatgatcatccacggcattaagacacagggagcgaggcagaaattctcctccctctacatctcacagttcattattatgtatagtttggacggcaagaagtggcaaacttatagaggtaacagtactggaacagacatggtgttcttcggcaacgttgatagctctggcatcaaacacaacatctttaatcctcccataatagctcggtacatcagattgcatccgacccactacagcattaggagtacactccgaatggagcttatgggttgcgacttgaattcctgttcaatgccactcggaatggagtctaaagccatctctgatgcacagataaccgccagtagctactttacgaacatgtttgctacgtggtcaccctctaaggcaaggcttcatttgcaaggccggtctaatgcctggagacctcaggtgaacaacccgaaagaatggctccaggtggactttcagaagaccatgaaagtaacaggtgtcactactcagggagttaagtccttggatactagcatgtatgtgaaggagttccttatttcctcatcacaagatggccaccagtggaccctcttctttcagaatggtaaggtcaaagtgtttcagggcaatcaagacagcttcacacccgtggtgaacagtcttgatcctccactcttgacacgataccttcgaatccatccacagtcttgggagcaccagattgcattgcgcatggaagtacttggatgcgaggctcaggacctctac

SEQ ID NO: 1198 - protein, 1457 aa, synthetic construct
  REGION 1..1457: note = Variant of human B-domain deleted Factor VIII
MQIELSTCFFLCLLRFCFSATRRYYLGAVELSWDYMQSDLGELPVDARFPPRVPKSFPFNTSVVYKKTLFVEFTDHLFNIAKPRPPWMGLLGPTIQAEVYDTVVITLKNMASHPVSLHAVGVSYWKASEGAEYDDQTSQREKEDDKVFPGGSHTYVWQVLKENGPMASDPPCLTYSYLSHVDLVKDLNSGLIGALLVCREGSLAKEKTQTLHKFILLFAVFDEGKSWHSETKNSLMQDRDAASARAWPKMHTVNGYVNRTLPGLIGCHRKSVYWHVIGMGTTPEVHSIFLEGHTFLVRNHRQASLGISPITFLTAQTLLMDLGQFLLFCHIPSHQHDGMEAYVKVDSCPEEPQLRMKNNEEAEDYDDDLTDSEMDVVRFDDDNSPSIIQARSGAKKHPKTWVHYIAAEEEDWDYAPLVLAPDDRSYKSQYLNNGPQRIGRKYKKVRFMAYTDETFKTREAIQHESGILGPLLYGEVGDTLLIIFKNQASRPYNIYPHGITDVRPLYSRRLPKGVKHLKDFPILPGEIFKYKWTVTVEDGPTKSDPRCLTRYYSSFVNMERDLASGLIGPLLICYKESVDQRGNQIMSDKRNVILFSVFDENRSWYLTENIQRFLPNPAGVQLEDPEFQASNIMHSINGYVFDSLQLSVCLHEVAYWYILSIGAQTDFLSVFFSGYTFKHKMVYEDTLTLFPFSGETVFMSMENPGLWILGCHNSDFRNRGMTALLKVSSCDKNTGDYYEDSYEDISAYFDYKNNAIEPRSFSQNPPVLKRHQREGTRTTLQSDQEEIDYDDTISVEMKKEDFDIYDEDENQSPRSFQKKTRHYFIAAVERLWDYGMSSSPHVLRNRAQSGSVPQFKKVVFQEFTDGSFTQPLYRGELNEHLGLLGPYIRAEVEDNIMVTFRNQASRPYSFYSSLISYEEDQRQGAEPRKNFVKPNETKTYFWKVQHHMAPTKDEFDCKAWAYFSDVDLEKDVHSGLIGPLLVCHTNTLNPAHGRQVTVQEFALFFTIFDETKSWYFTENMERNCRAPCNIQMEDPTFKENYRFHAINGYIMDTLPGLVMAQDQRIRWYLLSMGSNENIHSIHFSGHVFTVRKKEEYKMALYNLYPGVFETVEMLPSKAGIWRVECLIGEHLHAGMSTLFLVYSNKCQTPLGMASGHIRDFQITASGQYGQWAPKLARLHYSGSINAWSTKEPFSWIKVDLLAPMIIHGIKTQGARQKFSSLYISQFIIMYSLDGKKWQTYRGNSTGTDMVFFGNVDSSGIKHNIFNPPIIARYIRLHPTHYSIRSTLRMELMGCDLNSCSMPLGMESKAISDAQITASSYFTNMFATWSPSKARLHLQGRSNAWRPQVNNPKEWLQVDFQKTMKVTGVTTQGVKSLDTSMYVKEFLISSSQDGHQWTLFFQNGKVKVFQGNQDSFTPVVNSLDPPLLTRYLRIHPQSWEHQIALRMEVLGCEAQDLY

SEQ ID NO: 1199 - DNA, 4371 bp, synthetic construct
  misc_feature 1..4371: note = Variant of human B-domain deleted Factor VIII
  source 1..4371: mol_type = other DNA
atgcagattgaactgtctacctgcttcttcctctgtttgctgaggttctgctttagcgccactagacggtactaccttggcgctgtggagctgtcctgggactatatgcagagtgatttgggagagcttcccgtcgacgcacgatttcctcctcgcgttccaaagtcatttccctttaacacaagccaggtgtacaagaagacgctcttcgtcgaattcaccgatcacctgttcaatatcgccaaacccagaccaccatggatgggtcttttggggcctaccatacaagcggaggtgtatgacacagttgttatcactctcaagaacatggcttctcatccggtaagtcttcacgcagtgggcgtgtcctactggaaagcttcagaaggagccgagtatgatgatcagacatcccagagggagaaagaagacgacaaggtatttccaggtgggtctcatacctatgtgtggcaagtgctcaaagagaatggccctatggcaagcgatccgccgtgtttgacttacagctacctttcacacgttgacctcgtcaaggacctcaactccgggttgattggagccttgttggtatgcagggaaggatctcttgccaaagagaagacacagaccctccacaagtttatccttctctttgctgtgttcgatgagggcaaaagttggcatagcgaaacgaagaattccctcatgcaggatcgcgacgcagccagcgccagagcttggcccaagatgcacactgtgaacggatatgtcaataggacgcttcctggcttgattgggtgtcatcggaaaagtgtctactggcacgtgatcggaatggggacaacaccagaggtccactccatatttctcgaaggccataccttccttgttcgaaaccacagacaggcatccttggggatctctcccattacctttctcactgcccaaacgctccttatggacttgggtcagttccttctcttttgccatatcccgtcacaccagcatgatggtatggaagcttatgtgaaagtcgacagttgtcctgaggagccacagttgcgcatgaagaataatgaagaagccgaggattacgacgacgatctcaccgattctgagatggacgtggtgaggtttgatgacgacaactctccctccatcattcaagctcggagcggggcgaagaaacaccccaagacttgggtccactatatagcggcggaagaggaggattgggattacgctcctcttgtattggcaccagatgaccgctcatacaaaagccagtacctcaacaacggaccgcagagaattggccggaagtataagaaagtgcgatttatggcctatacagacgaaacctttaagacaagggaggccatccagcatgagagtgggattttgggacctcttctttacggcgaagttggtgataccctcctcatcatcttcaagaatcaagcttctcgcccctataacatttacccacacgggatcactgacgttaggcctttgtatagcagaagacttcccaaaggcgtgaagcatctcaaagacttccccattttgccaggcgagatctttaagtacaaatggaccgtcacagtggaagatggaccgactaaatcagaccctcgatgccttacgcggtactattcctccttcgtgaatatggagagagatttggcaagcggactcataggaccactcctcatctgttacaaggaatctgtagaccagaggggtaaccagattatgagtgataaacgcaatgtgatcctttttagcgtcttcgacgagaaccggtcctggtacttgaccgagaatatacaaaggttccttcccaaccccgcaggcgttcagttggaagaccctgagtttcaggccagcaatattatgcactcaatcaacggctatgtgtttgatagtctccagctttctgtttgcctccatgaagtagcctattggtacatcttgtcaattggtgctcaaacagacttcctctccgtcttcttctccggctacacctttaagcacaagatggtgtatgaggacactctcacactctttccattttctggagaaaccgtgttcatgagcatggagaatccaggcctttggatcttgggttgccacaacagtgattttcgcaatcggggaatgactgctctcctcaaagtcagcagctgtgattggaacacaggcgactattacgaagattcttacgaggacataagtgcctactttgactccaagaataacgccattgagcccagatcattctcccagaatcctcccgtgcttaaaaggcatcagcgcgaaggtaccagaactactcttcagtctgatcaagaggagattgactatgacgacaccattagcgtggaaatgaagaaggaggatttcgatatctatgacgaagatgagaaccagtctccgcggagctttcagaagaagacgcgacactacttcattgcagcagtcgaaaggctttgggactacggtatgtcatcatcccctcatgtgttgcgcaatagagctcagagtggaagtgttccacagttcaagaaagtcgtctttcaagagtttacagatggcagcttcacacagcctctctatcggggcgagcttaacgaacatttgggactccttggtccctatatccgagccgaagtggaggacaacattatggttacctttaggaatcaagcctctcgcccctacagcttctactcctccctcatcagttatgaggaggatcagagacaaggcgctgaaccacggaagaactttgtgaaaccgaatgagacgaagacctacttctggaaagtacagcaccacatggcccccacaaaagacgaattcgattgcaaagcatgggcgtatttttcagacgttgacttggagaaagatgtacattcaggacttattggtcctttgttggtgtgtcacactaacactctcaatccagcccatggcaggcaggtgacagtccaggaattcgctcttttctttaccatctttgatgagaccaagtcctggtacttcacggaaaacatggagcgcaattgcagagccccctgtaacatacagatggaggaccctacctttaaggaaaattatcggttccacgcaatcaacggatacattatggatacactccctggccttgtgatggctcaggaccaacgaatcaggtggtacctcctcagcatgggttctaatgagaacatacactccattcacttttcaggacatgtgttcactgtccggaagaaagaagagtataagatggccctctacaatttgtatccaggcgtgtttgagaccgttgaaatgcttccctctaaagctggcatctggagagtagagtgcttgatcggagaacatcttcacgcaggtatgagcaccttgttcctcgtgtacagcaacaaatgtcagaatccacttggcatggccagtggacacattcgcgactttcagatcacagcatctggccagtatggacaatgggccccaaagttggctcgcctccattactccggtagcataaatgcgtggtccactaaagaacctttcagctggattaaggtcgatcttcttgcccccatgatcatccacggcattaagacacagggagcgaggcagaaattctcctccctctacatctcacagttcattattatgtatagtttggacggcaagaagtggcaaacttatagaggtaacagtactggaacagacatggtgttcttcggcaacgttgatagctctggcatcaaacacaacatctttaatcctcccataatagctcggtacatcagattgcatccgacccactacagcattaggagtacactccgaatggagcttatgggttgcgacttgaattcctgttcaatgccactcggaatggagtctaaagccatctctgatgcacagataaccgccagtagctactttacgaacatgtttgctacgtggtcaccctctaaggcaaggcttcatttgcaaggccggtctaatgcctggagacctcaggtgaacaacccgaaagaatggctccaggtggactttcagaagaccatgaaagtaacaggtgtcactactcagggagttaagtccttggatactagcatgtatgtgaaggagttccttatttcctcatcacaagatggccaccagtggaccctcttctttcagaatggtaaggtcaaagtgtttcagggcaatcaagacagcttcacacccgtggtgaacagtcttgatcctccactcttgacacgataccttcgaatccatccacagtcttgggagcaccagattgcattgcgcatggaagtacttggatgcgaggctcaggacctctac

SEQ ID NO: 1200 - protein, 1457 aa, synthetic construct
  REGION 1..1457: note = Variant of human B-domain deleted Factor VIII
MQIELSTCFFLCLLRFCFSATRRYYLGAVELSWDYMQSDLGELPVDARFPPRVPKSFPFNTSQVYKKTLFVEFTDHLFNIAKPRPPWMGLLGPTIQAEVYDTVVITLKNMASHPVSLHAVGVSYWKASEGAEYDDQTSQREKEDDKVFPGGSHTYVWQVLKENGPMASDPPCLTYSYLSHVDLVKDLNSGLIGALLVCREGSLAKEKTQTLHKFILLFAVFDEGKSWHSETKNSLMQDRDAASARAWPKMHTVNGYVNRTLPGLIGCHRKSVYWHVIGMGTTPEVHSIFLEGHTFLVRNHRQASLGISPITFLTAQTLLMDLGQFLLFCHIPSHQHDGMEAYVKVDSCPEEPQLRMKNNEEAEDYDDDLTDSEMDVVRFDDDNSPSIIQARSGAKKHPKTWVHYIAAEEEDWDYAPLVLAPDDRSYKSQYLNNGPQRIGRKYKKVRFMAYTDETFKTREAIQHESGILGPLLYGEVGDTLLIIFKNQASRPYNIYPHGITDVRPLYSRRLPKGVKHLKDFPILPGEIFKYKWTVTVEDGPTKSDPRCLTRYYSSFVNMERDLASGLIGPLLICYKESVDQRGNQIMSDKRNVILFSVFDENRSWYLTENIQRFLPNPAGVQLEDPEFQASNIMHSINGYVFDSLQLSVCLHEVAYWYILSIGAQTDFLSVFFSGYTFKHKMVYEDTLTLFPFSGETVFMSMENPGLWILGCHNSDFRNRGMTALLKVSSCDWNTGDYYEDSYEDISAYFDSKNNAIEPRSFSQNPPVLKRHQREGTRTTLQSDQEEIDYDDTISVEMKKEDFDIYDEDENQSPRSFQKKTRHYFIAAVERLWDYGMSSSPHVLRNRAQSGSVPQFKKVVFQEFTDGSFTQPLYRGELNEHLGLLGPYIRAEVEDNIMVTFRNQASRPYSFYSSLISYEEDQRQGAEPRKNFVKPNETKTYFWKVQHHMAPTKDEFDCKAWAYFSDVDLEKDVHSGLIGPLLVCHTNTLNPAHGRQVTVQEFALFFTIFDETKSWYFTENMERNCRAPCNIQMEDPTFKENYRFHAINGYIMDTLPGLVMAQDQRIRWYLLSMGSNENIHSIHFSGHVFTVRKKEEYKMALYNLYPGVFETVEMLPSKAGIWRVECLIGEHLHAGMSTLFLVYSNKCQNPLGMASGHIRDFQITASGQYGQWAPKLARLHYSGSINAWSTKEPFSWIKVDLLAPMIIHGIKTQGARQKFSSLYISQFIIMYSLDGKKWQTYRGNSTGTDMVFFGNVDSSGIKHNIFNPPIIARYIRLHPTHYSIRSTLRMELMGCDLNSCSMPLGMESKAISDAQITASSYFTNMFATWSPSKARLHLQGRSNAWRPQVNNPKEWLQVDFQKTMKVTGVTTQGVKSLDTSMYVKEFLISSSQDGHQWTLFFQNGKVKVFQGNQDSFTPVVNSLDPPLLTRYLRIHPQSWEHQIALRMEVLGCEAQDLY

SEQ ID NO: 1201 - DNA, 4371 bp, synthetic construct
  misc_feature 1..4371: note = Variant of human B-domain deleted Factor VIII
  source 1..4371: mol_type = other DNA
atgcagattgaactgtctacctgcttcttcctctgtttgctgaggttctgctttagcgccactagacggtactaccttggcgctgtggagctgtcctgggactatatgcagagtgatttgggagagcttcccgtcgacgcacgatttcctcctcgcgttccaaagtcatttccctttaacacaagcgtggtgtacaagaagacgctcttcgtcgaattcaccgatcacctgttcaatatcgccaaacccagaccaccatggatgggtcttttggggcctaccatacaagcggaggtgtatgacacagttgttatcactctcaagaacatggcttctcatccggtaagtcttcacgcagtgggcgtgtcctactggaaagcttcagaaggagccgagtatgatgatcagacatcccagagggagaaagaagacgacaaggtatttccaggtgggtctcatacctatgtgtggcaagtgctcaaagagaatggccctatggcaagcgatccgccgtgtttgacttacagctacctttcacacgttgacctcgtcaaggacctcaactccgggttgattggagccttgttggtatgcagggaaggatctcttgccaaagagaagacacagaccctccacaagtttatccttctctttgctgtgttcgatgagggcaaaagttggcatagcgaaacgaagaattccctcatgcaggatcgcgacgcagccagcgccagagcttggcccaagatgcacactgtgaacggatatgtcaataggacgcttcctggcttgattgggtgtcatcggaaaagtgtctactggcacgtgatcggaatggggacaacaccagaggtccactccatatttctcgaaggccataccttccttgttcgaaaccacagacaggcatccttggggatctctcccattacctttctcactgcccaaacgctccttatggacttgggtcagttccttctcttttgccatatcccgtcacaccagcatgatggtatggaagcttatgtgaaagtcgacagttgtcctgaggagccacagttgcgcatgaagaataatgaagaagccgaggattacgacgacgatctcaccgattctgagatggacgtggtgaggtttgatgacgacaactctccctccatcattcaagctcggagcggggcgaagaaacaccccaagacttgggtccactatatagcggcggaagaggaggattgggattacgctcctcttgtattggcaccagatgaccgctcatacaaaagccagtacctcaacaacggaccgcagagaattggccggaagtataagaaagtgcgatttatggcctatacagacgaaacctttaagacaagggaggccatccagcatgagagtgggattttgggacctcttctttacggcgaagttggtgataccctcctcatcatcttcaagaatcaagcttctcgcccctataacatttacccacacgggatcactgacgttaggcctttgtatagcagaagacttcccaaaggcgtgaagcatctcaaagacttccccattttgccaggcgagatctttaagtacaaatggaccgtcacagtggaagatggaccgactaaatcagaccctcgatgccttacgcggtactattcctccttcgtgaatatggagagagatttggcaagcggactcataggaccactcctcatctgttacaaggaatctgtagaccagaggggtaaccagattatgagtgataaacgcaatgtgatcctttttagcgtcttcgacgagaaccggtcctggtacttgaccgagaatatacaaaggttccttcccaaccccgcaggcgttcagttggaagaccctgagtttcaggccagcaatattatgcactcaatcaacggctatgtgtttgatagtctccagctttctgtttgcctccatgaagtagcctattggtacatcttgtcaattggtgctcaaacagacttcctctccgtcttcttctccggctacacctttaagcacaagatggtgtatgaggacactctcacactctttccattttctggagaaaccgtgttcatgagcatggagaatccaggcctttggatcttgggttgccacaacagtgattttcgcaatcggggaatgactgctctcctcaaagtcagcagctgtgattggaacacaggcgactattacgaagattcttacgaggacataagtgcctactttgactccaagaataacgccattgagcccagatcattctcccagaatcctcccgtgcttaaaaggcatcagcgcgaaatcaccagaactactcttcagtctgatcaagaggagattgactatgacgacaccataagcgtggaaatgaagaaggaggatttcgatatctatgacgaagatgagaaccagtctccgcggagctttcagaagaagacgcgacactacttcattgcagcagtcgaaaggctttgggactacggtatgtcatcatcccctcatgtgttgcgcaatagagctcagagtggaagtgttccacagttcaagaaagtcgtctttcaagagtttacagatggcagcttcacacagcctctctatcggggcgagcttaacgaacatttgggactccttggtccctatatccgagccgaagtggaggacaacattatggttacctttaggaatcaagcctctcgcccctacagcttctactcctccctcatcagttatgaggaggatcagagacaaggcgctgaaccacggaagaactttgtgaaaccgaatgagacgaagacctacttctggaaagtacagcaccacatggcccccacaaaagacgaattcgattgcaaagcatgggcgtatttttcagacgttgacttggagaaagatgtacattcaggacttattggtcctttgttggtgtgtcacactaacactctcaatccagcccatggcaggcaggtgacagtccaggaattcgctcttttctttaccatctttgatgagaccaagtcctggtacttcacggaaaacatggagcgcaattgcagagccccctgtaacatacagatggaggaccctacctttaaggaaaattatcggttccacgcaatcaacggatacattatggatacactccctggccttgtgatggctcaggaccaacgaatcaggtggtacctcctcagcatgggttctaatgagaacatacactccattcacttttcaggacatgtgttcactgtccggaagaaagaagagtataagatggccctctacaatttgtatccaggcgtgtttgagaccgttgaaatgcttccctctaaagctggcatctggagagtagagtgcttgatcggagaacatcttcacgcaggtatgagcaccttgttcctcgtgtacagcaacaaatgtcagaatccacttggcatggccagtggacacattcgcgactttcagatcacagcatctggccagtatggacaatgggccccaaagttggctcgcctccattactccggtagcataaatgcgtggtccactaaagaacctttcagctggattaaggtcgatcttcttgcccccatgatcatccacggcattaagacacagggagcgaggcagaaattctcctccctctacatctcacagttcattattatgtatagtttggacggcaagaagtggcaaacttatagaggtaacagtactggaacagacatggtgttcttcggcaacgttgatagctctggcatcaaacacaacatctttaatcctcccataatagctcggtacatcagattgcatccgacccactacagcattaggagtacactccgaatggagcttatgggttgcgacttgaattcctgttcaatgccactcggaatggagtctaaagccatctctgatgcacagataaccgccagtagctactttacgaacatgtttgctacgtggtcaccctctaaggcaaggcttcatttgcaaggccggtctaatgcctggagacctcaggtgaacaacccgaaagaatggctccaggtggactttcagaagaccatgaaagtaacaggtgtcactactcagggagttaagtccttggatactagcatgtatgtgaaggagttccttatttcctcatcacaagatggccaccagtggaccctcttctttcagaatggtaaggtcaaagtgtttcagggcaatcaagacagcttcacacccgtggtgaacagtcttgatcctccactcttgacacgataccttcgaatccatccacagtcttgggagcaccagattgcattgcgcatggaagtacttggatgcgaggctcaggacctctac

SEQ ID NO: 1202 - protein, 1457 aa, synthetic construct
  REGION 1..1457: note = Variant of human B-domain deleted Factor VIII
MQIELSTCFFLCLLRFCFSATRRYYLGAVELSWDYMQSDLGELPVDARFPPRVPKSFPFNTSVVYKKTLFVEFTDHLFNIAKPRPPWMGLLGPTIQAEVYDTVVITLKNMASHPVSLHAVGVSYWKASEGAEYDDQTSQREKEDDKVFPGGSHTYVWQVLKENGPMASDPPCLTYSYLSHVDLVKDLNSGLIGALLVCREGSLAKEKTQTLHKFILLFAVFDEGKSWHSETKNSLMQDRDAASARAWPKMHTVNGYVNRTLPGLIGCHRKSVYWHVIGMGTTPEVHSIFLEGHTFLVRNHRQASLGISPITFLTAQTLLMDLGQFLLFCHIPSHQHDGMEAYVKVDSCPEEPQLRMKNNEEAEDYDDDLTDSEMDVVRFDDDNSPSIIQARSGAKKHPKTWVHYIAAEEEDWDYAPLVLAPDDRSYKSQYLNNGPQRIGRKYKKVRFMAYTDETFKTREAIQHESGILGPLLYGEVGDTLLIIFKNQASRPYNIYPHGITDVRPLYSRRLPKGVKHLKDFPILPGEIFKYKWTVTVEDGPTKSDPRCLTRYYSSFVNMERDLASGLIGPLLICYKESVDQRGNQIMSDKRNVILFSVFDENRSWYLTENIQRFLPNPAGVQLEDPEFQASNIMHSINGYVFDSLQLSVCLHEVAYWYILSIGAQTDFLSVFFSGYTFKHKMVYEDTLTLFPFSGETVFMSMENPGLWILGCHNSDFRNRGMTALLKVSSCDWNTGDYYEDSYEDISAYFDSKNNAIEPRSFSQNPPVLKRHQREITRTTLQSDQEEIDYDDTISVEMKKEDFDIYDEDENQSPRSFQKKTRHYFIAAVERLWDYGMSSSPHVLRNRAQSGSVPQFKKVVFQEFTDGSFTQPLYRGELNEHLGLLGPYIRAEVEDNIMVTFRNQASRPYSFYSSLISYEEDQRQGAEPRKNFVKPNETKTYFWKVQHHMAPTKDEFDCKAWAYFSDVDLEKDVHSGLIGPLLVCHTNTLNPAHGRQVTVQEFALFFTIFDETKSWYFTENMERNCRAPCNIQMEDPTFKENYRFHAINGYIMDTLPGLVMAQDQRIRWYLLSMGSNENIHSIHFSGHVFTVRKKEEYKMALYNLYPGVFETVEMLPSKAGIWRVECLIGEHLHAGMSTLFLVYSNKCQNPLGMASGHIRDFQITASGQYGQWAPKLARLHYSGSINAWSTKEPFSWIKVDLLAPMIIHGIKTQGARQKFSSLYISQFIIMYSLDGKKWQTYRGNSTGTDMVFFGNVDSSGIKHNIFNPPIIARYIRLHPTHYSIRSTLRMELMGCDLNSCSMPLGMESKAISDAQITASSYFTNMFATWSPSKARLHLQGRSNAWRPQVNNPKEWLQVDFQKTMKVTGVTTQGVKSLDTSMYVKEFLISSSQDGHQWTLFFQNGKVKVFQGNQDSFTPVVNSLDPPLLTRYLRIHPQSWEHQIALRMEVLGCEAQDLY

SEQ ID NO: 1203 - DNA, 4371 bp, synthetic construct
  misc_feature 1..4371: note = Variant of human B-domain deleted Factor VIII
  source 1..4371: mol_type = other DNA
atgcagattgaactgtctacctgcttcttcctctgtttgctgaggttctgctttagcgccactagacggtactaccttggcgctgtggagctgtcctgggactatatgcagagtgatttgggagagcttcccgtcgacgcacgatttcctcctcgcgttccaaagtcatttccctttaacacaagcgtcgtgtacaagaagacgctcttcgtcgaattcaccgatcacctgttcaatatcgccaaacccagaccaccatggatgggtcttttggggcctaccatacaagcggaggtgtatgacacagttgttatcactctcaagaacatggcttctcatccggtaagtcttcacgcagtgggcgtgtcctactggaaagcttcagaaggagccgagtatgatgatcagacatcccagagggagaaagaagacgacaaggtatttccaggtgggtctcatacctatgtgtggcaagtgctcaaagagaatggccctatggcaagcgatccgccgtgtttgacttacagctacctttcacacgttgacctcgtcaaggacctcaactccgggttgattggagccttgttggtatgcagggaaggatctcttgccaaagagaagacacagaccctccacaagtttatccttctctttgctgtgttcgatgagggcaaaagttggcatagcgaaacgaagaattccctcatgcaggatcgcgacgcagccagcgccagagcttggcccaagatgcacactgtgaacggatatgtcaataggacgcttcctggcttgattgggtgtcatcggaaaagtgtctactggcacgtgatcggaatggggacaacaccagaggtccactccatatttctcgaaggccataccttccttgttcgaaaccacagacaggcatccttggggatctctcccattacctttctcactgcccaaacgctccttatggacttgggtcagttccttctcttttgccatatcccgtcacaccagcatgatggtatggaagcttatgtgaaagtcgacagttgtcctgaggagccacagttgcgcatgaagaataatgaagaagccgaggattacgacgacgatctcaccgattctgagatggacgtggtgaggtttgatgacgacaactctccctccatcattcaagctcggagcgtggcgaagaaacaccccaagacttgggtccactatatagcggcggaagaggaggattgggattacgctcctcttgtattggcaccagatgaccgctcatacaaaagccagtacctcaacaacggaccgcagagaattggccggaagtataagaaagtgcgatttatggcctatacagacgaaacctttaagacaagggaggccatccagcatgagagtgggattttgggacctcttctttacggcgaagttggtgataccctcctcatcatcttcaagaatcaagcttctcgcccctataacatttacccacacgggatcactgacgttaggcctttgtatagcagaagacttcccaaaggcgtgaagcatctcaaagacttccccattttgccaggcgagatctttaagtacaaatggaccgtcacagtggaagatggaccgactaaatcagaccctcgatgccttacgcggtactattcctccttcgtgaatatggagagagatttggcaagcggactcataggaccactcctcatctgttacaaggaatctgtagaccagaggggtaaccagattatgagtgataaacgcaatgtgatcctttttagcgtcttcgacgagaaccggtcctggtacttgaccgagaatatacaaaggttccttcccaaccccgcaggcgttcagttggaagaccctgagtttcaggccagcaatattatgcactcaatcaacggctatgtgtttgatagtctccagctttctgtttgcctccatgaagtagcctattggtacatcttgtcaattggtgctcaaacagacttcctctccgtcttcttctccggctacacctttaagcacaagatggtgtatgaggacactctcacactctttccattttctggagaaaccgtgttcatgagcatggagaatccaggcctttggatcttgggttgccacaacagtgattttcgcaatcggggaatgactgctctcctcaaagtcagcagctgtgataagaacacaggcgactattacgaagattcttacgaggacataagtgcctactttgactccaagaataacgccattgagcccagatcattctcccagaatcctcccgtgcttaaaaggcatcagcgcgaaggtaccagaactactcttcagtctgatcaagaggagattgactatgacgacaccattagcgtggaaatgaagaaggaggatttcgatatctatgacgaagatgagaaccagtctccgcggagctttcagaagaagacgcgacactacttcattgcagcagtcgaaaggctttgggactacggtatgtcatcatcccctcatgtgttgcgcaatagagctcagagtggaagtgttccacagttcaagaaagtcgtctttcaagagtttacagatggcagcttcacacagcctctctatcggggcgagcttaacgaacatttgggactccttggtccctatatccgagccgaagtggaggacaacattatggttacctttaggaatcaagcctctcgcccctacagcttctactcctccctcatcagttatgaggaggatcagagacaaggcgctgaaccacggaagaactttgtgaaaccgaatgagacgaagacctacttctggaaagtacagcaccacatggcccccacaaaagacgaattcgattgcaaagcatgggcgtatttttcagacgttgacttggagaaagatgtacattcaggacttattggtcctttgttggtgtgtcacactaacactctcaatccagcccatggcaggcaggtgacagtccaggaattcgctcttttctttaccatctttgatgagaccaagtcctggtacttcacggaaaacatggagcgcaattgcagagccccctgtaacatacagatggaggaccctacctttaaggaaaattatcggttccacgcaatcaacggatacattatggatacactccctggccttgtgatggctcaggaccaacgaatcaggtggtacctcctcagcatgggttctaatgagaacatacactccattcacttttcaggacatgtgttcactgtccggaagaaagaagagtataagatggccctctacaatttgtatccaggcgtgtttgagaccgttgaaatgcttccctctaaagctggcatctggagagtagagtgcttgatcggagaacatcttcacgcaggtatgagcaccttgttcctcgtgtacagcaacaaatgtcagaatccacttggcatggccagtggacacattcgcgactttcagatcacagcatctggccagtatggacaatgggccccaaagttggctcgcctccattactccggtagcataaatgcgtggtccactaaagaacctttcagctggattaaggtcgatcttcttgcccccatgatcatccacggcattaagacacagggagcgaggcagaaattctcctccctctacatctcacagttcattattatgtatagtttggacggcaagaagtggcaaacttatagaggtaacagtactggaacagacatggtgttcttcggcaacgttgatagctctggcatcaaacacaacatctttaatcctcccataatagctcggtacatcagattgcatccgacccactacagcattaggagtacactccgaatggagcttatgggttgcgacttgaattcctgttcaatgccactcggaatggagtctaaagccatctctgatgcacagataaccgccagtagctactttacgaacatgtttgctacgtggtcaccctctaaggcaaggcttcatttgcaaggccggtctaatgcctggagacctcaggtgaacaacccgaaagaatggctccaggtggactttcagaagaccatgaaagtaacaggtgtcactactcagggagttaagtccttggatactagcatgtatgtgaaggagttccttatttcctcatcacaagatggccaccagtggaccctcttctttcagaatggtaaggtcaaagtgtttcagggcaatcaagacagcttcacacccgtggtgaacagtcttgatcctccactcttgacacgataccttcgaatccatccacagtcttgggagcaccagattgcattgcgcatggaagtacttggatgcgaggctcaggacctctac

SEQ ID NO: 1204 - protein, 1457 aa, synthetic construct
  REGION 1..1457: note = Variant of human B-domain deleted Factor VIII
MQIELSTCFFLCLLRFCFSATRRYYLGAVELSWDYMQSDLGELPVDARFPPRVPKSFPFNTSVVYKKTLFVEFTDHLFNIAKPRPPWMGLLGPTIQAEVYDTVVITLKNMASHPVSLHAVGVSYWKASEGAEYDDQTSQREKEDDKVFPGGSHTYVWQVLKENGPMASDPPCLTYSYLSHVDLVKDLNSGLIGALLVCREGSLAKEKTQTLHKFILLFAVFDEGKSWHSETKNSLMQDRDAASARAWPKMHTVNGYVNRTLPGLIGCHRKSVYWHVIGMGTTPEVHSIFLEGHTFLVRNHRQASLGISPITFLTAQTLLMDLGQFLLFCHIPSHQHDGMEAYVKVDSCPEEPQLRMKNNEEAEDYDDDLTDSEMDVVRFDDDNSPSIIQARSVAKKHPKTWVHYIAAEEEDWDYAPLVLAPDDRSYKSQYLNNGPQRIGRKYKKVRFMAYTDETFKTREAIQHESGILGPLLYGEVGDTLLIIFKNQASRPYNIYPHGITDVRPLYSRRLPKGVKHLKDFPILPGEIFKYKWTVTVEDGPTKSDPRCLTRYYSSFVNMERDLASGLIGPLLICYKESVDQRGNQIMSDKRNVILFSVFDENRSWYLTENIQRFLPNPAGVQLEDPEFQASNIMHSINGYVFDSLQLSVCLHEVAYWYILSIGAQTDFLSVFFSGYTFKHKMVYEDTLTLFPFSGETVFMSMENPGLWILGCHNSDFRNRGMTALLKVSSCDKNTGDYYEDSYEDISAYFDSKNNAIEPRSFSQNPPVLKRHQREGTRTTLQSDQEEIDYDDTISVEMKKEDFDIYDEDENQSPRSFQKKTRHYFIAAVERLWDYGMSSSPHVLRNRAQSGSVPQFKKVVFQEFTDGSFTQPLYRGELNEHLGLLGPYIRAEVEDNIMVTFRNQASRPYSFYSSLISYEEDQRQGAEPRKNFVKPNETKTYFWKVQHHMAPTKDEFDCKAWAYFSDVDLEKDVHSGLIGPLLVCHTNTLNPAHGRQVTVQEFALFFTIFDETKSWYFTENMERNCRAPCNIQMEDPTFKENYRFHAINGYIMDTLPGLVMAQDQRIRWYLLSMGSNENIHSIHFSGHVFTVRKKEEYKMALYNLYPGVFETVEMLPSKAGIWRVECLIGEHLHAGMSTLFLVYSNKCQNPLGMASGHIRDFQITASGQYGQWAPKLARLHYSGSINAWSTKEPFSWIKVDLLAPMIIHGIKTQGARQKFSSLYISQFIIMYSLDGKKWQTYRGNSTGTDMVFFGNVDSSGIKHNIFNPPIIARYIRLHPTHYSIRSTLRMELMGCDLNSCSMPLGMESKAISDAQITASSYFTNMFATWSPSKARLHLQGRSNAWRPQVNNPKEWLQVDFQKTMKVTGVTTQGVKSLDTSMYVKEFLISSSQDGHQWTLFFQNGKVKVFQGNQDSFTPVVNSLDPPLLTRYLRIHPQSWEHQIALRMEVLGCEAQDLY

SEQ ID NO: 1205 - DNA, 4371 bp, synthetic construct
  misc_feature 1..4371: note = Variant of human B-domain deleted Factor VIII
  source 1..4371: mol_type = other DNA
atgcagattgaactgtctacctgcttcttcctctgtttgctgaggttctgctttagcgccactagacggtactaccttggcgctgtggagctgtcctgggactatatgcagagtgatttgggagagcttcccgtcgacgcacgatttcctcctcgcgttccaaagtcatttccctttaacacaagcgtggtgtacaagaagacgctcttcgtcgaattcaccgatcacctgttcaatatcgccaaacccagaccaccatggatgggtcttttggggcctaccatacaagcggaggtgtatgacacagttgttatcactctcaagaacatggcttctcatccggtaagtcttcacgcagtgggcgtgtcctactggaaagcttcagaaggagccgagtatgatgatcagacatcccagagggagaaagaagacgacaaggtatttccaggtgggtctcatacctatgtgtggcaagtgctcaaagagaatggccctatggcaagcgatccgccgtgtttgacttacagctacctttcacacgttgacctcgtcaaggacctcaactccgggttgattggagccttgttggtatgcagggaaggatctcttgccaaagagaagacacagaccctccacaagtttatccttctctttgctgtgttcgatgagggcaaaagttggcatagcgaaacgaagaattccctcatgcaggatcgcgacgcagccagcgccagagcttggcccaagatgcacactgtgaacggatatgtcaataggacgcttcctggcttgattgggtgtcatcggaaaagtgtctactggcacgtgatcggaatggggacaacaccagaggtccactccatatttctcgaaggccataccttccttgttcgaaaccacagacaggcatccttggggatctctcccattacctttctcactgcccaaacgctccttatggacttgggtcagttccttctcttttgccatatcccgtcacaccagcatgatggtatggaagcttatgtgaaagtcgacagttgtcctgaggagccacagttgcgcatgaagaataatgaagaagccgaggattacgacgacgatctcaccgattctgagatggacgtggtgaggtttgatgacgacaactctccctccatcattcaagctcggagcggggcgaagaaacaccccaagacttgggtccactatatagcggcggaagaggaggattgggattacgctcctcttgtattggcaccagatgaccgctcatacaaaagccagtacctcaacaacggaccgcagagaattggccggaagtataagaaagtgcgatttatggcctatacagacgaaacctttaagacaagggaggccatccagcatgagagtgggattttgggacctcttctttacggcgaagttggtgataccctcctcatcatcttcaagaatcaagcttctcgcccctataacatttacccacacgggatcactgacgttaggcctttgtatagcagaagacttcccaaaggcgtgaagcatctcaaagacttccccattttgccaggcgagatctttaagtacaaatggaccgtcacagtggaagatggaccgactaaatcagaccctcgatgccttacgcggtactattcctccttcgtgaatatggagagagatttggcaagcggactcataggaccactcctcatctgttacaaggaatctgtagaccagaggggtaaccagattatgagtgataaacgcaatgtgatcctttttagcgtcttcgacgagaaccggtcctggtacttgaccgagaatatacaaaggttccttcccaaccccgcaggcgttcagttggaagaccctgagtttcaggccagcaatattatgcactcaatcaacggctatgtgtttgatagtctccagctttctgtttgcctccatgaagtagcctattggtacatcttgtcaattggtgctcaaacagacttcctctccgtcttcttctccggctacacctttaagcacaagatggtgtatgaggacactctcacactctttccattttctggagaaaccgtgttcatgagcatggagaatccaggcctttggatcttgggttgccacaacagtgattttcgcaatcggggaatgactgctctcctcaaagtcagcagctgtgataagaacacaggcgactattacgaagattcttacgaggacataagtgcctactttgactcgctggataacgccattgagcccagatcattctcccagaatcctcccgtgcttaaaaggcatcagcgcgaaggtaccagaactactcttcagtctgatcaagaggagattgactatgacgacaccgggagcgtggaatggaagaaggaggatttcgatatctatgacgaagatgagaaccagtctccgcggagctttcagaagaaaacgcgacactacttcattgcagcagtcgaaaggctttgggactacggtatgtcatcatcccctcatgtgttgcgcaatagagctcagagtggaagtgttccacagttcaagaaagtcgtctttcaagagtttacagatggcagcttcacacagcctctctatcggggcgagcttaacgaacatttgggactccttggtccctatatccgagccgaagtggaggacaacattatggttacctttaggaatcaagcctctcgcccctacagcttctactcctccctcatcagttatgaggaggatcagagacaaggcgctgaaccacggaagaactttgtgaaaccgaatgagacgaagacctacttctggaaagtacagcaccacatggcccccacaaaagacgaattcgattgcaaagcatgggcgtatttttcagacgttgacttggagaaagatgtacattcaggacttattggtcctttgttggtgtgtcacactaacactctcaatccagcccatggcaggcaggtgacagtccaggaattcgctcttttctttaccatctttgatgagaccaagtcctggtacttcacggaaaacatggagcgcaattgcagagccccctgtaacatacagatggaggaccctacctttaaggaaaattatcggttccacgcaatcaacggatacattatggatacactccctggccttgtgatggctcaggaccaacgaatcaggtggtacctcctcagcatgggttctaatgagaacatacactccattcacttttcaggacatgtgttcactgtccggaagaaagaagagtataagatggccctctacaatttgtatccaggcgtgtttgagaccgttgaaatgcttccctctaaagctggcatctggagagtagagtgcttgatcggagaacatcttcacgcaggtatgagcaccttgttcctcgtgtacagcaacaaatgtcagaccccacttggcatggccagtggacacattcgcgactttcagatcacagcatctggccagtatggacaatgggccccaaagttggctcgcctccattactccggtagcataaatgcgtggtccactaaagaacctttcagctggattaaggtcgatcttcttgcccccatgatcatccacggcattaagacacagggagcgaggcagaaattctcctccctctacatctcacagttcattattatgtatagtttggacggcaagaagtggcaaacttatagaggtaacagtactggaacagacatggtgttcttcggcaacgttgatagctctggcatcaaacacaacatctttaatcctcccataatagctcggtacatcagattgcatccgacccactacagcattaggagtacactccgaatggagcttatgggttgcgacttgaattcctgttcaatgccactcggaatggagtctaaagccatctctgatgcacagataaccgccagtagctactttacgaacatgtttgctacgtggtcaccctctaaggcaaggcttcatttgcaaggccggtctaatgcctggagacctcaggtgaacaacccgaaagaatggctccaggtggactttcagaagaccatgaaagtaacaggtgtcactactcagggagttaagtccttggatactagcatgtatgtgaaggagttccttatttcctcatcacaagatggccaccagtggaccctcttctttcagaatggtaaggtcaaagtgtttcagggcaatcaagacagcttcacacccgtggtgaacagtcttgatcctccactcttgacacgataccttcgaatccatccacagtcttgggagcaccagattgcattgcgcatggaagtacttggatgcgaggctcaggacctctac

SEQ ID NO: 1206 - protein, 1457 aa, synthetic construct
  REGION 1..1457: note = Variant of human B-domain deleted Factor VIII
MQIELSTCFFLCLLRFCFSATRRYYLGAVELSWDYMQSDLGELPVDARFPPRVPKSFPFNTSVVYKKTLFVEFTDHLFNIAKPRPPWMGLLGPTIQAEVYDTVVITLKNMASHPVSLHAVGVSYWKASEGAEYDDQTSQREKEDDKVFPGGSHTYVWQVLKENGPMASDPPCLTYSYLSHVDLVKDLNSGLIGALLVCREGSLAKEKTQTLHKFILLFAVFDEGKSWHSETKNSLMQDRDAASARAWPKMHTVNGYVNRTLPGLIGCHRKSVYWHVIGMGTTPEVHSIFLEGHTFLVRNHRQASLGISPITFLTAQTLLMDLGQFLLFCHIPSHQHDGMEAYVKVDSCPEEPQLRMKNNEEAEDYDDDLTDSEMDVVRFDDDNSPSIIQARSGAKKHPKTWVHYIAAEEEDWDYAPLVLAPDDRSYKSQYLNNGPQRIGRKYKKVRFMAYTDETFKTREAIQHESGILGPLLYGEVGDTLLIIFKNQASRPYNIYPHGITDVRPLYSRRLPKGVKHLKDFPILPGEIFKYKWTVTVEDGPTKSDPRCLTRYYSSFVNMERDLASGLIGPLLICYKESVDQRGNQIMSDKRNVILFSVFDENRSWYLTENIQRFLPNPAGVQLEDPEFQASNIMHSINGYVFDSLQLSVCLHEVAYWYILSIGAQTDFLSVFFSGYTFKHKMVYEDTLTLFPFSGETVFMSMENPGLWILGCHNSDFRNRGMTALLKVSSCDKNTGDYYEDSYEDISAYFDSLDNAIEPRSFSQNPPVLKRHQREGTRTTLQSDQEEIDYDDTGSVEWKKEDFDIYDEDENQSPRSFQKKTRHYFIAAVERLWDYGMSSSPHVLRNRAQSGSVPQFKKVVFQEFTDGSFTQPLYRGELNEHLGLLGPYIRAEVEDNIMVTFRNQASRPYSFYSSLISYEEDQRQGAEPRKNFVKPNETKTYFWKVQHHMAPTKDEFDCKAWAYFSDVDLEKDVHSGLIGPLLVCHTNTLNPAHGRQVTVQEFALFFTIFDETKSWYFTENMERNCRAPCNIQMEDPTFKENYRFHAINGYIMDTLPGLVMAQDQRIRWYLLSMGSNENIHSIHFSGHVFTVRKKEEYKMALYNLYPGVFETVEMLPSKAGIWRVECLIGEHLHAGMSTLFLVYSNKCQTPLGMASGHIRDFQITASGQYGQWAPKLARLHYSGSINAWSTKEPFSWIKVDLLAPMIIHGIKTQGARQKFSSLYISQFIIMYSLDGKKWQTYRGNSTGTDMVFFGNVDSSGIKHNIFNPPIIARYIRLHPTHYSIRSTLRMELMGCDLNSCSMPLGMESKAISDAQITASSYFTNMFATWSPSKARLHLQGRSNAWRPQVNNPKEWLQVDFQKTMKVTGVTTQGVKSLDTSMYVKEFLISSSQDGHQWTLFFQNGKVKVFQGNQDSFTPVVNSLDPPLLTRYLRIHPQSWEHQIALRMEVLGCEAQDLY

SEQ ID NO: 1207 - DNA, 4371 bp, synthetic construct
  misc_feature 1..4371: note = Variant of human B-domain deleted Factor VIII
  source 1..4371: mol_type = other DNA
atgcagattgaactgtctacctgcttcttcctctgtttgctgaggttctgctttagcgccactagacggtactaccttggcgctgtggagctgtcctgggactatatgcagagtgatttgggagagcttcccgtcgacgcacgatttcctcctcgcgttccaaagtcatttccctttaacacaagcgtggtgtacaagaagacgctcttcgtcgaattcaccgatcacctgttcaatatcgccaaacccagaccaccatggatgggtcttttggggcctaccatacaagcggaggtgtatgacacagttgttatcactctcaagaacatggcttctcatccggtaagtcttcacgcagtgggcgtgtcctactggaaagcttcagaaggagccgagtatgatgatcagacatcccagagggagaaagaagacgacaaggtatttccaggtgggtctcatacctatgtgtggcaagtgctcaaagagaatggccctatggcaagcgatccgccgtgtttgacttacagctacctttcacacgttgacctcgtcaaggacctcaactccgggttgattggagccttgttggtatgcagggaaggatctcttgccaaagagaagacacagaccctccacaagtttatccttctctttgctgtgttcgatgagggcaaaagttggcatagcgaaacgaagaattccctcatgcaggatcgcgacgcagccagcgccagagcttggcccaagatgcacactgtgaacggatatgtcaataggacgcttcctggcttgattgggtgtcatcggaaaagtgtctactggcacgtgatcggaatggggacaacaccagaggtccactccatatttctcgaaggccataccttccttgttcgaaaccacagacaggcatccttggggatctctcccattacctttctcactgcccaaacgctccttatggacttgggtcagttccttctcttttgccatatcccgtcacaccagcatgatggtatggaagcttatgtgaaagtcgacagttgtcctgaggagccacagttgcgcatgaagaataatgaagaagccgaggattacgacgacgatctcaccgattctgagatggacgtggtgaggtttgatgacgacaactctccctccatcattcaagctcggagcggggcgaagaaacaccccaagacttgggtccactatatagcggcggaagaggaggattgggattacgctcctcttgtattggcaccagatgaccgctcatacaaaagccagtacctcaacaacggaccgcagagaattggccggaagtataagaaagtgcgatttatggcctatacagacgaaacctttaagacaagggaggccatccagcatgagagtgggattttgggacctcttctttacggcgaagttggtgataccctcctcatcatcttcaagaatcaagcttctcgcccctataacatttacccacacgggatcactgacgttaggcctttgtatagcagaagacttcccaaaggcgtgaagcatctcaaagacttccccattttgccaggcgagatctttaagtacaaatggaccgtcacagtggaagatggaccgactaaatcagaccctcgatgccttacgcggtactattcctccttcgtgaatatggagagagatttggcaagcggactcataggaccactcctcatctgttacaaggaatctgtagaccagaggggtaaccagattatgagtgataaacgcaatgtgatcctttttagcgtcttcgacgagaaccggtcctggtacttgaccgagaatatacaaaggttccttcccaaccccgcaggcgttcagttggaagaccctgagtttcaggccagcaatattatgcactcaatcaacggctatgtgtttgatagtctccagctttctgtttgcctccatgaagtagcctattggtacatcttgtcaattggtgctcaaacagacttcctctccgtcttcttctccggctacacctttaagcacaagatggtgtatgaggacactctcacactctttccattttctggagaaaccgtgttcatgagcatggagaatccaggcctttggatcttgggttgccacaacagtgattttcgcaatcggggaatgactgctctcctcaaagtcagcagctgtgataagaacacaggcgactattacgaagattcttacgaggacataagtgcctactttgactccaagaataacgccattgagcccagatcattctcccagaatcctcccgtgcttaaaaggcatcagcgcgaaatcaccagaactactcttcagtctgatcaagaggagattgactatgacgacaccataagcgtggaaatgaagaaggaggatttcgatatctatgacgaagatgagaaccagtctccgcggagctttcagaagaagacgcgacactacttcattgcagcagtcgaaaggctttgggactacggtatgtcatcatcccctcatgtgttgcgcaatagagctcagagtggaagtgttccacagttcaagaaagtcgtctttcaagagtttacagatggcagcttcacacagcctctctatcggggcgagcttaacgaacatttgggactccttggtccctatatccgagccgaagtggaggacaacattatggttacctttaggaatcaagcctctcgcccctacagcttctactcctccctcatcagttatgaggaggatcagagaatgggcgctgaaccacggaagaactttgtgaaaccgaatgagacgaagacctacttctggaaagtacagcaccacatggcccccacaaaagacgaattcgattgcaaagcatgggcgtatttttcagacgttgacttggagaaagatgtacattcaggacttattggtcctttgttggtgtgtcacactaacactctcaatccagcccatggcaggcaggtgacagtccaggaattcgctcttttctttaccatctttgatgagaccaagtcctggtacttcacggaaaacatggagcgcaattgcagagccccctgtaacatacagatggaggaccctacctttaaggaaaattatcggttccacgcaatcaacggatacattatggatacactccctggccttgtgatggctcaggaccaacgaatcaggtggtacctcctcagcatgggttctaatgagaacatacactccattcacttttcaggacatgtgttcactgtccggaagaaagaagagtataagatggccctctacaatttgtatccaggcgtgtttgagaccgttgaaatgcttccctctaaagctggcatctggagagtagagtgcttgatcggagaacatcttcacgcaggtatgagcaccttgttcctcgtgtacagcaacaaatgtcagaccccacttggcatggccagtggacacattcgcgactttcagatcacagcatctggccagtatggacaatgggccccaaagttggctcgcctccattactccggtagcataaatgcgtggtccactaaagaacctttcagctggattaaggtcgatcttcttgcccccatgatcatccacggcattaagacacagggagcgaggcagaaattctcctccctctacatctcacagttcattattatgtatagtttggacggcaagaagtggcaaacttatagaggtaacagtactggaacagacatggtgttcttcggcaacgttgatagctctggcatcaaacacaacatctttaatcctcccataatagctcggtacatcagattgcatccgacccactacagcattaggagtacactccgaatggagcttatgggttgcgacttgaattcctgttcaatgccactcggaatggagtctaaagccatctctgatgcacagataaccgccagtagctactttacgaacatgtttgctacgtggtcaccctctaaggcaaggcttcatttgcaaggccggtctaatgcctggagacctcaggtgaacaacccgaaagaatggctccaggtggactttcagaagaccatgaaagtaacaggtgtcactactcagggagttaagtccttggatactagcatgtatgtgaaggagttccttatttcctcatcacaagatggccaccagtggaccctcttctttcagaatggtaaggtcaaagtgtttcagggcaatcaagacagcttcacacccgtggtgaacagtcttgatcctccactcttgacacgataccttcgaatccatccacagtcttgggagcaccagattgcattgcgcatggaagtacttggatgcgaggctcaggacctctac

SEQ ID NO: 1208 - protein, 1457 aa, synthetic construct
  REGION 1..1457: note = Variant of human B-domain deleted Factor VIII
MQIELSTCFFLCLLRFCFSATRRYYLGAVELSWDYMQSDLGELPVDARFPPRVPKSFPFNTSVVYKKTLFVEFTDHLFNIAKPRPPWMGLLGPTIQAEVYDTVVITLKNMASHPVSLHAVGVSYWKASEGAEYDDQTSQREKEDDKVFPGGSHTYVWQVLKENGPMASDPPCLTYSYLSHVDLVKDLNSGLIGALLVCREGSLAKEKTQTLHKFILLFAVFDEGKSWHSETKNSLMQDRDAASARAWPKMHTVNGYVNRTLPGLIGCHRKSVYWHVIGMGTTPEVHSIFLEGHTFLVRNHRQASLGISPITFLTAQTLLMDLGQFLLFCHIPSHQHDGMEAYVKVDSCPEEPQLRMKNNEEAEDYDDDLTDSEMDVVRFDDDNSPSIIQARSGAKKHPKTWVHYIAAEEEDWDYAPLVLAPDDRSYKSQYLNNGPQRIGRKYKKVRFMAYTDETFKTREAIQHESGILGPLLYGEVGDTLLIIFKNQASRPYNIYPHGITDVRPLYSRRLPKGVKHLKDFPILPGEIFKYKWTVTVEDGPTKSDPRCLTRYYSSFVNMERDLASGLIGPLLICYKESVDQRGNQIMSDKRNVILFSVFDENRSWYLTENIQRFLPNPAGVQLEDPEFQASNIMHSINGYVFDSLQLSVCLHEVAYWYILSIGAQTDFLSVFFSGYTFKHKMVYEDTLTLFPFSGETVFMSMENPGLWILGCHNSDFRNRGMTALLKVSSCDKNTGDYYEDSYEDISAYFDSKNNAIEPRSFSQNPPVLKRHQREITRTTLQSDQEEIDYDDTISVEMKKEDFDIYDEDENQSPRSFQKKTRHYFIAAVERLWDYGMSSSPHVLRNRAQSGSVPQFKKVVFQEFTDGSFTQPLYRGELNEHLGLLGPYIRAEVEDNIMVTFRNQASRPYSFYSSLISYEEDQRMGAEPRKNFVKPNETKTYFWKVQHHMAPTKDEFDCKAWAYFSDVDLEKDVHSGLIGPLLVCHTNTLNPAHGRQVTVQEFALFFTIFDETKSWYFTENMERNCRAPCNIQMEDPTFKENYRFHAINGYIMDTLPGLVMAQDQRIRWYLLSMGSNENIHSIHFSGHVFTVRKKEEYKMALYNLYPGVFETVEMLPSKAGIWRVECLIGEHLHAGMSTLFLVYSNKCQTPLGMASGHIRDFQITASGQYGQWAPKLARLHYSGSINAWSTKEPFSWIKVDLLAPMIIHGIKTQGARQKFSSLYISQFIIMYSLDGKKWQTYRGNSTGTDMVFFGNVDSSGIKHNIFNPPIIARYIRLHPTHYSIRSTLRMELMGCDLNSCSMPLGMESKAISDAQITASSYFTNMFATWSPSKARLHLQGRSNAWRPQVNNPKEWLQVDFQKTMKVTGVTTQGVKSLDTSMYVKEFLISSSQDGHQWTLFFQNGKVKVFQGNQDSFTPVVNSLDPPLLTRYLRIHPQSWEHQIALRMEVLGCEAQDLY

SEQ ID NO: 1209 - DNA, 4371 bp, synthetic construct
  misc_feature 1..4371: note = Variant of human B-domain deleted Factor VIII
  source 1..4371: mol_type = other DNA
atgcagattgaactgtctacctgcttcttcctctgtttgctgaggttctgctttagcgccactagacggtactaccttggcgctgtggagctgtcctgggactatatgcagagtgatttgggagagcttcccgtcgacgcacgatttcctcctcgcgttccaaagtcatttccctttaacacaagcgtcgtgtacaagaagacgctcttcgtcgaattcaccgatcacctgttcaatatcgccaaacccagaccaccatggatgggtcttttggggcctaccatacaagcggaggtgtatgacacagttgttatcactctcaagaacatggcttctcatccggtaagtcttcacgcagtgggcgtgtcctactggaaagcttcagaaggagccgagtatgatgatcagacatcccagagggagaaagaagacgacaaggtatttccaggtgggtctcatacctatgtgtggcaagtgctcaaagagaatggccctatggcaagcgatccgccgtgtttgacttacagctacctttcacacgttgacctcgtcaaggacctcaactccgggttgattggagccttgttggtatgcagggaaggatctcttgccaaagagaagacacagaccctccacaagtttatccttctctttgctgtgttcgatgagggcaaaagttggcatagcgaaacgaagaattccctcatgcaggatcgcgacgcagccagcgccagagcttggcccaagatgcacactgtgaacggatatgtcaataggacgcttcctggcttgattgggtgtcatcggaaaagtgtctactggcacgtgatcggaatggggacaacaccagaggtccactccatatttctcgaaggccataccttccttgttcgaaaccacagacaggcatccttggggatctctcccattacctttctcactgcccaaacgctccttatggacttgggtcagttccttctcttttgccatatcccgtcacaccagcatgatggtatggaagcttatgtgaaagtcgacagttgtcctgaggagccacagttgcgcatgaagaataatgaagaagccgaggattacgacgacgatctcaccgattctgagatggacgtggtgaggtttgatgacgacaactctccctccatcattcaagctcggagcggggcgaagaaacaccccaagacttgggtccactatatagcggcggaagaggaggattgggattacgctcctcttgtattggcaccagatgaccgctcatacaaaagccagtacctcaacaacggaccgcagagaattggccggaagtataagaaagtgcgatttatggcctatacagacgaaacctttaagacaagggaggccatccagcatgagagtgggattttgggacctcttctttacggcgaagttggtgataccctcctcatcatcttcaagaatcaagcttctcgcccctataacatttacccacacgggatcactgacgttaggcctttgtatagcagaagacttcccaaaggcgtgaagcatctcaaagacttccccattttgccaggcgagatctttaagtacaaatggaccgtcacagtggaagatggaccgactaaatcagaccctcgatgccttacgcggtactattcctccttcgtgaatatggagagagatttggcaagcggactcataggaccactcctcatctgttacaaggaatctgtagaccagaggggtaaccagattatgagtgataaacgcaatgtgatcctttttagcgtcttcgacgagaaccggtcctggtacttgaccgagaatatacaaaggttccttcccaaccccgcaggcgttcagttggaagaccctgagtttcaggccagcaatattatgcactcaatcaacggctatgtgtttgatagtctccagctttctgtttgcctccatgaagtagcctattggtacatcttgtcaattggtgctcaaacagacttcctctccgtcttcttctccggctacacctttaagcacaagatggtgtatgaggacactctcacactctttccattttctggagaaaccgtgttcatgagcatggagaatccaggcctttggatcttgggttgccacaacagtgattttcgcaatcggggaatgactgctctcctcaaagtcagcagctgtgataagaacacaggcgactattacgaagattcttacgaggacataagtgcctactttgactccaagaataacgccattgagcccagatcattctcccagaatcctcccgtgcttaaaaggcatcagcgcgaaatcaccagaactactcttcagtctgatcaagaggagattgactatgacgacaccataagcgtggaaatgaagaaggaggatttcgatatctatgacgaagatgagaaccagtctccgcggagctttcagaagaagacgcgacactacttcattgcagcagtcgaaaggctttgggactacggtatgtcatcatcccctcatgtgttgcgcaatagagctcagagtggaagtgttccacagttcaagaaagtcgtctttcaagagtttacagatggcagcttcacacagcctctctatcggggcgagcttaacgaacatttgggactccttggtccctatatccgagccgaagtggaggacaacattatggttacctttaggaatcaagcctctcgcccctacagcttctactcctccctcatcagttatgaggaggatcagagaatgggcgctgaaccacggaagaactttgtgaaaccgaatgagacgaagacctacttctggaaagtacagcaccacatggcccccacaaaagacgaattcgattgcaaagcatgggcgtatttttcagacgttgacttggagaaagatgtacattcaggacttattggtcctttgttggtgtgtcacactaacactctcaatccagcccatggcaggcaggtgacagtccaggaattcgctcttttctttaccatctttgatgagaccaagtcctggtacttcacggaaaacatggagcgcaattgcagagccccctgtaacatacagatggaggaccctacctttaaggaaaattatcggttccacgcaatcaacggatacattatggatacactccctggccttgtgatggctcaggaccaacgaatcaggtggtacctcctcagcatgggttctaatgagaacatacactccattcacttttcaggacatgtgttcactgtccggaagaaagaagagtataagatggccctctacaatttgtatccaggcgtgtttgagaccgttgaaatgcttccctctaaagctggcatctggagagtagagtgcttgatcggagaacatcttcacgcaggtatgagcaccttgttcctcgtgtacagcaacaaatgtcagaatccacttggcatggccagtggacacattcgcgactttcagatcacagcatctggccagtatggacaatgggccccaaagttggctcgcctccattactccggtagcataaatgcgtggtccactaaagaacctttcagctggattaaggtcgatcttcttgcccccatgatcatccacggcattaagacacagggagcgaggcagaaattctcctccctctacatctcacagttcattattatgtatagtttggacggcaagaagtggcaaacttatagaggtaacagtactggaacagacatggtgttcttcggcaacgttgatagctctggcatcaaacacaacatctttaatcctcccataatagctcggtacatcagattgcatccgacccactacagcattaggagtacactccgaatggagcttatgggttgcgacttgaattcctgttcaatgccactcggaatggagtctaaagccatctctgatgcacagataaccgccagtagctactttacgaacatgtttgctacgtggtcaccctctaaggcaaggcttcatttgcaaggccggtctaatgcctggagacctcaggtgaacaacccgaaagaatggctccaggtggactttcagaagaccatgaaagtaacaggtgtcactactcagggagttaagtccttggatactagcatgtatgtgaaggagttccttatttcctcatcacaagatggccaccagtggaccctcttctttcagaatggtaaggtcaaagtgtttcagggcaatcaagacagcttcacacccgtggtgaacagtcttgatcctccactcttgacacgataccttcgaatccatccacagtcttgggagcaccagattgcattgcgcatggaagtacttggatgcgaggctcaggacctctac

SEQ ID NO: 1210 - protein, 1457 aa, synthetic construct
  REGION 1..1457: note = Variant of human B-domain deleted Factor VIII
MQIELSTCFFLCLLRFCFSATRRYYLGAVELSWDYMQSDLGELPVDARFPPRVPKSFPFNTSVVYKKTLFVEFTDHLFNIAKPRPPWMGLLGPTIQAEVYDTVVITLKNMASHPVSLHAVGVSYWKASEGAEYDDQTSQREKEDDKVFPGGSHTYVWQVLKENGPMASDPPCLTYSYLSHVDLVKDLNSGLIGALLVCREGSLAKEKTQTLHKFILLFAVFDEGKSWHSETKNSLMQDRDAASARAWPKMHTVNGYVNRTLPGLIGCHRKSVYWHVIGMGTTPEVHSIFLEGHTFLVRNHRQASLGISPITFLTAQTLLMDLGQFLLFCHIPSHQHDGMEAYVKVDSCPEEPQLRMKNNEEAEDYDDDLTDSEMDVVRFDDDNSPSIIQARSGAKKHPKTWVHYIAAEEEDWDYAPLVLAPDDRSYKSQYLNNGPQRIGRKYKKVRFMAYTDETFKTREAIQHESGILGPLLYGEVGDTLLIIFKNQASRPYNIYPHGITDVRPLYSRRLPKGVKHLKDFPILPGEIFKYKWTVTVEDGPTKSDPRCLTRYYSSFVNMERDLASGLIGPLLICYKESVDQRGNQIMSDKRNVILFSVFDENRSWYLTENIQRFLPNPAGVQLEDPEFQASNIMHSINGYVFDSLQLSVCLHEVAYWYILSIGAQTDFLSVFFSGYTFKHKMVYEDTLTLFPFSGETVFMSMENPGLWILGCHNSDFRNRGMTALLKVSSCDKNTGDYYEDSYEDISAYFDSKNNAIEPRSFSQNPPVLKRHQREITRTTLQSDQEEIDYDDTISVEMKKEDFDIYDEDENQSPRSFQKKTRHYFIAAVERLWDYGMSSSPHVLRNRAQSGSVPQFKKVVFQEFTDGSFTQPLYRGELNEHLGLLGPYIRAEVEDNIMVTFRNQASRPYSFYSSLISYEEDQRMGAEPRKNFVKPNETKTYFWKVQHHMAPTKDEFDCKAWAYFSDVDLEKDVHSGLIGPLLVCHTNTLNPAHGRQVTVQEFALFFTIFDETKSWYFTENMERNCRAPCNIQMEDPTFKENYRFHAINGYIMDTLPGLVMAQDQRIRWYLLSMGSNENIHSIHFSGHVFTVRKKEEYKMALYNLYPGVFETVEMLPSKAGIWRVECLIGEHLHAGMSTLFLVYSNKCQNPLGMASGHIRDFQITASGQYGQWAPKLARLHYSGSINAWSTKEPFSWIKVDLLAPMIIHGIKTQGARQKFSSLYISQFIIMYSLDGKKWQTYRGNSTGTDMVFFGNVDSSGIKHNIFNPPIIARYIRLHPTHYSIRSTLRMELMGCDLNSCSMPLGMESKAISDAQITASSYFTNMFATWSPSKARLHLQGRSNAWRPQVNNPKEWLQVDFQKTMKVTGVTTQGVKSLDTSMYVKEFLISSSQDGHQWTLFFQNGKVKVFQGNQDSFTPVVNSLDPPLLTRYLRIHPQSWEHQIALRMEVLGCEAQDLY

SEQ ID NO: 1211 - DNA, 4371 bp, synthetic construct
  misc_feature 1..4371: note = Variant of human B-domain deleted Factor VIII
  source 1..4371: mol_type = other DNA
atgcagattgaactgtctacctgcttcttcctctgtttgctgaggttctgctttagcgccactagacggtactaccttggcgctgtggagctgtcctgggactatatgcagagtgatttgggagagcttcccgtcgacgcacgatttcctcctcgcgttccaaagtcatttccctttaacacaagcgtcgtgtacaagaagacgctcttcgtcgaattcaccgatcacctgttcaatatcgccaaacccagaccaccatggatgggtcttttggggcctaccatacaagcggaggtgtatgacacagttgttatcactctcaagaacatggcttctcatccggtaagtcttcacgcagtgggcgtgtcctactggaaagcttcagaaggagccgagtatgatgatcagacatcccagagggagaaagaagacgacaaggtatttccaggtgggtctcatacctatgtgtggcaagtgctcaaagagaatggccctatggcaagcgatccgccgtgtttgacttacagctacctttcacacgttgacctcgtcaaggacctcaactccgggttgattggagccttgttggtatgcagggaaggatctcttgccaaagagaagacacagaccctccacaagtttatccttctctttgctgtgttcgatgagggcaaaagttggcatagcgaaacgaagaattccctcatgcaggatcgcgacgcagccagcgccagagcttggcccaagatgcacactgtgaacggatatgtcaataggacgcttcctggcttgattgggtgtcatcggaaaagtgtctactggcacgtgatcggaatggggacaacaccagaggtccactccatatttctcgaaggccataccttccttgttcgaaaccacagacaggcatccttggggatctctcccattacctttctcactgcccaaacgctccttatggacttgggtcagttccttctcttttgccatatcccgtcacaccagcatgatggtatggaagcttatgtgaaagtcgacagttgtcctgaggagccacagttgcgcatgaagaataatgaagaagccgaggattacgacgacgatctcaccgattctgagatggacgtggtgaggtttgatgacgacaactctccctccatcattcaagctcggagcggggcgaagaaacaccccaagacttgggtccactatatagcggcggaagaggaggattgggattacgctcctcttgtattggcaccagatgaccgctcatacaaaagccagtacctcaacaacggaccgcagagaattggccggaagtataagaaagtgcgatttatggcctatacagacgaaacctttaagacaagggaggccatccagcatgagagtgggattttgggacctcttctttacggcgaagttggtgataccctcctcatcatcttcaagaatcaagcttctcgcccctataacatttacccacacgggatcactgacgttaggcctttgtatagcagaagacttcccaaaggcgtgaagcatctcaaagacttccccattttgccaggcgagatctttaagtacaaatggaccgtcacagtggaagatggaccgactaaatcagaccctcgatgccttacgcggtactattcctccttcgtgaatatggagagagatttggcaagcggactcataggaccactcctcatctgttacaaggaatctgtagaccagaggggtaaccagattatgagtgataaacgcaatgtgatcctttttagcgtcttcgacgagaaccggtcctggtacttgaccgagaatatacaaaggttccttcccaaccccgcaggcgttcagttggaagaccctgagtttcaggccagcaatattatgcactcaatcaacggctatgtgtttgatagtctccagctttctgtttgcctccatgaagtagcctattggtacatcttgtcaattggtgctcaaacagacttcctctccgtcttcttctccggctacacctttaagcacaagatggtgtatgaggacactctcacactctttccattttctggagaaaccgtgttcatgagcatggagaatccaggcctttggatcttgggttgccacaacagtgattttcgcaatcggggaatgactgctctcctcaaagtcagcagctgtgataagaacacaggcgactattacgaagattcttacgaggacataagtgactactttgactacaaaaataacgccattgagcccagatcattctcccagaatcctcccgtgcttaaaaggcatcagcgcgaaatcaccagaactactcttcagtctgatcaagaggagattgactatgacgacaccattagcgtggaaatgaagaaggaggatttcgatatctatgacgaagatgagaaccagtctccgcggagctttcagaagaagacgcgacactacttcattgcagcagtcgaaaggctttgggactacggtatgtcatcatcccctcatgtgttgcgcaatagagctcagagtggaagtgttccacagttcaagaaagtcgtctttcaagagtttacagatggcagcttcacacagcctctctatcggggcgagcttaacgaacatttgggactccttggtccctatatccgagccgaagtggaggacaacattatggttacctttaggaatcaagcctctcgcccctacagcttctactcctccctcatcagttatgaggaggatcagagacaaggcgctgaaccacggaagaactttgtgaaaccgaatgagacgaagacctacttctggaaagtacagcaccacatggcccccacaaaagacgaattcgattgcaaagcatgggcgtatttttcagacgttgacttggagaaagatgtacattcaggacttattggtcctttgttggtgtgtcacactaacactctcaatccagcccatggcaggcaggtgacagtccaggaattcgctcttttctttaccatctttgatgagaccaagtcctggtacttcacggaaaacatggagcgcaattgcagagccccctgtaacatacagatggaggaccctacctttaaggaaaattatcggttccacgcaatcaacggatacattatggatacactccctggccttgtgatggctcaggaccaacgaatcaggtggtacctcctcagcatgggttctaatgagaacatacactccattcacttttcaggacatgtgttcactgtccggaagaaagaagagtataagatggccctctacaatttgtatccaggcgtgtttgagaccgttgaaatgcttccctctaaagctggcatctggagagtagagtgcttgatcggagaacatcttcacgcaggtatgagcaccttgttcctcgtgtacagcaacaaatgtcagaccccacttggcatggccagtggacacattcgcgactttcagatcacagcatctggccagtatggacaatgggccccaaagttggctcgcctccattactccggtagcataaatgcgtggtccactaaagaacctttcagctggattaaggtcgatcttcttgcccccatgatcatccacggcattaagacacagggagcgaggcagaaattctcctccctctacatctcacagttcattattatgtatagtttggacggcaagaagtggcaaacttatagaggtaacagtactggaacagacatggtgttcttcggcaacgttgatagctctggcatcaaacacaacatctttaatcctcccataatagctcggtacatcagattgcatccgacccactacagcattaggagtacactccgaatggagcttatgggttgcgacttgaattcctgttcaatgccactcggaatggagtctaaagccatctctgatgcacagataaccgccagtagctactttacgaacatgtttgctacgtggtcaccctctaaggcaaggcttcatttgcaaggccggtctaatgcctggagacctcaggtgaacaacccgaaagaatggctccaggtggactttcagaagaccatgaaagtaacaggtgtcactactcagggagttaagtccttggatactagcatgtatgtgaaggagttccttatttcctcatcacaagatggccaccagtggaccctcttctttcagaatggtaaggtcaaagtgtttcagggcaatcaagacagcttcacacccgtggtgaacagtcttgatcctccactcttgacacgataccttcgaatccatccacagtcttgggagcaccagattgcattgcgcatggaagtacttggatgcgaggctcaggacctctac

SEQ ID NO: 1212 - protein, 1457 aa, synthetic construct
  REGION 1..1457: note = Variant of human B-domain deleted Factor VIII
MQIELSTCFFLCLLRFCFSATRRYYLGAVELSWDYMQSDLGELPVDARFPPRVPKSFPFNTSVVYKKTLFVEFTDHLFNIAKPRPPWMGLLGPTIQAEVYDTVVITLKNMASHPVSLHAVGVSYWKASEGAEYDDQTSQREKEDDKVFPGGSHTYVWQVLKENGPMASDPPCLTYSYLSHVDLVKDLNSGLIGALLVCREGSLAKEKTQTLHKFILLFAVFDEGKSWHSETKNSLMQDRDAASARAWPKMHTVNGYVNRTLPGLIGCHRKSVYWHVIGMGTTPEVHSIFLEGHTFLVRNHRQASLGISPITFLTAQTLLMDLGQFLLFCHIPSHQHDGMEAYVKVDSCPEEPQLRMKNNEEAEDYDDDLTDSEMDVVRFDDDNSPSIIQARSGAKKHPKTWVHYIAAEEEDWDYAPLVLAPDDRSYKSQYLNNGPQRIGRKYKKVRFMAYTDETFKTREAIQHESGILGPLLYGEVGDTLLIIFKNQASRPYNIYPHGITDVRPLYSRRLPKGVKHLKDFPILPGEIFKYKWTVTVEDGPTKSDPRCLTRYYSSFVNMERDLASGLIGPLLICYKESVDQRGNQIMSDKRNVILFSVFDENRSWYLTENIQRFLPNPAGVQLEDPEFQASNIMHSINGYVFDSLQLSVCLHEVAYWYILSIGAQTDFLSVFFSGYTFKHKMVYEDTLTLFPFSGETVFMSMENPGLWILGCHNSDFRNRGMTALLKVSSCDKNTGDYYEDSYEDISDYFDYKNNAIEPRSFSQNPPVLKRHQREITRTTLQSDQEEIDYDDTISVEMKKEDFDIYDEDENQSPRSFQKKTRHYFIAAVERLWDYGMSSSPHVLRNRAQSGSVPQFKKVVFQEFTDGSFTQPLYRGELNEHLGLLGPYIRAEVEDNIMVTFRNQASRPYSFYSSLISYEEDQRQGAEPRKNFVKPNETKTYFWKVQHHMAPTKDEFDCKAWAYFSDVDLEKDVHSGLIGPLLVCHTNTLNPAHGRQVTVQEFALFFTIFDETKSWYFTENMERNCRAPCNIQMEDPTFKENYRFHAINGYIMDTLPGLVMAQDQRIRWYLLSMGSNENIHSIHFSGHVFTVRKKEEYKMALYNLYPGVFETVEMLPSKAGIWRVECLIGEHLHAGMSTLFLVYSNKCQTPLGMASGHIRDFQITASGQYGQWAPKLARLHYSGSINAWSTKEPFSWIKVDLLAPMIIHGIKTQGARQKFSSLYISQFIIMYSLDGKKWQTYRGNSTGTDMVFFGNVDSSGIKHNIFNPPIIARYIRLHPTHYSIRSTLRMELMGCDLNSCSMPLGMESKAISDAQITASSYFTNMFATWSPSKARLHLQGRSNAWRPQVNNPKEWLQVDFQKTMKVTGVTTQGVKSLDTSMYVKEFLISSSQDGHQWTLFFQNGKVKVFQGNQDSFTPVVNSLDPPLLTRYLRIHPQSWEHQIALRMEVLGCEAQDLY

SEQ ID NO: 1213 - DNA, 4371 bp, synthetic construct
  misc_feature 1..4371: note = Variant of human B-domain deleted Factor VIII
  source 1..4371: mol_type = other DNA
atgcagattgaactgtctacctgcttcttcctctgtttgctgaggttctgctttagcgccactagacggtactaccttggcgctgtggagctgtcctgggactatatgcagagtgatttgggagagcttcccgtcgacgcacgatttcctcctcgcgttccaaagtcatttccctttaacacaagcgtggtgtacaagaagacgctcttcgtcgaattcaccgatcacctgttcaatatcgccaaacccagaccaccatggatgggtcttttggggcctaccatacaagcggaggtgtatgacacagttgttatcactctcaagaacatggcttctcatccggtaagtcttcacgcagtgggcgtgtcctactggaaagcttcagaaggagccgagtatgatgatcagacatcccagagggagaaagaagacgacaaggtatttccaggtgggtctcatacctatgtgtggcaagtgctcaaagagaatggccctatggcaagcgatccgccgtgtttgacttacagctacctttcacacgttgacctcgtcaaggacctcaactccgggttgattggagccttgttggtatgcagggaaggatctcttgccaaagagaagacacagaccctccacaagtttatccttctctttgctgtgttcgatgagggcaaaagttggcatagcgaaacgaagaattccctcatgcaggatcgcgacgcagccagcgccagagcttggcccaagatgcacactgtgaacggatatgtcaataggacgcttcctggcttgattgggtgtcatcggaaaagtgtctactggcacgtgatcggaatggggacaacaccagaggtccactccatatttctcgaaggccataccttccttgttcgaaaccacagacaggcatccttggggatctctcccattacctttctcactgcccaaacgctccttatggacttgggtcagttccttctcttttgccatatcccgtcacaccagcatgatggtatggaagcttatgtgaaagtcgacagttgtcctgaggagccacagttgcgcatgaagaataatgaagaagccgaggattacgacgacgatctcaccgattctgagatggacgtggtgaggtttgatgacgacaactctccctccatcattcaagctcggagcggggcgaagaaacaccccaagacttgggtccactatatagcggcggaagaggaggattgggattacgctcctcttgtattggcaccagatgaccgctcatacaaaagccagtacctcaacaacggaccgcagagaattggccggaagtataagaaagtgcgatttatggcctatacagacgaaacctttaagacaagggaggccatccagcatgagagtgggattttgggacctcttctttacggcgaagttggtgataccctcctcatcatcttcaagaatcaagcttctcgcccctataacatttacccacacgggatcactgacgttaggcctttgtatagcagaagacttcccaaaggcgtgaagcatctcaaagacttccccattttgccaggcgagatctttaagtacaaatggaccgtcacagtggaagatggaccgactaaatcagaccctcgatgccttacgcggtactattcctccttcgtgaatatggagagagatttggcaagcggactcataggaccactcctcatctgttacaaggaatctgtagaccagaggggtaaccagattatgagtgataaacgcaatgtgatcctttttagcgtcttcgacgagaaccggtcctggtacttgaccgagaatatacaaaggttccttcccaaccccgcaggcgttcagttggaagaccctgagtttcaggccagcaatattatgcactcaatcaacggctatgtgtttgatagtctccagctttctgtttgcctccatgaagtagcctattggtacatcttgtcaattggtgctcaaacagacttcctctccgtcttcttctccggctacacctttaagcacaagatggtgtatgaggacactctcacactctttccattttctggagaaaccgtgttcatgagcatggagaatccaggcctttggatcttgggttgccacaacagtgattttcgcaatcggggaatgactgctctcctcaaagtcagcagctgtgataagaacacaggcgactattacgaagattcttacgaggacataagtgactactttgactcgaaagataacgccattgagcccagatcattctcccagaatcctcccgtgcttaaaaggcatcagcgcgaaggtaccagaactactcttcagtctgatcaagaggagattgactatgacgacaccataagcgtggaaatgaagaaggaggatttcgatatctatgacgaagatgagaaccagtctccgcggagctttcagaagaagacgcgacactacttcattgcagcagtcgaaaggctttgggactacggtatgtcatcatcccctcatgtgttgcgcaatagagctcagagtggaagtgttccacagttcaagaaagtcgtctttcaagagtttacagatggcagcttcacacagcctctctatcggggcgagcttaacgaacatttgggactccttggtccctatatccgagccgaagtggaggacaacattatggttacctttaggaatcaagcctctcgcccctacagcttctactcctccctcatcagttatgaggaggatcagagacaaggcgctgaaccacggaagaactttgtgaaaccgaatgagacgaagacctacttctggaaagtacagcaccacatggcccccacaaaagacgaattcgattgcaaagcatgggcgtatttttcagacgttgacttggagaaagatgtacattcaggacttattggtcctttgttggtgtgtcacactaacactctcaatccagcccatggcaggcaggtgacagtccaggaattcgctcttttctttaccatctttgatgagaccaagtcctggtacttcacggaaaacatggagcgcaattgcagagccccctgtaacatacagatggaggaccctacctttaaggaaaattatcggttccacgcaatcaacggatacattatggatacactccctggccttgtgatggctcaggaccaacgaatcaggtggtacctcctcagcatgggttctaatgagaacatacactccattcacttttcaggacatgtgttcactgtccggaagaaagaagagtataagatggccctctacaatttgtatccaggcgtgtttgagaccgttgaaatgcttccctctaaagctggcatctggagagtagagtgcttgatcggagaacatcttcacgcaggtatgagcaccttgttcctcgtgtacagcaacaaatgtcagaatccacttggcatggccagtggacacattcgcgactttcagatcacagcatctggccagtatggacaatgggccccaaagttggctcgcctccattactccggtagcataaatgcgtggtccactaaagaacctttcagctggattaaggtcgatcttcttgcccccatgatcatccacggcattaagacacagggagcgaggcagaaattctcctccctctacatctcacagttcattattatgtatagtttggacggcaagaagtggcaaacttatagaggtaacagtactggaacagacatggtgttcttcggcaacgttgatagctctggcatcaaacacaacatctttaatcctcccataatagctcggtacatcagattgcatccgacccactacagcattaggagtacactccgaatggagcttatgggttgcgacttgaattcctgttcaatgccactcggaatggagtctaaagccatctctgatgcacagataaccgccagtagctactttacgaacatgtttgctacgtggtcaccctctaaggcaaggcttcatttgcaaggccggtctaatgcctggagacctcaggtgaacaacccgaaagaatggctccaggtggactttcagaagaccatgaaagtaacaggtgtcactactcagggagttaagtccttggatactagcatgtatgtgaaggagttccttatttcctcatcacaagatggccaccagtggaccctcttctttcagaatggtaaggtcaaagtgtttcagggcaatcaagacagcttcacacccgtggtgaacagtcttgatcctccactcttgacacgataccttcgaatccatccacagtcttgggagcaccagattgcattgcgcatggaagtacttggatgcgaggctcaggacctctac

SEQ ID NO: 1214 - protein, 1457 aa, synthetic construct
  REGION 1..1457: note = Variant of human B-domain deleted Factor VIII
MQIELSTCFFLCLLRFCFSATRRYYLGAVELSWDYMQSDLGELPVDARFPPRVPKSFPFNTSVVYKKTLFVEFTDHLFNIAKPRPPWMGLLGPTIQAEVYDTVVITLKNMASHPVSLHAVGVSYWKASEGAEYDDQTSQREKEDDKVFPGGSHTYVWQVLKENGPMASDPPCLTYSYLSHVDLVKDLNSGLIGALLVCREGSLAKEKTQTLHKFILLFAVFDEGKSWHSETKNSLMQDRDAASARAWPKMHTVNGYVNRTLPGLIGCHRKSVYWHVIGMGTTPEVHSIFLEGHTFLVRNHRQASLGISPITFLTAQTLLMDLGQFLLFCHIPSHQHDGMEAYVKVDSCPEEPQLRMKNNEEAEDYDDDLTDSEMDVVRFDDDNSPSIIQARSGAKKHPKTWVHYIAAEEEDWDYAPLVLAPDDRSYKSQYLNNGPQRIGRKYKKVRFMAYTDETFKTREAIQHESGILGPLLYGEVGDTLLIIFKNQASRPYNIYPHGITDVRPLYSRRLPKGVKHLKDFPILPGEIFKYKWTVTVEDGPTKSDPRCLTRYYSSFVNMERDLASGLIGPLLICYKESVDQRGNQIMSDKRNVILFSVFDENRSWYLTENIQRFLPNPAGVQLEDPEFQASNIMHSINGYVFDSLQLSVCLHEVAYWYILSIGAQTDFLSVFFSGYTFKHKMVYEDTLTLFPFSGETVFMSMENPGLWILGCHNSDFRNRGMTALLKVSSCDKNTGDYYEDSYEDISDYFDSKDNAIEPRSFSQNPPVLKRHQREGTRTTLQSDQEEIDYDDTISVEMKKEDFDIYDEDENQSPRSFQKKTRHYFIAAVERLWDYGMSSSPHVLRNRAQSGSVPQFKKVVFQEFTDGSFTQPLYRGELNEHLGLLGPYIRAEVEDNIMVTFRNQASRPYSFYSSLISYEEDQRQGAEPRKNFVKPNETKTYFWKVQHHMAPTKDEFDCKAWAYFSDVDLEKDVHSGLIGPLLVCHTNTLNPAHGRQVTVQEFALFFTIFDETKSWYFTENMERNCRAPCNIQMEDPTFKENYRFHAINGYIMDTLPGLVMAQDQRIRWYLLSMGSNENIHSIHFSGHVFTVRKKEEYKMALYNLYPGVFETVEMLPSKAGIWRVECLIGEHLHAGMSTLFLVYSNKCQNPLGMASGHIRDFQITASGQYGQWAPKLARLHYSGSINAWSTKEPFSWIKVDLLAPMIIHGIKTQGARQKFSSLYISQFIIMYSLDGKKWQTYRGNSTGTDMVFFGNVDSSGIKHNIFNPPIIARYIRLHPTHYSIRSTLRMELMGCDLNSCSMPLGMESKAISDAQITASSYFTNMFATWSPSKARLHLQGRSNAWRPQVNNPKEWLQVDFQKTMKVTGVTTQGVKSLDTSMYVKEFLISSSQDGHQWTLFFQNGKVKVFQGNQDSFTPVVNSLDPPLLTRYLRIHPQSWEHQIALRMEVLGCEAQDLY

SEQ ID NO: 1215 - DNA, 4371 bp, synthetic construct
  misc_feature 1..4371: note = Variant of human B-domain deleted Factor VIII
  source 1..4371: mol_type = other DNA
atgcagattgaactgtctacctgcttcttcctctgtttgctgaggttctgctttagcgccactagacggtactaccttggcgctgtggagctgtcctgggactatatgcagagtgatttgggagagcttcccgtcgacgcacgatttcctcctcgcgttccaaagtcatttccctttaacacaagcgtcgtgtacaagaagacgctcttcgtcgaattcaccgatcacctgttcaatatcgccaaacccagaccaccatggatgggtcttttggggcctaccatacaagcggaggtgtatgacacagttgttatcactctcaagaacatggcttctcatccggtaagtcttcacgcagtgggcgtgtcctactggaaagcttcagaaggagccgagtatgatgatcagacatcccagagggagaaagaagacgacaaggtatttccaggtgggtctcatacctatgtgtggcaagtgctcaaagagaatggccctatggcaagcgatccgccgtgtttgacttacagctacctttcacacgttgacctcgtcaaggacctcaactccgggttgattggagccttgttggtatgcagggaaggatctcttgccaaagagaagacacagaccctccacaagtttatccttctctttgctgtgttcgatgagggcaaaagttggcatagcgaaacgaagaattccctcatgcaggatcgcgacgcagccagcgccagagcttggcccaagatgcacactgtgaacggatatgtcaataggacgcttcctggcttgattgggtgtcatcggaaaagtgtctactggcacgtgatcggaatggggacaacaccagaggtccactccatatttctcgaaggccataccttccttgttcgaaaccacagacaggcatccttggggatctctcccattacctttctcactgcccaaacgctccttatggacttgggtcagttccttctcttttgccatatcccgtcacaccagcatgatggtatggaagcttatgtgaaagtcgacagttgtcctgaggagccacagttgcgcatgaagaataatgaagaagccgaggattacgacgacgatctcaccgattctgagatggacgtggtgaggtttgatgacgacaactctccctccatcattcaagctcggagcgtggcgaagaaacaccccaagacttgggtccactatatagcggcggaagaggaggattgggattacgctcctcttgtattggcaccagatgaccgctcatacaaaagccagtacctcaacaacggaccgcagagaattggccggaagtataagaaagtgcgatttatggcctatacagacgaaacctttaagacaagggaggccatccagcatgagagtgggattttgggacctcttctttacggcgaagttggtgataccctcctcatcatcttcaagaatcaagcttctcgcccctataacatttacccacacgggatcactgacgttaggcctttgtatagcagaagacttcccaaaggcgtgaagcatctcaaagacttccccattttgccaggcgagatctttaagtacaaatggaccgtcacagtggaagatggaccgactaaatcagaccctcgatgccttacgcggtactattcctccttcgtgaatatggagagagatttggcaagcggactcataggaccactcctcatctgttacaaggaatctgtagaccagaggggtaaccagattatgagtgataaacgcaatgtgatcctttttagcgtcttcgacgagaaccggtcctggtacttgaccgagaatatacaaaggttccttcccaaccccgcaggcgttcagttggaagaccctgagtttcaggccagcaatattatgcactcaatcaacggctatgtgtttgatagtctccagctttctgtttgcctccatgaagtagcctattggtacatcttgtcaattggtgctcaaacagacttcctctccgtcttcttctccggctacacctttaagcacaagatggtgtatgaggacactctcacactctttccattttctggagaaaccgtgttcatgagcatggagaatccaggcctttggatcttgggttgccacaacagtgattttcgcaatcggggaatgactgctctcctcaaagtcagcagctgtgataagaacacaggcgactattacgaagattcttacgaggacataagtgcctactttgactcgctgaataacgccattgagcccagatcattctcccagaatcctcccgtgcttaaaaggcatcagcgcgaaatcaccagaactactcttcagtctgatcaagaggagattgactatgacgacaccataagcgtggaaatgaagaaggaggatttcgatatctatgacgaagatgagaaccagtctccgcggagctttcagaagaagacgcgacactacttcattgcagcagtcgaaaggctttgggactacggtatgtcatcatcccctcatgtgttgcgcaatagagctcagagtggaagtgttccacagttcaagaaagtcgtctttcaagagtttacagatggcagcttcacacagcctctctatcggggcgagcttaacgaacatttgggactccttggtccctatatccgagccgaagtggaggacaacattatggttacctttaggaatcaagcctctcgcccctacagcttctactcctccctcatcagttatgaggaggatcagagaatgggcgctgaaccacggaagaactttgtgaaaccgaatgagacgaagacctacttctggaaagtacagcaccacatggcccccacaaaagacgaattcgattgcaaagcatgggcgtatttttcagacgttgacttggagaaagatgtacattcaggacttattggtcctttgttggtgtgtcacactaacactctcaatccagcccatggcaggcaggtgacagtccaggaattcgctcttttctttaccatctttgatgagaccaagtcctggtacttcacggaaaacatggagcgcaattgcagagccccctgtaacatacagatggaggaccctacctttaaggaaaattatcggttccacgcaatcaacggatacattcgtgatacactccctggccttgtgatggctcaggaccaacgaatcaggtggtacctcctcagcatgggttctaatgagaacatacactccattcacttttcaggacatgtgttcactgtccggaagaaagaagagtataagatggccctctacaatttgtatccaggcgtgtttgagaccgttgaaatgcttccctctaaagctggcatctggagagtagagtgcttgatcggagaacatcttcacgcaggtatgagcaccttgttcctcgtgtacagcaacaaatgtcagaccccacttggcatggccagtggacacattcgcgactttcagatcacagcatctggccagtatggacaatgggccccaaagttggctcgcctccattactccggtagcataaatgcgtggtccactaaagaacctttcagctggattaaggtcgatcttcttgcccccatgatcatccacggcattaagacacagggagcgaggcagaaattctcctccctctacatctcacagttcattattatgtatagtttggacggcaagaagtggcaaacttatagaggtaacagtactggaacagacatggtgttcttcggcaacgttgatagctctggcatcaaacacaacatctttaatcctcccataatagctcggtacatcagattgcatccgacccactacagcattaggagtacactccgaatggagcttatgggttgcgacttgaattcctgttcaatgccactcggaatggagtctaaagccatctctgatgcacagataaccgccagtagctactttacgaacatgtttgctacgtggtcaccctctaaggcaaggcttcatttgcaaggccggtctaatgcctggagacctcaggtgaacaacccgaaagaatggctccaggtggactttcagaagaccatgaaagtaacaggtgtcactactcagggagttaagtccttggatactagcatgtatgtgaaggagttccttatttcctcatcacaagatggccaccagtggaccctcttctttcagaatggtaaggtcaaagtgtttcagggcaatcaagacagcttcacacccgtggtgaacagtcttgatcctccactcttgacacgataccttcgaatccatccacagtcttgggagcaccagattgcattgcgcatggaagtacttggatgcgaggctcaggacctctac

SEQ ID NO: 1216 - protein, 1457 aa, synthetic construct
  REGION 1..1457: note = Variant of human B-domain deleted Factor VIII
MQIELSTCFFLCLLRFCFSATRRYYLGAVELSWDYMQSDLGELPVDARFPPRVPKSFPFNTSVVYKKTLFVEFTDHLFNIAKPRPPWMGLLGPTIQAEVYDTVVITLKNMASHPVSLHAVGVSYWKASEGAEYDDQTSQREKEDDKVFPGGSHTYVWQVLKENGPMASDPPCLTYSYLSHVDLVKDLNSGLIGALLVCREGSLAKEKTQTLHKFILLFAVFDEGKSWHSETKNSLMQDRDAASARAWPKMHTVNGYVNRTLPGLIGCHRKSVYWHVIGMGTTPEVHSIFLEGHTFLVRNHRQASLGISPITFLTAQTLLMDLGQFLLFCHIPSHQHDGMEAYVKVDSCPEEPQLRMKNNEEAEDYDDDLTDSEMDVVRFDDDNSPSIIQARSVAKKHPKTWVHYIAAEEEDWDYAPLVLAPDDRSYKSQYLNNGPQRIGRKYKKVRFMAYTDETFKTREAIQHESGILGPLLYGEVGDTLLIIFKNQASRPYNIYPHGITDVRPLYSRRLPKGVKHLKDFPILPGEIFKYKWTVTVEDGPTKSDPRCLTRYYSSFVNMERDLASGLIGPLLICYKESVDQRGNQIMSDKRNVILFSVFDENRSWYLTENIQRFLPNPAGVQLEDPEFQASNIMHSINGYVFDSLQLSVCLHEVAYWYILSIGAQTDFLSVFFSGYTFKHKMVYEDTLTLFPFSGETVFMSMENPGLWILGCHNSDFRNRGMTALLKVSSCDKNTGDYYEDSYEDISAYFDSLNNAIEPRSFSQNPPVLKRHQREITRTTLQSDQEEIDYDDTISVEMKKEDFDIYDEDENQSPRSFQKKTRHYFIAAVERLWDYGMSSSPHVLRNRAQSGSVPQFKKVVFQEFTDGSFTQPLYRGELNEHLGLLGPYIRAEVEDNIMVTFRNQASRPYSFYSSLISYEEDQRMGAEPRKNFVKPNETKTYFWKVQHHMAPTKDEFDCKAWAYFSDVDLEKDVHSGLIGPLLVCHTNTLNPAHGRQVTVQEFALFFTIFDETKSWYFTENMERNCRAPCNIQMEDPTFKENYRFHAINGYIRDTLPGLVMAQDQRIRWYLLSMGSNENIHSIHFSGHVFTVRKKEEYKMALYNLYPGVFETVEMLPSKAGIWRVECLIGEHLHAGMSTLFLVYSNKCQTPLGMASGHIRDFQITASGQYGQWAPKLARLHYSGSINAWSTKEPFSWIKVDLLAPMIIHGIKTQGARQKFSSLYISQFIIMYSLDGKKWQTYRGNSTGTDMVFFGNVDSSGIKHNIFNPPIIARYIRLHPTHYSIRSTLRMELMGCDLNSCSMPLGMESKAISDAQITASSYFTNMFATWSPSKARLHLQGRSNAWRPQVNNPKEWLQVDFQKTMKVTGVTTQGVKSLDTSMYVKEFLISSSQDGHQWTLFFQNGKVKVFQGNQDSFTPVVNSLDPPLLTRYLRIHPQSWEHQIALRMEVLGCEAQDLY

SEQ ID NO: 1217 - DNA, 4371 bp, synthetic construct
  misc_feature 1..4371: note = Variant of human B-domain deleted Factor VIII
  source 1..4371: mol_type = other DNA
atgcagattgaactgtctacctgcttcttcctctgtttgctgaggttctgctttagcgccactagacggtactaccttggcgctgtggagctgtcctgggactatatgcagagtgatttgggagagcttcccgtcgacgcacgatttcctcctcgcgttccaaagtcatttccctttaacacaagccaggtgtacaagaagacgctcttcgtcgaattcaccgatcacctgttcaatatcgccaaacccagaccaccatggatgggtcttttggggcctaccatacaagcggaggtgtatgacacagttgttatcactctcaagaacatggcttctcatccggtaagtcttcacgcagtgggcgtgtcctactggaaagcttcagaaggagccgagtatgatgatcagacatcccagagggagaaagaagacgacaaggtatttccaggtgggtctcatacctatgtgtggcaagtgctcaaagagaatggccctatggcaagcgatccgccgtgtttgacttacagctacctttcacacgttgacctcgtcaaggacctcaactccgggttgattggagccttgttggtatgcagggaaggatctcttgccaaagagaagacacagaccctccacaagtttatccttctctttgctgtgttcgatgagggcaaaagttggcatagcgaaacgaagaattccctcatgcaggatcgcgacgcagccagcgccagagcttggcccaagatgcacactgtgaacggatatgtcaataggacgcttcctggcttgattgggtgtcatcggaaaagtgtctactggcacgtgatcggaatggggacaacaccagaggtccactccatatttctcgaaggccataccttccttgttcgaaaccacagacaggcatccttggggatctctcccattacctttctcactgcccaaacgctccttatggacttgggtcagttccttctcttttgccatatcccgtcacaccagcatgatggtatggaagcttatgtgaaagtcgacagttgtcctgaggagccacagttgcgcatgaagaataatgaagaagccgaggattacgacgacgatctcaccgattctgagatggacgtggtgaggtttgatgacgacaactctccctccatcattcaagctcggagcgtggcgaagaaacaccccaagacttgggtccactatatagcggcggaagaggaggattgggattacgctcctcttgtattggcaccagatgaccgctcatacaaaagccagtacctcaacaacggaccgcagagaattggccggaagtataagaaagtgcgatttatggcctatacagacgaaacctttaagacaagggaggccatccagcatgagagtgggattttgggacctcttctttacggcgaagttggtgataccctcctcatcatcttcaagaatcaagcttctcgcccctataacatttacccacacgggatcactgacgttaggcctttgtatagcagaagacttcccaaaggcgtgaagcatctcaaagacttccccattttgccaggcgagatctttaagtacaaatggaccgtcacagtggaagatggaccgactaaatcagaccctcgatgccttacgcggtactattcctccttcgtgaatatggagagagatttggcaagcggactcataggaccactcctcatctgttacaaggaatctgtagaccagaggggtaaccagattatgagtgataaacgcaatgtgatcctttttagcgtcttcgacgagaaccggtcctggtacttgaccgagaatatacaaaggttccttcccaaccccgcaggcgttcagttggaagaccctgagtttcaggccagcaatattatgcactcaatcaacggctatgtgtttgatagtctccagctttctgtttgcctccatgaagtagcctattggtacatcttgtcaattggtgctcaaacagacttcctctccgtcttcttctccggctacacctttaagcacaagatggtgtatgaggacactctcacactctttccattttctggagaaaccgtgttcatgagcatggagaatccaggcctttggatcttgggttgccacaacagtgattttcgcaatcggggaatgactgctctcctcaaagtcagcagctgtgataagaacacaggcgactattacgaagattcttacgaggacataagtgcctactttgactccaagaataacgccattgagcccagatcattctcccagaatcctcccgtgcttaaaaggcatcagcgcgaaggtaccagaactactcttcagtctgatcaagaggagattgactatgacgacaccataagcgtggaaatgaagaaggaggatttcgatatctatgacgaagatgagaaccagtctccgcggagctttcagaagaaaacgcgacactacttcattgcagcagtcgaaaggctttgggactacggtatgtcatcatcccctcatgtgttgcgcaatagagctcagagtggaagtgttccacagttcaagaaagtcgtctttcaagagtttacagatggcagcttcacacagcctctctatcggggcgagcttaacgaacatttgggactccttggtccctatatccgagccgaagtggaggacaacattatggttacctttaggaatcaagcctctcgcccctacagcttctactcctccctcatcagttatgaggaggatcagagacaaggcgctgaaccacggaagaactttgtgaaaccgaatgagacgaagacctacttctggaaagtacagcaccacatggcccccacaaaagacgaattcgattgcaaagcatgggcgtatttttcagacgttgacttggagaaagatgtacattcaggacttattggtcctttgttggtgtgtcacactaacactctcaatccagcccatggcaggcaggtgacagtccaggaattcgctcttttctttaccatctttgatgagaccaagtcctggtacttcacggaaaacatggagcgcaattgcagagccccctgtaacatacagatggaggaccctacctttaaggaaaattatcggttccacgcaatcaacggatacattatggatacactccctggccttgtgatggctcaggaccaacgaatcaggtggtacctcctcagcatgggttctaatgagaacatacactccattcacttttcaggacatgtgttcactgtccggaagaaagaagagtataagatggccctctacaatttgtatccaggcgtgtttgagaccgttgaaatgcttccctctaaagctggcatctggagagtagagtgcttgatcggagaacatcttcacgcaggtatgagcaccttgttcctcgtgtacagcaacaaatgtcagaccccacttggcatggccagtggacacattcgcgactttcagatcacagcatctggccagtatggacaatgggccccaaagttggctcgcctccattactccggtagcataaatgcgtggtccactaaagaacctttcagctggattaaggtcgatcttcttgcccccatgatcatccacggcattaagacacagggagcgaggcagaaattctcctccctctacatctcacagttcattattatgtatagtttggacggcaagaagtggcaaacttatagaggtaacagtactggaacagacatggtgttcttcggcaacgttgatagctctggcatcaaacacaacatctttaatcctcccataatagctcggtacatcagattgcatccgacccactacagcattaggagtacactccgaatggagcttatgggttgcgacttgaattcctgttcaatgccactcggaatggagtctaaagccatctctgatgcacagataaccgccagtagctactttacgaacatgtttgctacgtggtcaccctctaaggcaaggcttcatttgcaaggccggtctaatgcctggagacctcaggtgaacaacccgaaagaatggctccaggtggactttcagaagaccatgaaagtaacaggtgtcactactcagggagttaagtccttggatactagcatgtatgtgaaggagttccttatttcctcatcacaagatggccaccagtggaccctcttctttcagaatggtaaggtcaaagtgtttcagggcaatcaagacagcttcacacccgtggtgaacagtcttgatcctccactcttgacacgataccttcgaatccatccacagtcttgggagcaccagattgcattgcgcatggaagtacttggatgcgaggctcaggacctctac

SEQ ID NO: 1218 - protein, 1457 aa, synthetic construct
  REGION 1..1457: note = Variant of human B-domain deleted Factor VIII
MQIELSTCFFLCLLRFCFSATRRYYLGAVELSWDYMQSDLGELPVDARFPPRVPKSFPFNTSQVYKKTLFVEFTDHLFNIAKPRPPWMGLLGPTIQAEVYDTVVITLKNMASHPVSLHAVGVSYWKASEGAEYDDQTSQREKEDDKVFPGGSHTYVWQVLKENGPMASDPPCLTYSYLSHVDLVKDLNSGLIGALLVCREGSLAKEKTQTLHKFILLFAVFDEGKSWHSETKNSLMQDRDAASARAWPKMHTVNGYVNRTLPGLIGCHRKSVYWHVIGMGTTPEVHSIFLEGHTFLVRNHRQASLGISPITFLTAQTLLMDLGQFLLFCHIPSHQHDGMEAYVKVDSCPEEPQLRMKNNEEAEDYDDDLTDSEMDVVRFDDDNSPSIIQARSVAKKHPKTWVHYIAAEEEDWDYAPLVLAPDDRSYKSQYLNNGPQRIGRKYKKVRFMAYTDETFKTREAIQHESGILGPLLYGEVGDTLLIIFKNQASRPYNIYPHGITDVRPLYSRRLPKGVKHLKDFPILPGEIFKYKWTVTVEDGPTKSDPRCLTRYYSSFVNMERDLASGLIGPLLICYKESVDQRGNQIMSDKRNVILFSVFDENRSWYLTENIQRFLPNPAGVQLEDPEFQASNIMHSINGYVFDSLQLSVCLHEVAYWYILSIGAQTDFLSVFFSGYTFKHKMVYEDTLTLFPFSGETVFMSMENPGLWILGCHNSDFRNRGMTALLKVSSCDKNTGDYYEDSYEDISAYFDSKNNAIEPRSFSQNPPVLKRHQREGTRTTLQSDQEEIDYDDTISVEMKKEDFDIYDEDENQSPRSFQKKTRHYFIAAVERLWDYGMSSSPHVLRNRAQSGSVPQFKKVVFQEFTDGSFTQPLYRGELNEHLGLLGPYIRAEVEDNIMVTFRNQASRPYSFYSSLISYEEDQRQGAEPRKNFVKPNETKTYFWKVQHHMAPTKDEFDCKAWAYFSDVDLEKDVHSGLIGPLLVCHTNTLNPAHGRQVTVQEFALFFTIFDETKSWYFTENMERNCRAPCNIQMEDPTFKENYRFHAINGYIMDTLPGLVMAQDQRIRWYLLSMGSNENIHSIHFSGHVFTVRKKEEYKMALYNLYPGVFETVEMLPSKAGIWRVECLIGEHLHAGMSTLFLVYSNKCQTPLGMASGHIRDFQITASGQYGQWAPKLARLHYSGSINAWSTKEPFSWIKVDLLAPMIIHGIKTQGARQKFSSLYISQFIIMYSLDGKKWQTYRGNSTGTDMVFFGNVDSSGIKHNIFNPPIIARYIRLHPTHYSIRSTLRMELMGCDLNSCSMPLGMESKAISDAQITASSYFTNMFATWSPSKARLHLQGRSNAWRPQVNNPKEWLQVDFQKTMKVTGVTTQGVKSLDTSMYVKEFLISSSQDGHQWTLFFQNGKVKVFQGNQDSFTPVVNSLDPPLLTRYLRIHPQSWEHQIALRMEVLGCEAQDLY

SEQ ID NO: 1219 - DNA, 4371 bp, synthetic construct
  misc_feature 1..4371: note = Variant of human B-domain deleted Factor VIII
  source 1..4371: mol_type = other DNA
atgcagattgaactgtctacctgcttcttcctctgtttgctgaggttctgctttagcgccactagacggtactaccttggcgctgtggagctgtcctgggactatatgcagagtgatttgggagagcttcccgtcgacgcacgatttcctcctcgcgttccaaagtcatttccctttaacacaagccaggtgtacaagaagacgctcttcgtcgaattcaccgatcacctgttcaatatcgccaaacccagaccaccatggatgggtcttttggggcctaccatacaagcggaggtgtatgacacagttgttatcactctcaagaacatggcttctcatccggtaagtcttcacgcagtgggcgtgtcctactggaaagcttcagaaggagccgagtatgatgatcagacatcccagagggagaaagaagacgacaaggtatttccaggtgggtctcatacctatgtgtggcaagtgctcaaagagaatggccctatggcaagcgatccgccgtgtttgacttacagctacctttcacacgttgacctcgtcaaggacctcaactccgggttgattggagccttgttggtatgcagggaaggatctcttgccaaagagaagacacagaccctccacaagtttatccttctctttgctgtgttcgatgagggcaaaagttggcatagcgaaacgaagaattccctcatgcaggatcgcgacgcagccagcgccagagcttggcccaagatgcacactgtgaacggatatgtcaataggacgcttcctggcttgattgggtgtcatcggaaaagtgtctactggcacgtgatcggaatggggacaacaccagaggtccactccatatttctcgaaggccataccttccttgttcgaaaccacagacaggcatccttggggatctctcccattacctttctcactgcccaaacgctccttatggacttgggtcagttccttctcttttgccatatcccgtcacaccagcatgatggtatggaagcttatgtgaaagtcgacagttgtcctgaggagccacagttgcgcatgaagaataatgaagaagccgaggattacgacgacgatctcaccgattctgagatggacgtggtgaggtttgatgacgacaactctccctccatcattcaagctcggagcggggcgaagaaacaccccaagacttgggtccactatatagcggcggaagaggaggattgggattacgctcctcttgtattggcaccagatgaccgctcatacaaaagccagtacctcaacaacggaccgcagagaattggccggaagtataagaaagtgcgatttatggcctatacagacgaaacctttaagacaagggaggccatccagcatgagagtgggattttgggacctcttctttacggcgaagttggtgataccctcctcatcatcttcaagaatcaagcttctcgcccctataacatttacccacacgggatcactgacgttaggcctttgtatagcagaagacttcccaaaggcgtgaagcatctcaaagacttccccattttgccaggcgagatctttaagtacaaatggaccgtcacagtggaagatggaccgactaaatcagaccctcgatgccttacgcggtactattcctccttcgtgaatatggagagagatttggcaagcggactcataggaccactcctcatctgttacaaggaatctgtagaccagaggggtaaccagattatgagtgataaacgcaatgtgatcctttttagcgtcttcgacgagaaccggtcctggtacttgaccgagaatatacaaaggttccttcccaaccccgcaggcgttcagttggaagaccctgagtttcaggccagcaatattatgcactcaatcaacggctatgtgtttgatagtctccagctttctgtttgcctccatgaagtagcctattggtacatcttgtcaattggtgctcaaacagacttcctctccgtcttcttctccggctacacctttaagcacaagatggtgtatgaggacactctcacactctttccattttctggagaaaccgtgttcatgagcatggagaatccaggcctttggatcttgggttgccacaacagtgattttcgcaatcggggaatgactgctctcctcaaagtcagcagctgtgataagaacacaggcgactattacgaagattcttacgaggacataagtgcctactttgactcgctgaataacgccattgagcccagatcattctcccagaatcctcccgtgcttaaaaggcatcagcgcgaaggtaccagaactactcttcagtctgatcaagaggagattgactatgacgacaccgggagcgtggaaatgaagaaggaggatttcgatatctatgacgaagatgagaaccagtctccgcggagctttcagaagaaaacgcgacactacttcattgcagcagtcgaaaggctttgggactacggtatgtcatcatcccctcatgtgttgcgcaatagagctcagagtggaagtgttccacagttcaagaaagtcgtctttcaagagtttacagatggcagcttcacacagcctctctatcggggcgagcttaacgaacatttgggactccttggtccctatatccgagccgaagtggaggacaacattatggttacctttaggaatcaagcctctcgcccctacagcttctactcctccctcatcagttatgaggaggatcagagacaaggcgctgaaccacggaagaactttgtgaaaccgaatgagacgaagacctacttctggaaagtacagcaccacatggcccccacaaaagacgaattcgattgcaaagcatgggcgtatttttcagacgttgacttggagaaagatgtacattcaggacttattggtcctttgttggtgtgtcacactaacactctcaatccagcccatggcaggcaggtgacagtccaggaattcgctcttttctttaccatctttgatgagaccaagtcctggtacttcacggaaaacatggagcgcaattgcagagccccctgtaacatacagatggaggaccctacctttaaggaaaattatcggttccacgcaatcaacggatacattcgtgatagactccctggccttgtgatggctcaggaccaacgaatcaggtggtacctcctcagcatgggttctaatgagaacatacactccattcacttttcaggacatgtgttcactgtccggaagaaagaagagtataagatggccctctacaatttgtatccaggcgtgtttgagaccgttgaaatgcttccctctaaagctggcatctggagagtagagtgcttgatcggagaacatcttcacgcaggtatgagcaccttgttcctcgtgtacagcaacaaatgtcagactccacttggcatggccagtggacacattcgcgactttcagatcacagcatctggccagtatggacaatgggccccaaagttggctcgcctccattactccggtagcataaatgcgtggtccactaaagaacctttcagctggattaaggtcgatcttcttgcccccatgatcatccacggcattaagacacagggagcgaggcagaaattctcctccctctacatctcacagttcattattatgtatagtttggacggcaagaagtggcaaacttatagaggtaacagtactggaacagacatggtgttcttcggcaacgttgatagctctggcatcaaacacaacatctttaatcctcccataatagctcggtacatcagattgcatccgacccactacagcattaggagtacactccgaatggagcttatgggttgcgacttgaattcctgttcaatgccactcggaatggagtctaaagccatctctgatgcacagataaccgccagtagctactttacgaacatgtttgctacgtggtcaccctctaaggcaaggcttcatttgcaaggccggtctaatgcctggagacctcaggtgaacaacccgaaagaatggctccaggtggactttcagaagaccatgaaagtaacaggtgtcactactcagggagttaagtccttggatactagcatgtatgtgaaggagttccttatttcctcatcacaagatggccaccagtggaccctcttctttcagaatggtaaggtcaaagtgtttcagggcaatcaagacagcttcacacccgtggtgaacagtcttgatcctccactcttgacacgataccttcgaatccatccacagtcttgggagcaccagattgcattgcgcatggaagtacttggatgcgaggctcaggacctctac

SEQ ID NO: 1220 - protein, 1457 aa, synthetic construct
  REGION 1..1457: note = Variant of human B-domain deleted Factor VIII
MQIELSTCFFLCLLRFCFSATRRYYLGAVELSWDYMQSDLGELPVDARFPPRVPKSFPFNTSQVYKKTLFVEFTDHLFNIAKPRPPWMGLLGPTIQAEVYDTVVITLKNMASHPVSLHAVGVSYWKASEGAEYDDQTSQREKEDDKVFPGGSHTYVWQVLKENGPMASDPPCLTYSYLSHVDLVKDLNSGLIGALLVCREGSLAKEKTQTLHKFILLFAVFDEGKSWHSETKNSLMQDRDAASARAWPKMHTVNGYVNRTLPGLIGCHRKSVYWHVIGMGTTPEVHSIFLEGHTFLVRNHRQASLGISPITFLTAQTLLMDLGQFLLFCHIPSHQHDGMEAYVKVDSCPEEPQLRMKNNEEAEDYDDDLTDSEMDVVRFDDDNSPSIIQARSGAKKHPKTWVHYIAAEEEDWDYAPLVLAPDDRSYKSQYLNNGPQRIGRKYKKVRFMAYTDETFKTREAIQHESGILGPLLYGEVGDTLLIIFKNQASRPYNIYPHGITDVRPLYSRRLPKGVKHLKDFPILPGEIFKYKWTVTVEDGPTKSDPRCLTRYYSSFVNMERDLASGLIGPLLICYKESVDQRGNQIMSDKRNVILFSVFDENRSWYLTENIQRFLPNPAGVQLEDPEFQASNIMHSINGYVFDSLQLSVCLHEVAYWYILSIGAQTDFLSVFFSGYTFKHKMVYEDTLTLFPFSGETVFMSMENPGLWILGCHNSDFRNRGMTALLKVSSCDKNTGDYYEDSYEDISAYFDSLNNAIEPRSFSQNPPVLKRHQREGTRTTLQSDQEEIDYDDTGSVEMKKEDFDIYDEDENQSPRSFQKKTRHYFIAAVERLWDYGMSSSPHVLRNRAQSGSVPQFKKVVFQEFTDGSFTQPLYRGELNEHLGLLGPYIRAEVEDNIMVTFRNQASRPYSFYSSLISYEEDQRQGAEPRKNFVKPNETKTYFWKVQHHMAPTKDEFDCKAWAYFSDVDLEKDVHSGLIGPLLVCHTNTLNPAHGRQVTVQEFALFFTIFDETKSWYFTENMERNCRAPCNIQMEDPTFKENYRFHAINGYIRDRLPGLVMAQDQRIRWYLLSMGSNENIHSIHFSGHVFTVRKKEEYKMALYNLYPGVFETVEMLPSKAGIWRVECLIGEHLHAGMSTLFLVYSNKCQTPLGMASGHIRDFQITASGQYGQWAPKLARLHYSGSINAWSTKEPFSWIKVDLLAPMIIHGIKTQGARQKFSSLYISQFIIMYSLDGKKWQTYRGNSTGTDMVFFGNVDSSGIKHNIFNPPIIARYIRLHPTHYSIRSTLRMELMGCDLNSCSMPLGMESKAISDAQITASSYFTNMFATWSPSKARLHLQGRSNAWRPQVNNPKEWLQVDFQKTMKVTGVTTQGVKSLDTSMYVKEFLISSSQDGHQWTLFFQNGKVKVFQGNQDSFTPVVNSLDPPLLTRYLRIHPQSWEHQIALRMEVLGCEAQDLY

SEQ ID NO: 1221 - DNA, 4371 bp, synthetic construct
  misc_feature 1..4371: note = Variant of human B-domain deleted Factor VIII
  source 1..4371: mol_type = other DNA
atgcagattgaactgtctacctgcttcttcctctgtttgctgaggttctgctttagcgccactagacggtactaccttggcgctgtggagctgtcctgggactatatgcagagtgatttgggagagcttcccgtcgacgcacgatttcctcctcgcgttccaaagtcatttccctttaacacaagcgtggtgtacaagaagacgctcttcgtcgaattcaccgatcacctgttcaatatcgccaaacccagaccaccatggatgggtcttttggggcctaccatacaagcggaggtgtatgacacagttgttatcactctcaagaacatggcttctcatccggtaagtcttcacgcagtgggcgtgtcctactggaaagcttcagaaggagccgagtatgatgatcagacatcccagagggagaaagaagacgacaaggtatttccaggtgggtctcatacctatgtgtggcaagtgctcaaagagaatggccctatggcaagcgatccgccgtgtttgacttacagctacctttcacacgttgacctcgtcaaggacctcaactccgggttgattggagccttgttggtatgcagggaaggatctcttgccaaagagaagacacagaccctccacaagtttatccttctctttgctgtgttcgatgagggcaaaagttggcatagcgaaacgaagaattccctcatgcaggatcgcgacgcagccagcgccagagcttggcccaagatgcacactgtgaacggatatgtcaataggacgcttcctggcttgattgggtgtcatcggaaaagtgtctactggcacgtgatcggaatggggacaacaccagaggtccactccatatttctcgaaggccataccttccttgttcgaaaccacagacaggcatccttggggatctctcccattacctttctcactgcccaaacgctccttatggacttgggtcagttccttctcttttgccatatcccgtcacaccagcatgatggtatggaagcttatgtgaaagtcgacagttgtcctgaggagccacagttgcgcatgaagaataatgaagaagccgaggattacgacgacgatctcaccgattctgagatggacgtggtgaggtttgatgacgacaactctccctccatcattcaagctcggagcgtggcgaagaaacaccccaagacttgggtccactatatagcggcggaagaggaggattgggattacgctcctcttgtattggcaccagatgaccgctcatacaaaagccagtacctcaacaacggaccgcagagaattggccggaagtataagaaagtgcgatttatggcctatacagacgaaacctttaagacaagggaggccatccagcatgagagtgggattttgggacctcttctttacggcgaagttggtgataccctcctcatcatcttcaagaatcaagcttctcgcccctataacatttacccacacgggatcactgacgttaggcctttgtatagcagaagacttcccaaaggcgtgaagcatctcaaagacttccccattttgccaggcgagatctttaagtacaaatggaccgtcacagtggaagatggaccgactaaatcagaccctcgatgccttacgcggtactattcctccttcgtgaatatggagagagatttggcaagcggactcataggaccactcctcatctgttacaaggaatctgtagaccagaggggtaaccagattatgagtgataaacgcaatgtgatcctttttagcgtcttcgacgagaaccggtcctggtacttgaccgagaatatacaaaggttccttcccaaccccgcaggcgttcagttggaagaccctgagtttcaggccagcaatattatgcactcaatcaacggctatgtgtttgatagtctccagctttctgtttgcctccatgaagtagcctattggtacatcttgtcaattggtgctcaaacagacttcctctccgtcttcttctccggctacacctttaagcacaagatggtgtatgaggacactctcacactctttccattttctggagaaaccgtgttcatgagcatggagaatccaggcctttggatcttgggttgccacaacagtgattttcgcaatcggggaatgactgctctcctcaaagtcagcagctgtgataagaacacaggcgactattacgaagattcttacgaggacataagtgcctactttgactcgggcgataacgccattgagcccagatcattctcccagaatcctcccgtgcttaaaaggcatcagcgcgaaggtaccagaactactcttcagtctgatcaagaggagattgactatgacgacaccgggagcgtggaaatgaagaaggaggatttcgatatctatgacgaagatgagaaccagtctccgcggagctttcagaaggtcacgcgacactacttcattgcagcagtcgaaaggctttgggactacggtatgtcatcatcccctcatgtgttgcgcaatagagctcagagtggaagtgttccacagttcaagaaagtcgtctttcaagagtttacagatggcagcttcacacagcctctctatcggggcgagcttaacgaacatttgggactccttggtccctatatccgagccgaagtggaggacaacattatggttacctttaggaatcaagcctctcgcccctacagcttctactcctccctcatcagttatgaggaggatcagagacaaggcgctgaaccacggaagaactttgtgaaaccgaatgagacgaagacctacttctggaaagtacagcaccacatggcccccacaaaagacgaattcgattgcaaagcatgggcgtatttttcagacgttgacttggagaaagatgtacattcaggacttattggtcctttgttggtgtgtcacactaacactctcaatccagcccatggcaggcaggtgacagtccaggaattcgctcttttctttaccatctttgatgagaccaagtcctggtacttcacggaaaacatggagcgcaattgcagagccccctgtaacatacagatggaggaccctacctttaaggaaaattatcggttccacgcaatcaacggatacattatggatacactccctggccttgtgatggctcaggaccaacgaatcaggtggtacctcctcagcatgggttctaatgagaacatacactccattcacttttcaggacatgtgttcactgtccggaagaaagaagagtataagatggccctctacaatttgtatccaggcgtgtttgagaccgttgaaatgcttccctctaaagctggcatctggagagtagagtgcttgatcggagaacatcttcacgcaggtatgagcaccttgttcctcgtgtacagcaacaaatgtcagactccacttggcatggccagtggacacattcgcgactttcagatcacagcatctggccagtatggacaatgggccccaaagttggctcgcctccattactccggtagcataaatgcgtggtccactaaagaacctttcagctggattaaggtcgatcttcttgcccccatgatcatccacggcattaagacacagggagcgaggcagaaattctcctccctctacatctcacagttcattattatgtatagtttggacggcaagaagtggcaaacttatagaggtaacagtactggaacagacatggtgttcttcggcaacgttgatagctctggcatcaaacacaacatctttaatcctcccataatagctcggtacatcagattgcatccgacccactacagcattaggagtacactccgaatggagcttatgggttgcgacttgaattcctgttcaatgccactcggaatggagtctaaagccatctctgatgcacagataaccgccagtagctactttacgaacatgtttgctacgtggtcaccctctaaggcaaggcttcatttgcaaggccggtctaatgcctggagacctcaggtgaacaacccgaaagaatggctccaggtggactttcagaagaccatgaaagtaacaggtgtcactactcagggagttaagtccttggatactagcatgtatgtgaaggagttccttatttcctcatcacaagatggccaccagtggaccctcttctttcagaatggtaaggtcaaagtgtttcagggcaatcaagacagcttcacacccgtggtgaacagtcttgatcctccactcttgacacgataccttcgaatccatccacagtcttgggagcaccagattgcattgcgcatggaagtacttggatgcgaggctcaggacctctac

SEQ ID NO: 1222 - protein, 1457 aa, synthetic construct
  REGION 1..1457: note = Variant of human B-domain deleted Factor VIII
MQIELSTCFFLCLLRFCFSATRRYYLGAVELSWDYMQSDLGELPVDARFPPRVPKSFPFNTSVVYKKTLFVEFTDHLFNIAKPRPPWMGLLGPTIQAEVYDTVVITLKNMASHPVSLHAVGVSYWKASEGAEYDDQTSQREKEDDKVFPGGSHTYVWQVLKENGPMASDPPCLTYSYLSHVDLVKDLNSGLIGALLVCREGSLAKEKTQTLHKFILLFAVFDEGKSWHSETKNSLMQDRDAASARAWPKMHTVNGYVNRTLPGLIGCHRKSVYWHVIGMGTTPEVHSIFLEGHTFLVRNHRQASLGISPITFLTAQTLLMDLGQFLLFCHIPSHQHDGMEAYVKVDSCPEEPQLRMKNNEEAEDYDDDLTDSEMDVVRFDDDNSPSIIQARSVAKKHPKTWVHYIAAEEEDWDYAPLVLAPDDRSYKSQYLNNGPQRIGRKYKKVRFMAYTDETFKTREAIQHESGILGPLLYGEVGDTLLIIFKNQASRPYNIYPHGITDVRPLYSRRLPKGVKHLKDFPILPGEIFKYKWTVTVEDGPTKSDPRCLTRYYSSFVNMERDLASGLIGPLLICYKESVDQRGNQIMSDKRNVILFSVFDENRSWYLTENIQRFLPNPAGVQLEDPEFQASNIMHSINGYVFDSLQLSVCLHEVAYWYILSIGAQTDFLSVFFSGYTFKHKMVYEDTLTLFPFSGETVFMSMENPGLWILGCHNSDFRNRGMTALLKVSSCDKNTGDYYEDSYEDISAYFDSGDNAIEPRSFSQNPPVLKRHQREGTRTTLQSDQEEIDYDDTGSVEMKKEDFDIYDEDENQSPRSFQKVTRHYFIAAVERLWDYGMSSSPHVLRNRAQSGSVPQFKKVVFQEFTDGSFTQPLYRGELNEHLGLLGPYIRAEVEDNIMVTFRNQASRPYSFYSSLISYEEDQRQGAEPRKNFVKPNETKTYFWKVQHHMAPTKDEFDCKAWAYFSDVDLEKDVHSGLIGPLLVCHTNTLNPAHGRQVTVQEFALFFTIFDETKSWYFTENMERNCRAPCNIQMEDPTFKENYRFHAINGYIMDTLPGLVMAQDQRIRWYLLSMGSNENIHSIHFSGHVFTVRKKEEYKMALYNLYPGVFETVEMLPSKAGIWRVECLIGEHLHAGMSTLFLVYSNKCQTPLGMASGHIRDFQITASGQYGQWAPKLARLHYSGSINAWSTKEPFSWIKVDLLAPMIIHGIKTQGARQKFSSLYISQFIIMYSLDGKKWQTYRGNSTGTDMVFFGNVDSSGIKHNIFNPPIIARYIRLHPTHYSIRSTLRMELMGCDLNSCSMPLGMESKAISDAQITASSYFTNMFATWSPSKARLHLQGRSNAWRPQVNNPKEWLQVDFQKTMKVTGVTTQGVKSLDTSMYVKEFLISSSQDGHQWTLFFQNGKVKVFQGNQDSFTPVVNSLDPPLLTRYLRIHPQSWEHQIALRMEVLGCEAQDLY

SEQ ID NO: 1223 - DNA, 4371 bp, synthetic construct
  misc_feature 1..4371: note = Variant of human B-domain deleted Factor VIII
  source 1..4371: mol_type = other DNA
atgcagattgaactgtctacctgcttcttcctctgtttgctgaggttctgctttagcgccactagacggtactaccttggcgctgtggagctgtcctgggactatatgcagagtgatttgggagagcttcccgtcgacgcacgatttcctcctcgcgttccaaagtcatttccctttaacacaagccaggtgtacaagaagacgctcttcgtcgaattcaccgatcacctgttcaatatcgccaaacccagaccaccatggatgggtcttttggggcctaccatacaagcggaggtgtatgacacagttgttatcactctcaagaacatggcttctcatccggtaagtcttcacgcagtgggcgtgtcctactggaaagcttcagaaggagccgagtatgatgatcagacatcccagagggagaaagaagacgacaaggtatttccaggtgggtctcatacctatgtgtggcaagtgctcaaagagaatggccctatggcaagcgatccgccgtgtttgacttacagctacctttcacacgttgacctcgtcaaggacctcaactccgggttgattggagccttgttggtatgcagggaaggatctcttgccaaagagaagacacagaccctccacaagtttatccttctctttgctgtgttcgatgagggcaaaagttggcatagcgaaacgaagaattccctcatgcaggatcgcgacgcagccagcgccagagcttggcccaagatgcacactgtgaacggatatgtcaataggacgcttcctggcttgattgggtgtcatcggaaaagtgtctactggcacgtgatcggaatggggacaacaccagaggtccactccatatttctcgaaggccataccttccttgttcgaaaccacagacaggcatccttggggatctctcccattacctttctcactgcccaaacgctccttatggacttgggtcagttccttctcttttgccatatcccgtcacaccagcatgatggtatggaagcttatgtgaaagtcgacagttgtcctgaggagccacagttgcgcatgaagaataatgaagaagccgaggattacgacgacgatctcaccgattctgagatggacgtggtgaggtttgatgacgacaactctccctccatcattcaagctcggagcgtggcgaagaaacaccccaagacttgggtccactatatagcggcggaagaggaggattgggattacgctcctcttgtattggcaccagatgaccgctcatacaaaagccagtacctcaacaacggaccgcagagaattggccggaagtataagaaagtgcgatttatggcctatacagacgaaacctttaagacaagggaggccatccagcatgagagtgggattttgggacctcttctttacggcgaagttggtgataccctcctcatcatcttcaagaatcaagcttctcgcccctataacatttacccacacgggatcactgacgttaggcctttgtatagcagaagacttcccaaaggcgtgaagcatctcaaagacttccccattttgccaggcgagatctttaagtacaaatggaccgtcacagtggaagatggaccgactaaatcagaccctcgatgccttacgcggtactattcctccttcgtgaatatggagagagatttggcaagcggactcataggaccactcctcatctgttacaaggaatctgtagaccagaggggtaaccagattatgagtgataaacgcaatgtgatcctttttagcgtcttcgacgagaaccggtcctggtacttgaccgagaatatacaaaggttccttcccaaccccgcaggcgttcagttggaagaccctgagtttcaggccagcaatattatgcactcaatcaacggctatgtgtttgatagtctccagctttctgtttgcctccatgaagtagcctattggtacatcttgtcaattggtgctcaaacagacttcctctccgtcttcttctccggctacacctttaagcacaagatggtgtatgaggacactctcacactctttccattttctggagaaaccgtgttcatgagcatggagaatccaggcctttggatcttgggttgccacaacagtgattttcgcaatcggggaatgactgctctcctcaaagtcagcagctgtgataagaacacaggcgactattacgaagattcttacgaggacataagtgcctactttgactcgaaaaataacgccattgagcccagatcattctcccagaatcctcccgtgcttaaaaggcatcagcgcgaaatcaccagaactactcttcagtctgatcaagaggagattgactatgacgacaccataagcgtggaaatgaagaaggaggatttcgatatctatgacgaagatgagaaccagtctccgcggagctttcagaagaaaacgcgacactacttcattgcagcagtcgaaaggctttgggactacggtatgtcatcatcccctcatgtgttgcgcaatagagctcagagtggaagtgttccacagttcaagaaagtcgtctttcaagagtttacagatggcagcttcacacagcctctctatcggggcgagcttaacgaacatttgggactccttggtccctatatccgagccgaagtggaggacaacattatggttacctttaggaatcaagcctctcgcccctacagcttctactcctccctcatcagttatgaggaggatcagagacaaggcgctgaaccacggaagaactttgtgaaaccgaatgagacgaagacctacttctggaaagtacagcaccacatggcccccacaaaagacgaattcgattgcaaagcatgggcgtatttttcagacgttgacttggagaaagatgtacattcaggacttattggtcctttgttggtgtgtcacactaacactctcaatccagcccatggcaggcaggtgacagtccaggaattcgctcttttctttaccatctttgatgagaccaagtcctggtacttcacggaaaacatggagcgcaattgcagagccccctgtaacatacagatggaggaccctacctttaaggaaaattatcggttccacgcaatcaacggatacattcgtgatacactccctggccttgtgatggctcaggaccaacgaatcaggtggtacctcctcagcatgggttctaatgagaacatacactccattcacttttcaggacatgtgttcactgtccggaagaaagaagagtataagatggccctctacaatttgtatccaggcgtgtttgagaccgttgaaatgcttccctctaaagctggcatctggagagtagagtgcttgatcggagaacatcttcacgcaggtatgagcaccttgttcctcgtgtacagcaacaaatgtcagaccccacttggcatggccagtggacacattcgcgactttcagatcacagcatctggccagtatggacaatgggccccaaagttggctcgcctccattactccggtagcataaatgcgtggtccactaaagaacctttcagctggattaaggtcgatcttcttgcccccatgatcatccacggcattaagacacagggagcgaggcagaaattctcctccctctacatctcacagttcattattatgtatagtttggacggcaagaagtggcaaacttatagaggtaacagtactggaacagacatggtgttcttcggcaacgttgatagctctggcatcaaacacaacatctttaatcctcccataatagctcggtacatcagattgcatccgacccactacagcattaggagtacactccgaatggagcttatgggttgcgacttgaattcctgttcaatgccactcggaatggagtctaaagccatctctgatgcacagataaccgccagtagctactttacgaacatgtttgctacgtggtcaccctctaaggcaaggcttcatttgcaaggccggtctaatgcctggagacctcaggtgaacaacccgaaagaatggctccaggtggactttcagaagaccatgaaagtaacaggtgtcactactcagggagttaagtccttggatactagcatgtatgtgaaggagttccttatttcctcatcacaagatggccaccagtggaccctcttctttcagaatggtaaggtcaaagtgtttcagggcaatcaagacagcttcacacccgtggtgaacagtcttgatcctccactcttgacacgataccttcgaatccatccacagtcttgggagcaccagattgcattgcgcatggaagtacttggatgcgaggctcaggacctctac

SEQ ID NO: 1224 - protein, 1457 aa, synthetic construct
  REGION 1..1457: note = Variant of human B-domain deleted Factor VIII
MQIELSTCFFLCLLRFCFSATRRYYLGAVELSWDYMQSDLGELPVDARFPPRVPKSFPFNTSQVYKKTLFVEFTDHLFNIAKPRPPWMGLLGPTIQAEVYDTVVITLKNMASHPVSLHAVGVSYWKASEGAEYDDQTSQREKEDDKVFPGGSHTYVWQVLKENGPMASDPPCLTYSYLSHVDLVKDLNSGLIGALLVCREGSLAKEKTQTLHKFILLFAVFDEGKSWHSETKNSLMQDRDAASARAWPKMHTVNGYVNRTLPGLIGCHRKSVYWHVIGMGTTPEVHSIFLEGHTFLVRNHRQASLGISPITFLTAQTLLMDLGQFLLFCHIPSHQHDGMEAYVKVDSCPEEPQLRMKNNEEAEDYDDDLTDSEMDVVRFDDDNSPSIIQARSVAKKHPKTWVHYIAAEEEDWDYAPLVLAPDDRSYKSQYLNNGPQRIGRKYKKVRFMAYTDETFKTREAIQHESGILGPLLYGEVGDTLLIIFKNQASRPYNIYPHGITDVRPLYSRRLPKGVKHLKDFPILPGEIFKYKWTVTVEDGPTKSDPRCLTRYYSSFVNMERDLASGLIGPLLICYKESVDQRGNQIMSDKRNVILFSVFDENRSWYLTENIQRFLPNPAGVQLEDPEFQASNIMHSINGYVFDSLQLSVCLHEVAYWYILSIGAQTDFLSVFFSGYTFKHKMVYEDTLTLFPFSGETVFMSMENPGLWILGCHNSDFRNRGMTALLKVSSCDKNTGDYYEDSYEDISAYFDSKNNAIEPRSFSQNPPVLKRHQREITRTTLQSDQEEIDYDDTISVEMKKEDFDIYDEDENQSPRSFQKKTRHYFIAAVERLWDYGMSSSPHVLRNRAQSGSVPQFKKVVFQEFTDGSFTQPLYRGELNEHLGLLGPYIRAEVEDNIMVTFRNQASRPYSFYSSLISYEEDQRQGAEPRKNFVKPNETKTYFWKVQHHMAPTKDEFDCKAWAYFSDVDLEKDVHSGLIGPLLVCHTNTLNPAHGRQVTVQEFALFFTIFDETKSWYFTENMERNCRAPCNIQMEDPTFKENYRFHAINGYIRDTLPGLVMAQDQRIRWYLLSMGSNENIHSIHFSGHVFTVRKKEEYKMALYNLYPGVFETVEMLPSKAGIWRVECLIGEHLHAGMSTLFLVYSNKCQTPLGMASGHIRDFQITASGQYGQWAPKLARLHYSGSINAWSTKEPFSWIKVDLLAPMIIHGIKTQGARQKFSSLYISQFIIMYSLDGKKWQTYRGNSTGTDMVFFGNVDSSGIKHNIFNPPIIARYIRLHPTHYSIRSTLRMELMGCDLNSCSMPLGMESKAISDAQITASSYFTNMFATWSPSKARLHLQGRSNAWRPQVNNPKEWLQVDFQKTMKVTGVTTQGVKSLDTSMYVKEFLISSSQDGHQWTLFFQNGKVKVFQGNQDSFTPVVNSLDPPLLTRYLRIHPQSWEHQIALRMEVLGCEAQDLY

SEQ ID NO: 1225 - DNA, 4371 bp, synthetic construct
  misc_feature 1..4371: note = Variant of human B-domain deleted Factor VIII
  source 1..4371: mol_type = other DNA
atgcagattgaactgtctacctgcttcttcctctgtttgctgaggttctgctttagcgccactagacggtactaccttggcgctgtggagctgtcctgggactatatgcagagtgatttgggagagcttcccgtcgacgcacgatttcctcctcgcgttccaaagtcatttccctttaacacaagccaggtgtacaagaagacgctcttcgtcgaattcaccgatcacctgttcaatatcgccaaacccagaccaccatggatgggtcttttggggcctaccatacaagcggaggtgtatgacacagttgttatcactctcaagaacatggcttctcatccggtaagtcttcacgcagtgggcgtgtcctactggaaagcttcagaaggagccgagtatgatgatcagacatcccagagggagaaagaagacgacaaggtatttccaggtgggtctcatacctatgtgtggcaagtgctcaaagagaatggccctatggcaagcgatccgccgtgtttgacttacagctacctttcacacgttgacctcgtcaaggacctcaactccgggttgattggagccttgttggtatgcagggaaggatctcttgccaaagagaagacacagaccctccacaagtttatccttctctttgctgtgttcgatgagggcaaaagttggcatagcgaaacgaagaattccctcatgcaggatcgcgacgcagccagcgccagagcttggcccaagatgcacactgtgaacggatatgtcaataggacgcttcctggcttgattgggtgtcatcggaaaagtgtctactggcacgtgatcggaatggggacaacaccagaggtccactccatatttctcgaaggccataccttccttgttcgaaaccacagacaggcatccttggggatctctcccattacctttctcactgcccaaacgctccttatggacttgggtcagttccttctcttttgccatatcccgtcacaccagcatgatggtatggaagcttatgtgaaagtcgacagttgtcctgaggagccacagttgcgcatgaagaataatgaagaagccgaggattacgacgacgatctcaccgattctgagatggacgtggtgaggtttgatgacgacaactctccctccatcattcaagctcggagcgtggcgaagaaacaccccaagacttgggtccactatatagcggcggaagaggaggattgggattacgctcctcttgtattggcaccagatgaccgctcatacaaaagccagtacctcaacaacggaccgcagagaattggccggaagtataagaaagtgcgatttatggcctatacagacgaaacctttaagacaagggaggccatccagcatgagagtgggattttgggacctcttctttacggcgaagttggtgataccctcctcatcatcttcaagaatcaagcttctcgcccctataacatttacccacacgggatcactgacgttaggcctttgtatagcagaagacttcccaaaggcgtgaagcatctcaaagacttccccattttgccaggcgagatctttaagtacaaatggaccgtcacagtggaagatggaccgactaaatcagaccctcgatgccttacgcggtactattcctccttcgtgaatatggagagagatttggcaagcggactcataggaccactcctcatctgttacaaggaatctgtagaccagaggggtaaccagattatgagtgataaacgcaatgtgatcctttttagcgtcttcgacgagaaccggtcctggtacttgaccgagaatatacaaaggttccttcccaaccccgcaggcgttcagttggaagaccctgagtttcaggccagcaatattatgcactcaatcaacggctatgtgtttgatagtctccagctttctgtttgcctccatgaagtagcctattggtacatcttgtcaattggtgctcaaacagacttcctctccgtcttcttctccggctacacctttaagcacaagatggtgtatgaggacactctcacactctttccattttctggagaaaccgtgttcatgagcatggagaatccaggcctttggatcttgggttgccacaacagtgattttcgcaatcggggaatgactgctctcctcaaagtcagcagctgtgataagaacacaggcgactattacgaagattcttacgaggacataagtgactactttgactcgggcgataacgccattgagcccagatcattctcccagaatcctcccgtgcttaaaaggcatcagcgcgaaggtaccagaactactcttcagtctgatcaagaggagattgactatgacgacaccataagcgtggaaatgaagaaggaggatttcgatatctatgacgaagatgagaacttctctccgcggagctttcagaaggtcacgcgacactacttcattgcagcagtcgaaaggctttgggactacggtatgtcatcatcccctcatgtgttgcgcaatagagctcagagtggaagtgttccacagttcaagaaagtcgtctttcaagagtttacagatggcagcttcacacagcctctctatcggggcgagcttaacgaacatttgggactccttggtccctatatccgagccgaagtggaggacaacattatggttacctttaggaatcaagcctctcgcccctacagcttctactcctccctcatcagttatgaggaggatcagagaatgggcgctgaaccacggaagaactttgtgaaaccgaatgagacgaagacctacttctggaaagtacagcaccacatggcccccacaaaagacgaattcgattgcaaagcatgggcgtatttttcagacgttgacttggagaaagatgtacattcaggacttattggtcctttgttggtgtgtcacactaacactctcaatccagcccatggcaggcaggtgacagtccaggaattcgctcttttctttaccatctttgatgagaccaagtcctggtacttcacggaaaacatggagcgcaattgcagagccccctgtaacatacagatggaggaccctacctttaaggaaaattatcggttccacgcaatcaacggatacattcgtgatacactccctggccttgtgatggctcaggaccaacgaatcaggtggtacctcctcagcatgggttctaatgagaacatacactccattcacttttcaggacatgtgttcactgtccggaagaaagaagagtataagatggccctctacaatttgtatccaggcgtgtttgagaccgttgaaatgcttccctctaaagctggcatctggagagtagagtgcttgatcggagaacatcttcacgcaggtatgagcaccttgttcctcgtgtacagcaacaaatgtcagaccccacttggcatggccagtggacacattcgcgactttcagatcacagcatctggccagtatggacaatgggccccaaagttggctcgcctccattactccggtagcataaatgcgtggtccactaaagaacctttcagctggattaaggtcgatcttcttgcccccatgatcatccacggcattaagacacagggagcgaggcagaaattctcctccctctacatctcacagttcattattatgtatagtttggacggcaagaagtggcaaacttatagaggtaacagtactggaacagacatggtgttcttcggcaacgttgatagctctggcatcaaacacaacatctttaatcctcccataatagctcggtacatcagattgcatccgacccactacagcattaggagtacactccgaatggagcttatgggttgcgacttgaattcctgttcaatgccactcggaatggagtctaaagccatctctgatgcacagataaccgccagtagctactttacgaacatgtttgctacgtggtcaccctctaaggcaaggcttcatttgcaaggccggtctaatgcctggagacctcaggtgaacaacccgaaagaatggctccaggtggactttcagaagaccatgaaagtaacaggtgtcactactcagggagttaagtccttggatactagcatgtatgtgaaggagttccttatttcctcatcacaagatggccaccagtggaccctcttctttcagaatggtaaggtcaaagtgtttcagggcaatcaagacagcttcacacccgtggtgaacagtcttgatcctccactcttgacacgataccttcgaatccatccacagtcttgggagcaccagattgcattgcgcatggaagtacttggatgcgaggctcaggacctctac

SEQ ID NO: 1226 - protein, 1457 aa, synthetic construct
  REGION 1..1457: note = Variant of human B-domain deleted Factor VIII
MQIELSTCFFLCLLRFCFSATRRYYLGAVELSWDYMQSDLGELPVDARFPPRVPKSFPFNTSQVYKKTLFVEFTDHLFNIAKPRPPWMGLLGPTIQAEVYDTVVITLKNMASHPVSLHAVGVSYWKASEGAEYDDQTSQREKEDDKVFPGGSHTYVWQVLKENGPMASDPPCLTYSYLSHVDLVKDLNSGLIGALLVCREGSLAKEKTQTLHKFILLFAVFDEGKSWHSETKNSLMQDRDAASARAWPKMHTVNGYVNRTLPGLIGCHRKSVYWHVIGMGTTPEVHSIFLEGHTFLVRNHRQASLGISPITFLTAQTLLMDLGQFLLFCHIPSHQHDGMEAYVKVDSCPEEPQLRMKNNEEAEDYDDDLTDSEMDVVRFDDDNSPSIIQARSVAKKHPKTWVHYIAAEEEDWDYAPLVLAPDDRSYKSQYLNNGPQRIGRKYKKVRFMAYTDETFKTREAIQHESGILGPLLYGEVGDTLLIIFKNQASRPYNIYPHGITDVRPLYSRRLPKGVKHLKDFPILPGEIFKYKWTVTVEDGPTKSDPRCLTRYYSSFVNMERDLASGLIGPLLICYKESVDQRGNQIMSDKRNVILFSVFDENRSWYLTENIQRFLPNPAGVQLEDPEFQASNIMHSINGYVFDSLQLSVCLHEVAYWYILSIGAQTDFLSVFFSGYTFKHKMVYEDTLTLFPFSGETVFMSMENPGLWILGCHNSDFRNRGMTALLKVSSCDKNTGDYYEDSYEDISDYFDSGDNAIEPRSFSQNPPVLKRHQREGTRTTLQSDQEEIDYDDTISVEMKKEDFDIYDEDENFSPRSFQKVTRHYFIAAVERLWDYGMSSSPHVLRNRAQSGSVPQFKKVVFQEFTDGSFTQPLYRGELNEHLGLLGPYIRAEVEDNIMVTFRNQASRPYSFYSSLISYEEDQRMGAEPRKNFVKPNETKTYFWKVQHHMAPTKDEFDCKAWAYFSDVDLEKDVHSGLIGPLLVCHTNTLNPAHGRQVTVQEFALFFTIFDETKSWYFTENMERNCRAPCNIQMEDPTFKENYRFHAINGYIRDTLPGLVMAQDQRIRWYLLSMGSNENIHSIHFSGHVFTVRKKEEYKMALYNLYPGVFETVEMLPSKAGIWRVECLIGEHLHAGMSTLFLVYSNKCQTPLGMASGHIRDFQITASGQYGQWAPKLARLHYSGSINAWSTKEPFSWIKVDLLAPMIIHGIKTQGARQKFSSLYISQFIIMYSLDGKKWQTYRGNSTGTDMVFFGNVDSSGIKHNIFNPPIIARYIRLHPTHYSIRSTLRMELMGCDLNSCSMPLGMESKAISDAQITASSYFTNMFATWSPSKARLHLQGRSNAWRPQVNNPKEWLQVDFQKTMKVTGVTTQGVKSLDTSMYVKEFLISSSQDGHQWTLFFQNGKVKVFQGNQDSFTPVVNSLDPPLLTRYLRIHPQSWEHQIALRMEVLGCEAQDLY

SEQ ID NO: 1227 - DNA, 4371 bp, synthetic construct
  misc_feature 1..4371: note = Variant of human B-domain deleted Factor VIII
  source 1..4371: mol_type = other DNA
atgcagattgaactgtctacctgcttcttcctctgtttgctgaggttctgctttagcgccactagacggtactaccttggcgctgtggagctgtcctgggactatatgcagagtgatttgggagagcttcccgtcgacgcacgatttcctcctcgcgttccaaagtcatttccctttaacacaagcgtggtgtacaagaagacgctcttcgtcgaattcaccgatcacctgttcaatatcgccaaacccagaccaccatggatgggtcttttggggcctaccatacaagcggaggtgtatgacacagttgttatcactctcaagaacatggcttctcatccggtaagtcttcacgcagtgggcgtgtcctactggaaagcttcagaaggagccgagtatgatgatcagacatcccagagggagaaagaagacgacaaggtatttccaggtgggtctcatacctatgtgtggcaagtgctcaaagagaatggccctatggcaagcgatccgccgtgtttgacttacagctacctttcacacgttgacctcgtcaaggacctcaactccgggttgattggagccttgttggtatgcagggaaggatctcttgccaaagagaagacacagaccctccacaagtttatccttctctttgctgtgttcgatgagggcaaaagttggcatagcgaaacgaagaattccctcatgcaggatcgcgacgcagccagcgccagagcttggcccaagatgcacactgtgaacggatatgtcaataggacgcttcctggcttgattgggtgtcatcggaaaagtgtctactggcacgtgatcggaatggggacaacaccagaggtccactccatatttctcgaaggccataccttccttgttcgaaaccacagacaggcatccttggggatctctcccattacctttctcactgcccaaacgctccttatggacttgggtcagttccttctcttttgccatatcccgtcacaccagcatgatggtatggaagcttatgtgaaagtcgacagttgtcctgaggagccacagttgcgcatgaagaataatgaagaagccgaggattacgacgacgatctcaccgattctgagatggacgtggtgaggtttgatgacgacaactctccctccatcattcaagctcggagcggggcgaagaaacaccccaagacttgggtccactatatagcggcggaagaggaggattgggattacgctcctcttgtattggcaccagatgaccgctcatacaaaagccagtacctcaacaacggaccgcagagaattggccggaagtataagaaagtgcgatttatggcctatacagacgaaacctttaagacaagggaggccatccagcatgagagtgggattttgggacctcttctttacggcgaagttggtgataccctcctcatcatcttcaagaatcaagcttctcgcccctataacatttacccacacgggatcactgacgttaggcctttgtatagcagaagacttcccaaaggcgtgaagcatctcaaagacttccccattttgccaggcgagatctttaagtacaaatggaccgtcacagtggaagatggaccgactaaatcagaccctcgatgccttacgcggtactattcctccttcgtgaatatggagagagatttggcaagcggactcataggaccactcctcatctgttacaaggaatctgtagaccagaggggtaaccagattatgagtgataaacgcaatgtgatcctttttagcgtcttcgacgagaaccggtcctggtacttgaccgagaatatacaaaggttccttcccaaccccgcaggcgttcagttggaagaccctgagtttcaggccagcaatattatgcactcaatcaacggctatgtgtttgatagtctccagctttctgtttgcctccatgaagtagcctattggtacatcttgtcaattggtgctcaaacagacttcctctccgtcttcttctccggctacacctttaagcacaagatggtgtatgaggacactctcacactctttccattttctggagaaaccgtgttcatgagcatggagaatccaggcctttggatcttgggttgccacaacagtgattttcgcaatcggggaatgactgctctcctcaaagtcagcagctgtgataagaacacaggcgactattacgaagattcttacgaggacataagtgcctactttgactcgggcaataacgccattgagcccagatcattctcccagaatcctcccgtgcttaaaaggcatcagcgcgaaatcaccagaactactcttcagtctgatcaagaggagtgggactatgacgacaccataagcgtggaaatgaagaaggaggatttcgatatctatgacgaagatgagaaccagtctccgcggagctttcagaagaaaacgcgacactacttcattgcagcagtcgaaaggctttgggactacggtatgtcatcatcccctcatgtgttgcgcaatagagctcagagtggaagtgttccacagttcaagaaagtcgtctttcaagagtttacagatggcagcttcacacagcctctctatcggggcgagcttaacgaacatttgggactccttggtccctatatccgagccgaagtggaggacaacattatggttacctttaggaatcaagcctctcgcccctacagcttctactcctccctcatcagttatgaggaggatcagagacaaggcgctgaaccacggaagaactttgtgaaaccgaatgagacgaagacctacttctggaaagtacagcaccacatggcccccacaaaagacgaattcgattgcaaagcatgggcgtatttttcagacgttgacttggagaaagatgtacattcaggacttattggtcctttgttggtgtgtcacactaacactctcaatccagcccatggcaggcaggtgacagtccaggaattcgctcttttctttaccatctttgatgagaccaagtcctggtacttcacggaaaacatggagcgcaattgcagagccccctgtaacatacagatggaggaccctacctttaaggaaaattatcggttccacgcaatcaacggatacattatggatacactccctggccttgtgatggctcaggaccaacgaatcaggtggtacctcctcagcatgggttctaatgagaacatacactccattcacttttcaggacatgtgttcactgtccggaagaaagaagagtataagatggccctctacaatttgtatccaggcgtgtttgagaccgttgaaatgcttccctctaaagctggcatctggagagtagagtgcttgatcggagaacatcttcacgcaggtatgagcaccttgttcctcgtgtacagcaacaaatgtcagactccacttggcatggccagtggacacattcgcgactttcagatcacagcatctggccagtatggacaatgggccccaaagttggctcgcctccattactccggtagcataaatgcgtggtccactaaagaacctttcagctggattaaggtcgatcttcttgcccccatgatcatccacggcattaagacacagggagcgaggcagaaattctcctccctctacatctcacagttcattattatgtatagtttggacggcaagaagtggcaaacttatagaggtaacagtactggaacagacatggtgttcttcggcaacgttgatagctctggcatcaaacacaacatctttaatcctcccataatagctcggtacatcagattgcatccgacccactacagcattaggagtacactccgaatggagcttatgggttgcgacttgaattcctgttcaatgccactcggaatggagtctaaagccatctctgatgcacagataaccgccagtagctactttacgaacatgtttgctacgtggtcaccctctaaggcaaggcttcatttgcaaggccggtctaatgcctggagacctcaggtgaacaacccgaaagaatggctccaggtggactttcagaagaccatgaaagtaacaggtgtcactactcagggagttaagtccttggatactagcatgtatgtgaaggagttccttatttcctcatcacaagatggccaccagtggaccctcttctttcagaatggtaaggtcaaagtgtttcagggcaatcaagacagcttcacacccgtggtgaacagtcttgatcctccactcttgacacgataccttcgaatccatccacagtcttgggagcaccagattgcattgcgcatggaagtacttggatgcgaggctcaggacctctac

SEQ ID NO: 1228 - protein, 1457 aa, synthetic construct
  REGION 1..1457: note = Variant of human B-domain deleted Factor VIII
MQIELSTCFFLCLLRFCFSATRRYYLGAVELSWDYMQSDLGELPVDARFPPRVPKSFPFNTSVVYKKTLFVEFTDHLFNIAKPRPPWMGLLGPTIQAEVYDTVVITLKNMASHPVSLHAVGVSYWKASEGAEYDDQTSQREKEDDKVFPGGSHTYVWQVLKENGPMASDPPCLTYSYLSHVDLVKDLNSGLIGALLVCREGSLAKEKTQTLHKFILLFAVFDEGKSWHSETKNSLMQDRDAASARAWPKMHTVNGYVNRTLPGLIGCHRKSVYWHVIGMGTTPEVHSIFLEGHTFLVRNHRQASLGISPITFLTAQTLLMDLGQFLLFCHIPSHQHDGMEAYVKVDSCPEEPQLRMKNNEEAEDYDDDLTDSEMDVVRFDDDNSPSIIQARSGAKKHPKTWVHYIAAEEEDWDYAPLVLAPDDRSYKSQYLNNGPQRIGRKYKKVRFMAYTDETFKTREAIQHESGILGPLLYGEVGDTLLIIFKNQASRPYNIYPHGITDVRPLYSRRLPKGVKHLKDFPILPGEIFKYKWTVTVEDGPTKSDPRCLTRYYSSFVNMERDLASGLIGPLLICYKESVDQRGNQIMSDKRNVILFSVFDENRSWYLTENIQRFLPNPAGVQLEDPEFQASNIMHSINGYVFDSLQLSVCLHEVAYWYILSIGAQTDFLSVFFSGYTFKHKMVYEDTLTLFPFSGETVFMSMENPGLWILGCHNSDFRNRGMTALLKVSSCDKNTGDYYEDSYEDISAYFDSGNNAIEPRSFSQNPPVLKRHQREITRTTLQSDQEEWDYDDTISVEMKKEDFDIYDEDENQSPRSFQKKTRHYFIAAVERLWDYGMSSSPHVLRNRAQSGSVPQFKKVVFQEFTDGSFTQPLYRGELNEHLGLLGPYIRAEVEDNIMVTFRNQASRPYSFYSSLISYEEDQRQGAEPRKNFVKPNETKTYFWKVQHHMAPTKDEFDCKAWAYFSDVDLEKDVHSGLIGPLLVCHTNTLNPAHGRQVTVQEFALFFTIFDETKSWYFTENMERNCRAPCNIQMEDPTFKENYRFHAINGYIMDTLPGLVMAQDQRIRWYLLSMGSNENIHSIHFSGHVFTVRKKEEYKMALYNLYPGVFETVEMLPSKAGIWRVECLIGEHLHAGMSTLFLVYSNKCQTPLGMASGHIRDFQITASGQYGQWAPKLARLHYSGSINAWSTKEPFSWIKVDLLAPMIIHGIKTQGARQKFSSLYISQFIIMYSLDGKKWQTYRGNSTGTDMVFFGNVDSSGIKHNIFNPPIIARYIRLHPTHYSIRSTLRMELMGCDLNSCSMPLGMESKAISDAQITASSYFTNMFATWSPSKARLHLQGRSNAWRPQVNNPKEWLQVDFQKTMKVTGVTTQGVKSLDTSMYVKEFLISSSQDGHQWTLFFQNGKVKVFQGNQDSFTPVVNSLDPPLLTRYLRIHPQSWEHQIALRMEVLGCEAQDLY

SEQ ID NO: 1229 - DNA, 4371 bp, synthetic construct
  misc_feature 1..4371: note = Variant of human B-domain deleted Factor VIII
  source 1..4371: mol_type = other DNA
atgcagattgaactgtctacctgcttcttcctctgtttgctgaggttctgctttagcgccactagacggtactaccttggcgctgtggagctgtcctgggactatatgcagagtgatttgggagagcttcccgtcgacgcacgatttcctcctcgcgttccaaagtcatttccctttaacacaagcgtggtgtacaagaagacgctcttcgtcgaattcaccgatcacctgttcaatatcgccaaacccagaccaccatggatgggtcttttggggcctaccatacaagcggaggtgtatgacacagttgttatcactctcaagaacatggcttctcatccggtaagtcttcacgcagtgggcgtgtcctactggaaagcttcagaaggagccgagtatgatgatcagacatcccagagggagaaagaagacgacaaggtatttccaggtgggtctcatacctatgtgtggcaagtgctcaaagagaatggccctatggcaagcgatccgccgtgtttgacttacagctacctttcacacgttgacctcgtcaaggacctcaactccgggttgattggagccttgttggtatgcagggaaggatctcttgccaaagagaagacacagaccctccacaagtttatccttctctttgctgtgttcgatgagggcaaaagttggcatagcgaaacgaagaattccctcatgcaggatcgcgacgcagccagcgccagagcttggcccaagatgcacactgtgaacggatatgtcaataggacgcttcctggcttgattgggtgtcatcggaaaagtgtctactggcacgtgatcggaatggggacaacaccagaggtccactccatatttctcgaaggccataccttccttgttcgaaaccacagacaggcatccttggggatctctcccattacctttctcactgcccaaacgctccttatggacttgggtcagttccttctcttttgccatatcccgtcacaccagcatgatggtatggaagcttatgtgaaagtcgacagttgtcctgaggagccacagttgcgcatgaagaataatgaagaagccgaggattacgacgacgatctcaccgattctgagatggacgtggtgaggtttgatgacgacaactctccctccatcattcaagctcggagcgtggcgaagaaacaccccaagacttgggtccactatatagcggcggaagaggaggattgggattacgctcctcttgtattggcaccagatgaccgctcatacaaaagccagtacctcaacaacggaccgcagagaattggccggaagtataagaaagtgcgatttatggcctatacagacgaaacctttaagacaagggaggccatccagcatgagagtgggattttgggacctcttctttacggcgaagttggtgataccctcctcatcatcttcaagaatcaagcttctcgcccctataacatttacccacacgggatcactgacgttaggcctttgtatagcagaagacttcccaaaggcgtgaagcatctcaaagacttccccattttgccaggcgagatctttaagtacaaatggaccgtcacagtggaagatggaccgactaaatcagaccctcgatgccttacgcggtactattcctccttcgtgaatatggagagagatttggcaagcggactcataggaccactcctcatctgttacaaggaatctgtagaccagaggggtaaccagattatgagtgataaacgcaatgtgatcctttttagcgtcttcgacgagaaccggtcctggtacttgaccgagaatatacaaaggttccttcccaaccccgcaggcgttcagttggaagaccctgagtttcaggccagcaatattatgcactcaatcaacggctatgtgtttgatagtctccagctttctgtttgcctccatgaagtagcctattggtacatcttgtcaattggtgctcaaacagacttcctctccgtcttcttctccggctacacctttaagcacaagatggtgtatgaggacactctcacactctttccattttctggagaaaccgtgttcatgagcatggagaatccaggcctttggatcttgggttgccacaacagtgattttcgcaatcggggaatgactgctctcctcaaagtcagcagctgtgataagaacacaggcgactattacgaagattcttacgaggacataagtgcctactttgactacaaaaataacgccattgagcccagatcattctcccagaatcctcccgtgcttaaaaggcatcagcgcgaaatcaccagaactactcttcagtctgatcaagaggagattgactatgacgacaccataagcgtggaaatgaagaaggaggatttcgatatctatgacgaagatgagaaccagtctccgcggagctttcagaagaagacgcgacactacttcattgcagcagtcgaaaggctttgggactacggtatgtcatcatcccctcatgtgttgcgcaatagagctcagagtggaagtgttccacagttcaagaaagtcgtctttcaagagtttacagatggcagcttcacacagcctctctatcggggcgagcttaacgaacatttgggactccttggtccctatatccgagccgaagtggaggacaacattatggttacctttaggaatcaagcctctcgcccctacagcttctactcctccctcatcagttatgaggaggatcagagacaaggcgctgaaccacggaagaactttgtgaaaccgaatgagacgaagacctacttctggaaagtacagcaccacatggcccccacaaaagacgaattcgattgcaaagcatgggcgtatttttcagacgttgacttggagaaagatgtacattcaggacttattggtcctttgttggtgtgtcacactaacactctcaatccagcccatggcaggcaggtgacagtccaggaattcgctcttttctttaccatctttgatgagaccaagtcctggtacttcacggaaaacatggagcgcaattgcagagccccctgtaacatacagatggaggaccctacctttaaggaaaattatcggttccacgcaatcaacggatacattatggatacactccctggccttgtgatggctcaggaccaacgaatcaggtggtacctcctcagcatgggttctaatgagaacatacactccattcacttttcaggacatgtgttcactgtccggaagaaagaagagtataagatggccctctacaatttgtatccaggcgtgtttgagaccgttgaaatgcttccctctaaagctggcatctggagagtagagtgcttgatcggagaacatcttcacgcaggtatgagcaccttgttcctcgtgtacagcaacaaatgtcagaccccacttggcatggccagtggacacattcgcgactttcagatcacagcatctggccagtatggacaatgggccccaaagttggctcgcctccattactccggtagcataaatgcgtggtccactaaagaacctttcagctggattaaggtcgatcttcttgcccccatgatcatccacggcattaagacacagggagcgaggcagaaattctcctccctctacatctcacagttcattattatgtatagtttggacggcaagaagtggcaaacttatagaggtaacagtactggaacagacatggtgttcttcggcaacgttgatagctctggcatcaaacacaacatctttaatcctcccataatagctcggtacatcagattgcatccgacccactacagcattaggagtacactccgaatggagcttatgggttgcgacttgaattcctgttcaatgccactcggaatggagtctaaagccatctctgatgcacagataaccgccagtagctactttacgaacatgtttgctacgtggtcaccctctaaggcaaggcttcatttgcaaggccggtctaatgcctggagacctcaggtgaacaacccgaaagaatggctccaggtggactttcagaagaccatgaaagtaacaggtgtcactactcagggagttaagtccttggatactagcatgtatgtgaaggagttccttatttcctcatcacaagatggccaccagtggaccctcttctttcagaatggtaaggtcaaagtgtttcagggcaatcaagacagcttcacacccgtggtgaacagtcttgatcctccactcttgacacgataccttcgaatccatccacagtcttgggagcaccagattgcattgcgcatggaagtacttggatgcgaggctcaggacctctac

SEQ ID NO: 1230 - protein, 1457 aa, synthetic construct
  REGION 1..1457: note = Variant of human B-domain deleted Factor VIII
MQIELSTCFFLCLLRFCFSATRRYYLGAVELSWDYMQSDLGELPVDARFPPRVPKSFPFNTSVVYKKTLFVEFTDHLFNIAKPRPPWMGLLGPTIQAEVYDTVVITLKNMASHPVSLHAVGVSYWKASEGAEYDDQTSQREKEDDKVFPGGSHTYVWQVLKENGPMASDPPCLTYSYLSHVDLVKDLNSGLIGALLVCREGSLAKEKTQTLHKFILLFAVFDEGKSWHSETKNSLMQDRDAASARAWPKMHTVNGYVNRTLPGLIGCHRKSVYWHVIGMGTTPEVHSIFLEGHTFLVRNHRQASLGISPITFLTAQTLLMDLGQFLLFCHIPSHQHDGMEAYVKVDSCPEEPQLRMKNNEEAEDYDDDLTDSEMDVVRFDDDNSPSIIQARSVAKKHPKTWVHYIAAEEEDWDYAPLVLAPDDRSYKSQYLNNGPQRIGRKYKKVRFMAYTDETFKTREAIQHESGILGPLLYGEVGDTLLIIFKNQASRPYNIYPHGITDVRPLYSRRLPKGVKHLKDFPILPGEIFKYKWTVTVEDGPTKSDPRCLTRYYSSFVNMERDLASGLIGPLLICYKESVDQRGNQIMSDKRNVILFSVFDENRSWYLTENIQRFLPNPAGVQLEDPEFQASNIMHSINGYVFDSLQLSVCLHEVAYWYILSIGAQTDFLSVFFSGYTFKHKMVYEDTLTLFPFSGETVFMSMENPGLWILGCHNSDFRNRGMTALLKVSSCDKNTGDYYEDSYEDISAYFDYKNNAIEPRSFSQNPPVLKRHQREITRTTLQSDQEEIDYDDTISVEMKKEDFDIYDEDENQSPRSFQKKTRHYFIAAVERLWDYGMSSSPHVLRNRAQSGSVPQFKKVVFQEFTDGSFTQPLYRGELNEHLGLLGPYIRAEVEDNIMVTFRNQASRPYSFYSSLISYEEDQRQGAEPRKNFVKPNETKTYFWKVQHHMAPTKDEFDCKAWAYFSDVDLEKDVHSGLIGPLLVCHTNTLNPAHGRQVTVQEFALFFTIFDETKSWYFTENMERNCRAPCNIQMEDPTFKENYRFHAINGYIMDTLPGLVMAQDQRIRWYLLSMGSNENIHSIHFSGHVFTVRKKEEYKMALYNLYPGVFETVEMLPSKAGIWRVECLIGEHLHAGMSTLFLVYSNKCQTPLGMASGHIRDFQITASGQYGQWAPKLARLHYSGSINAWSTKEPFSWIKVDLLAPMIIHGIKTQGARQKFSSLYISQFIIMYSLDGKKWQTYRGNSTGTDMVFFGNVDSSGIKHNIFNPPIIARYIRLHPTHYSIRSTLRMELMGCDLNSCSMPLGMESKAISDAQITASSYFTNMFATWSPSKARLHLQGRSNAWRPQVNNPKEWLQVDFQKTMKVTGVTTQGVKSLDTSMYVKEFLISSSQDGHQWTLFFQNGKVKVFQGNQDSFTPVVNSLDPPLLTRYLRIHPQSWEHQIALRMEVLGCEAQDLY

SEQ ID NO: 1231 - DNA, 4371 bp, synthetic construct
  misc_feature 1..4371: note = Variant of human B-domain deleted Factor VIII
  source 1..4371: mol_type = other DNA
atgcagattgaactgtctacctgcttcttcctctgtttgctgaggttctgctttagcgccactagacggtactaccttggcgctgtggagctgtcctgggactatatgcagagtgatttgggagagcttcccgtcgacgcacgatttcctcctcgcgttccaaagtcatttccctttaacacaagccaggtgtacaagaagacgctcttcgtcgaattcaccgatcacctgttcaatatcgccaaacccagaccaccatggatgggtcttttggggcctaccatacaagcggaggtgtatgacacagttgttatcactctcaagaacatggcttctcatccggtaagtcttcacgcagtgggcgtgtcctactggaaagcttcagaaggagccgagtatgatgatcagacatcccagagggagaaagaagacgacaaggtatttccaggtgggtctcatacctatgtgtggcaagtgctcaaagagaatggccctatggcaagcgatccgccgtgtttgacttacagctacctttcacacgttgacctcgtcaaggacctcaactccgggttgattggagccttgttggtatgcagggaaggatctcttgccaaagagaagacacagaccctccacaagtttatccttctctttgctgtgttcgatgagggcaaaagttggcatagcgaaacgaagaattccctcatgcaggatcgcgacgcagccagcgccagagcttggcccaagatgcacactgtgaacggatatgtcaataggacgcttcctggcttgattgggtgtcatcggaaaagtgtctactggcacgtgatcggaatggggacaacaccagaggtccactccatatttctcgaaggccataccttccttgttcgaaaccacagacaggcatccttggggatctctcccattacctttctcactgcccaaacgctccttatggacttgggtcagttccttctcttttgccatatcccgtcacaccagcatgatggtatggaagcttatgtgaaagtcgacagttgtcctgaggagccacagttgcgcatgaagaataatgaagaagccgaggattacgacgacgatctcaccgattctgagatggacgtggtgaggtttgatgacgacaactctccctccatcattcaagctcggagcgtggcgaagaaacaccccaagacttgggtccactatatagcggcggaagaggaggattgggattacgctcctcttgtattggcaccagatgaccgctcatacaaaagccagtacctcaacaacggaccgcagagaattggccggaagtataagaaagtgcgatttatggcctatacagacgaaacctttaagacaagggaggccatccagcatgagagtgggattttgggacctcttctttacggcgaagttggtgataccctcctcatcatcttcaagaatcaagcttctcgcccctataacatttacccacacgggatcactgacgttaggcctttgtatagcagaagacttcccaaaggcgtgaagcatctcaaagacttccccattttgccaggcgagatctttaagtacaaatggaccgtcacagtggaagatggaccgactaaatcagaccctcgatgccttacgcggtactattcctccttcgtgaatatggagagagatttggcaagcggactcataggaccactcctcatctgttacaaggaatctgtagaccagaggggtaaccagattatgagtgataaacgcaatgtgatcctttttagcgtcttcgacgagaaccggtcctggtacttgaccgagaatatacaaaggttccttcccaaccccgcaggcgttcagttggaagaccctgagtttcaggccagcaatattatgcactcaatcaacggctatgtgtttgatagtctccagctttctgtttgcctccatgaagtagcctattggtacatcttgtcaattggtgctcaaacagacttcctctccgtcttcttctccggctacacctttaagcacaagatggtgtatgaggacactctcacactctttccattttctggagaaaccgtgttcatgagcatggagaatccaggcctttggatcttgggttgccacaacagtgattttcgcaatcggggaatgactgctctcctcaaagtcagcagctgtgataagaacacaggcgactattacgaagattcttacgaggacataagtgcctactttgactccaagaataacgccattgagcccagatcattctcccagaatcctcccgtgcttaaaaggcatcagcgcgaaatcaccagaactactcttcagtctgatcaagaggagattgactatgacgacaccataagcgtggaaatgaagaaggaggatttcgatatctatgacgaagatgagaaccagtctccgcggagctttcagaagaagacgcgacactacttcattgcagcagtcgaaaggctttgggactacggtatgtcatcatcccctcatgtgttgcgcaatagagctcagagtggaagtgttccacagttcaagaaagtcgtctttcaagagtttacagatggcagcttcacacagcctctctatcggggcgagcttaacgaacatttgggactccttggtccctatatccgagccgaagtggaggacaacattatggttacctttaggaatcaagcctctcgcccctacagcttctactcctccctcatcagttatgaggaggatcagagacaaggcgctgaaccacggaagaactttgtgaaaccgaatgagacgaagacctacttctggaaagtacagcaccacatggcccccacaaaagacgaattcgattgcaaagcatgggcgtatttttcagacgttgacttggagaaagatgtacattcaggacttattggtcctttgttggtgtgtcacactaacactctcaatccagcccatggcaggcaggtgacagtccaggaattcgctcttttctttaccatctttgatgagaccaagtcctggtacttcacggaaaacatggagcgcaattgcagagccccctgtaacatacagatggaggaccctacctttaaggaaaattatcggttccacgcaatcaacggatacattatggatacactccctggccttgtgatggctcaggaccaacgaatcaggtggtacctcctcagcatgggttctaatgagaacatacactccattcacttttcaggacatgtgttcactgtccggaagaaagaagagtataagatggccctctacaatttgtatccaggcgtgtttgagaccgttgaaatgcttccctctaaagctggcatctggagagtagagtgcttgatcggagaacatcttcacgcaggtatgagcaccttgttcctcgtgtacagcaacaaatgtcagaatccacttggcatggccagtggacacattcgcgactttcagatcacagcatctggccagtatggacaatgggccccaaagttggctcgcctccattactccggtagcataaatgcgtggtccactaaagaacctttcagctggattaaggtcgatcttcttgcccccatgatcatccacggcattaagacacagggagcgaggcagaaattctcctccctctacatctcacagttcattattatgtatagtttggacggcaagaagtggcaaacttatagaggtaacagtactggaacagacatggtgttcttcggcaacgttgatagctctggcatcaaacacaacatctttaatcctcccataatagctcggtacatcagattgcatccgacccactacagcattaggagtacactccgaatggagcttatgggttgcgacttgaattcctgttcaatgccactcggaatggagtctaaagccatctctgatgcacagataaccgccagtagctactttacgaacatgtttgctacgtggtcaccctctaaggcaaggcttcatttgcaaggccggtctaatgcctggagacctcaggtgaacaacccgaaagaatggctccaggtggactttcagaagaccatgaaagtaacaggtgtcactactcagggagttaagtccttggatactagcatgtatgtgaaggagttccttatttcctcatcacaagatggccaccagtggaccctcttctttcagaatggtaaggtcaaagtgtttcagggcaatcaagacagcttcacacccgtggtgaacagtcttgatcctccactcttgacacgataccttcgaatccatccacagtcttgggagcaccagattgcattgcgcatggaagtacttggatgcgaggctcaggacctctac

SEQ ID NO: 1232 - protein, 1457 aa, synthetic construct
  REGION 1..1457: note = Variant of human B-domain deleted Factor VIII
MQIELSTCFFLCLLRFCFSATRRYYLGAVELSWDYMQSDLGELPVDARFPPRVPKSFPFNTSQVYKKTLFVEFTDHLFNIAKPRPPWMGLLGPTIQAEVYDTVVITLKNMASHPVSLHAVGVSYWKASEGAEYDDQTSQREKEDDKVFPGGSHTYVWQVLKENGPMASDPPCLTYSYLSHVDLVKDLNSGLIGALLVCREGSLAKEKTQTLHKFILLFAVFDEGKSWHSETKNSLMQDRDAASARAWPKMHTVNGYVNRTLPGLIGCHRKSVYWHVIGMGTTPEVHSIFLEGHTFLVRNHRQASLGISPITFLTAQTLLMDLGQFLLFCHIPSHQHDGMEAYVKVDSCPEEPQLRMKNNEEAEDYDDDLTDSEMDVVRFDDDNSPSIIQARSVAKKHPKTWVHYIAAEEEDWDYAPLVLAPDDRSYKSQYLNNGPQRIGRKYKKVRFMAYTDETFKTREAIQHESGILGPLLYGEVGDTLLIIFKNQASRPYNIYPHGITDVRPLYSRRLPKGVKHLKDFPILPGEIFKYKWTVTVEDGPTKSDPRCLTRYYSSFVNMERDLASGLIGPLLICYKESVDQRGNQIMSDKRNVILFSVFDENRSWYLTENIQRFLPNPAGVQLEDPEFQASNIMHSINGYVFDSLQLSVCLHEVAYWYILSIGAQTDFLSVFFSGYTFKHKMVYEDTLTLFPFSGETVFMSMENPGLWILGCHNSDFRNRGMTALLKVSSCDKNTGDYYEDSYEDISAYFDSKNNAIEPRSFSQNPPVLKRHQREITRTTLQSDQEEIDYDDTISVEMKKEDFDIYDEDENQSPRSFQKKTRHYFIAAVERLWDYGMSSSPHVLRNRAQSGSVPQFKKVVFQEFTDGSFTQPLYRGELNEHLGLLGPYIRAEVEDNIMVTFRNQASRPYSFYSSLISYEEDQRQGAEPRKNFVKPNETKTYFWKVQHHMAPTKDEFDCKAWAYFSDVDLEKDVHSGLIGPLLVCHTNTLNPAHGRQVTVQEFALFFTIFDETKSWYFTENMERNCRAPCNIQMEDPTFKENYRFHAINGYIMDTLPGLVMAQDQRIRWYLLSMGSNENIHSIHFSGHVFTVRKKEEYKMALYNLYPGVFETVEMLPSKAGIWRVECLIGEHLHAGMSTLFLVYSNKCQNPLGMASGHIRDFQITASGQYGQWAPKLARLHYSGSINAWSTKEPFSWIKVDLLAPMIIHGIKTQGARQKFSSLYISQFIIMYSLDGKKWQTYRGNSTGTDMVFFGNVDSSGIKHNIFNPPIIARYIRLHPTHYSIRSTLRMELMGCDLNSCSMPLGMESKAISDAQITASSYFTNMFATWSPSKARLHLQGRSNAWRPQVNNPKEWLQVDFQKTMKVTGVTTQGVKSLDTSMYVKEFLISSSQDGHQWTLFFQNGKVKVFQGNQDSFTPVVNSLDPPLLTRYLRIHPQSWEHQIALRMEVLGCEAQDLY

SEQ ID NO: 1233 - DNA, 4371 bp, synthetic construct
  misc_feature 1..4371: note = Variant of human B-domain deleted Factor VIII
  source 1..4371: mol_type = other DNA
atgcagattgaactgtctacctgcttcttcctctgtttgctgaggttctgctttagcgccactagacggtactaccttggcgctgtggagctgtcctgggactatatgcagagtgatttgggagagcttcccgtcgacgcacgatttcctcctcgcgttccaaagtcatttccctttaacacaagccacgtgtacaagaagacgctcttcgtcgaattcaccgatcacctgttcaatatcgccaaacccagaccaccatggatgggtcttttggggcctaccatacaagcggaggtgtatgacacagttgttatcactctcaagaacatggcttctcatccggtaagtcttcacgcagtgggcgtgtcctactggaaagcttcagaaggagccgagtatgatgatcagacatcccagagggagaaagaagacgacaaggtatttccaggtgggtctcatacctatgtgtggcaagtgctcaaagagaatggccctatggcaagcgatccgccgtgtttgacttacagctacctttcacacgttgacctcgtcaaggacctcaactccgggttgattggagccttgttggtatgcagggaaggatctcttgccaaagagaagacacagaccctccacaagtttatccttctctttgctgtgttcgatgagggcaaaagttggcatagcgaaacgaagaattccctcatgcaggatcgcgacgcagccagcgccagagcttggcccaagatgcacactgtgaacggatatgtcaataggacgcttcctggcttgattgggtgtcatcggaaaagtgtctactggcacgtgatcggaatggggacaacaccagaggtccactccatatttctcgaaggccataccttccttgttcgaaaccacagacaggcatccttggggatctctcccattacctttctcactgcccaaacgctccttatggacttgggtcagttccttctcttttgccatatcccgtcacaccagcatgatggtatggaagcttatgtgaaagtcgacagttgtcctgaggagccacagttgcgcatgaagaataatgaagaagccgaggattacgacgacgatctcaccgattctgagatggacgtggtgaggtttgatgacgacaactctccctccatcattcaagctcggagcgtggcgaagaaacaccccaagacttgggtccactatatagcggcggaagaggaggattgggattacgctcctcttgtattggcaccagatgaccgctcatacaaaagccagtacctcaacaacggaccgcagagaattggccggaagtataagaaagtgcgatttatggcctatacagacgaaacctttaagacaagggaggccatccagcatgagagtgggattttgggacctcttctttacggcgaagttggtgataccctcctcatcatcttcaagaatcaagcttctcgcccctataacatttacccacacgggatcactgacgttaggcctttgtatagcagaagacttcccaaaggcgtgaagcatctcaaagacttccccattttgccaggcgagatctttaagtacaaatggaccgtcacagtggaagatggaccgactaaatcagaccctcgatgccttacgcggtactattcctccttcgtgaatatggagagagatttggcaagcggactcataggaccactcctcatctgttacaaggaatctgtagaccagaggggtaaccagattatgagtgataaacgcaatgtgatcctttttagcgtcttcgacgagaaccggtcctggtacttgaccgagaatatacaaaggttccttcccaaccccgcaggcgttcagttggaagaccctgagtttcaggccagcaatattatgcactcaatcaacggctatgtgtttgatagtctccagctttctgtttgcctccatgaagtagcctattggtacatcttgtcaattggtgctcaaacagacttcctctccgtcttcttctccggctacacctttaagcacaagatggtgtatgaggacactctcacactctttccattttctggagaaaccgtgttcatgagcatggagaatccaggcctttggatcttgggttgccacaacagtgattttcgcaatcggggaatgactgctctcctcaaagtcagcagctgtgataagaacacaggcgactattacgaagattcttacgaggacataagtgactactttgactcgggcgataacgccattgagcccagatcattctcccagaatcctcccgtgcttaaaaggcatcagcgcgaaatcaccagaactactcttcagtctgatcaagaggagattgactatgacgacaccataagcgtggaaatgaagaaggaggatttcgatatctatgacgaagatgagaaccagtctccgcggagctttcagaaggtcacgcgacactacttcattgcagcagtcgaaaggctttgggactacggtatgtcatcatcccctcatgtgttgcgcaatagagctcagagtggaagtgttccacagttcaagaaagtcgtctttcaagagtttacagatggcagcttcacacagcctctctatcggggcgagcttaacgaacatttgggactccttggtccctatatccgagccgaagtggaggacaacattatggttacctttaggaatcaagcctctcgcccctacagcttctactcctccctcatcagttatgaggaggatcagagaatgggcgctgaaccacggaagaactttgtgaaaccgaatgagacgaagacctacttctggaaagtacagcaccacatggcccccacaaaagacgaattcgattgcaaagcatgggcgtatttttcagacgttgacttggagaaagatgtacattcaggacttattggtcctttgttggtgtgtcacactaacactctcaatccagcccatggcaggcaggtgacagtccaggaattcgctcttttctttaccatctttgatgagaccaagtcctggtacttcacggaaaacatggagcgcaattgcagagccccctgtaacatacagatggaggaccctacctttaaggaaaattatcggttccacgcaatcaacggatacattatggatacactccctggccttgtgatggctcaggaccaacgaatcaggtggtacctcctcagcatgggttctaatgagaacatacactccattcacttttcaggacatgtgttcactgtccggaagaaagaagagtataagatggccctctacaatttgtatccaggcgtgtttgagaccgttgaaatgcttccctctaaagctggcatctggagagtagagtgcttgatcggagaacatcttcacgcaggtatgagcaccttgttcctcgtgtacagcaacaaatgtcagaatccacttggcatggccagtggacacattcgcgactttcagatcacagcatctggccagtatggacaatgggccccaaagttggctcgcctccattactccggtagcataaatgcgtggtccactaaagaacctttcagctggattaaggtcgatcttcttgcccccatgatcatccacggcattaagacacagggagcgaggcagaaattctcctccctctacatctcacagttcattattatgtatagtttggacggcaagaagtggcaaacttatagaggtaacagtactggaacagacatggtgttcttcggcaacgttgatagctctggcatcaaacacaacatctttaatcctcccataatagctcggtacatcagattgcatccgacccactacagcattaggagtacactccgaatggagcttatgggttgcgacttgaattcctgttcaatgccactcggaatggagtctaaagccatctctgatgcacagataaccgccagtagctactttacgaacatgtttgctacgtggtcaccctctaaggcaaggcttcatttgcaaggccggtctaatgcctggagacctcaggtgaacaacccgaaagaatggctccaggtggactttcagaagaccatgaaagtaacaggtgtcactactcagggagttaagtccttggatactagcatgtatgtgaaggagttccttatttcctcatcacaagatggccaccagtggaccctcttctttcagaatggtaaggtcaaagtgtttcagggcaatcaagacagcttcacacccgtggtgaacagtcttgatcctccactcttgacacgataccttcgaatccatccacagtcttgggagcaccagattgcattgcgcatggaagtacttggatgcgaggctcaggacctctac

SEQ ID NO: 1234 - protein, 1457 aa, synthetic construct
  REGION 1..1457: note = Variant of human B-domain deleted Factor VIII
MQIELSTCFFLCLLRFCFSATRRYYLGAVELSWDYMQSDLGELPVDARFPPRVPKSFPFNTSHVYKKTLFVEFTDHLFNIAKPRPPWMGLLGPTIQAEVYDTVVITLKNMASHPVSLHAVGVSYWKASEGAEYDDQTSQREKEDDKVFPGGSHTYVWQVLKENGPMASDPPCLTYSYLSHVDLVKDLNSGLIGALLVCREGSLAKEKTQTLHKFILLFAVFDEGKSWHSETKNSLMQDRDAASARAWPKMHTVNGYVNRTLPGLIGCHRKSVYWHVIGMGTTPEVHSIFLEGHTFLVRNHRQASLGISPITFLTAQTLLMDLGQFLLFCHIPSHQHDGMEAYVKVDSCPEEPQLRMKNNEEAEDYDDDLTDSEMDVVRFDDDNSPSIIQARSVAKKHPKTWVHYIAAEEEDWDYAPLVLAPDDRSYKSQYLNNGPQRIGRKYKKVRFMAYTDETFKTREAIQHESGILGPLLYGEVGDTLLIIFKNQASRPYNIYPHGITDVRPLYSRRLPKGVKHLKDFPILPGEIFKYKWTVTVEDGPTKSDPRCLTRYYSSFVNMERDLASGLIGPLLICYKESVDQRGNQIMSDKRNVILFSVFDENRSWYLTENIQRFLPNPAGVQLEDPEFQASNIMHSINGYVFDSLQLSVCLHEVAYWYILSIGAQTDFLSVFFSGYTFKHKMVYEDTLTLFPFSGETVFMSMENPGLWILGCHNSDFRNRGMTALLKVSSCDKNTGDYYEDSYEDISDYFDSGDNAIEPRSFSQNPPVLKRHQREITRTTLQSDQEEIDYDDTISVEMKKEDFDIYDEDENQSPRSFQKVTRHYFIAAVERLWDYGMSSSPHVLRNRAQSGSVPQFKKVVFQEFTDGSFTQPLYRGELNEHLGLLGPYIRAEVEDNIMVTFRNQASRPYSFYSSLISYEEDQRMGAEPRKNFVKPNETKTYFWKVQHHMAPTKDEFDCKAWAYFSDVDLEKDVHSGLIGPLLVCHTNTLNPAHGRQVTVQEFALFFTIFDETKSWYFTENMERNCRAPCNIQMEDPTFKENYRFHAINGYIMDTLPGLVMAQDQRIRWYLLSMGSNENIHSIHFSGHVFTVRKKEEYKMALYNLYPGVFETVEMLPSKAGIWRVECLIGEHLHAGMSTLFLVYSNKCQNPLGMASGHIRDFQITASGQYGQWAPKLARLHYSGSINAWSTKEPFSWIKVDLLAPMIIHGIKTQGARQKFSSLYISQFIIMYSLDGKKWQTYRGNSTGTDMVFFGNVDSSGIKHNIFNPPIIARYIRLHPTHYSIRSTLRMELMGCDLNSCSMPLGMESKAISDAQITASSYFTNMFATWSPSKARLHLQGRSNAWRPQVNNPKEWLQVDFQKTMKVTGVTTQGVKSLDTSMYVKEFLISSSQDGHQWTLFFQNGKVKVFQGNQDSFTPVVNSLDPPLLTRYLRIHPQSWEHQIALRMEVLGCEAQDLY

SEQ ID NO: 1235 - DNA, 4371 bp, synthetic construct
  misc_feature 1..4371: note = Variant of human B-domain deleted Factor VIII
  source 1..4371: mol_type = other DNA
atgcagattgaactgtctacctgcttcttcctctgtttgctgaggttctgctttagcgccactagacggtactaccttggcgctgtggagctgtcctgggactatatgcagagtgatttgggagagcttcccgtcgacgcacgatttcctcctcgcgttccaaagtcatttccctttaacacaagcgtcgtgtacaagaagacgctcttcgtcgaattcaccgatcacctgttcaatatcgccaaacccagaccaccatggatgggtcttttggggcctaccatacaagcggaggtgtatgacacagttgttatcactctcaagaacatggcttctcatccggtaagtcttcacgcagtgggcgtgtcctactggaaagcttcagaaggagccgagtatgatgatcagacatcccagagggagaaagaagacgacaaggtatttccaggtgggtctcatacctatgtgtggcaagtgctcaaagagaatggccctatggcaagcgatccgccgtgtttgacttacagctacctttcacacgttgacctcgtcaaggacctcaactccgggttgattggagccttgttggtatgcagggaaggatctcttgccaaagagaagacacagaccctccacaagtttatccttctctttgctgtgttcgatgagggcaaaagttggcatagcgaaacgaagaattccctcatgcaggatcgcgacgcagccagcgccagagcttggcccaagatgcacactgtgaacggatatgtcaataggacgcttcctggcttgattgggtgtcatcggaaaagtgtctactggcacgtgatcggaatggggacaacaccagaggtccactccatatttctcgaaggccataccttccttgttcgaaaccacagacaggcatccttggggatctctcccattacctttctcactgcccaaacgctccttatggacttgggtcagttccttctcttttgccatatcccgtcacaccagcatgatggtatggaagcttatgtgaaagtcgacagttgtcctgaggagccacagttgcgcatgaagaataatgaagaagccgaggattacgacgacgatctcaccgattctgagatggacgtggtgaggtttgatgacgacaactctccctccatcattcaagctcggagcgtggcgaagaaacaccccaagacttgggtccactatatagcggcggaagaggaggattgggattacgctcctcttgtattggcaccagatgaccgctcatacaaaagccagtacctcaacaacggaccgcagagaattggccggaagtataagaaagtgcgatttatggcctatacagacgaaacctttaagacaagggaggccatccagcatgagagtgggattttgggacctcttctttacggcgaagttggtgataccctcctcatcatcttcaagaatcaagcttctcgcccctataacatttacccacacgggatcactgacgttaggcctttgtatagcagaagacttcccaaaggcgtgaagcatctcaaagacttccccattttgccaggcgagatctttaagtacaaatggaccgtcacagtggaagatggaccgactaaatcagaccctcgatgccttacgcggtactattcctccttcgtgaatatggagagagatttggcaagcggactcataggaccactcctcatctgttacaaggaatctgtagaccagaggggtaaccagattatgagtgataaacgcaatgtgatcctttttagcgtcttcgacgagaaccggtcctggtacttgaccgagaatatacaaaggttccttcccaaccccgcaggcgttcagttggaagaccctgagtttcaggccagcaatattatgcactcaatcaacggctatgtgtttgatagtctccagctttctgtttgcctccatgaagtagcctattggtacatcttgtcaattggtgctcaaacagacttcctctccgtcttcttctccggctacacctttaagcacaagatggtgtatgaggacactctcacactctttccattttctggagaaaccgtgttcatgagcatggagaatccaggcctttggatcttgggttgccacaacagtgattttcgcaatcggggaatgactgctctcctcaaagtcagcagctgtgataagaacacaggcgactattacgaagattcttacgaggacataagtgcctactttgactccaagaataacgccattgagcccagatcattctcccagaatcctcccgtgcttaaaaggcatcagcgcgaaatcaccagaactactcttcagtctgatcaagaggagattgactatgacgacaccataagcgtggaaatgaagaaggaggatttcgatatctatgacgaagatgagaaccagtctccgcggagctttcagaagaagacgcgacactacttcattgcagcagtcgaaaggctttgggactacggtatgtcatcatcccctcatgtgttgcgcaatagagctcagagtggaagtgttccacagttcaagaaagtcgtctttcaagagtttacagatggcagcttcacacagcctctctatcggggcgagcttaacgaacatttgggactccttggtccctatatccgagccgaagtggaggacaacattatggttacctttaggaatcaagcctctcgcccctacagcttctactcctccctcatcagttatgaggaggatcagagacaaggcgctgaaccacggaagaactttgtgaaaccgaatgagacgaagacctacttctggaaagtacagcaccacatggcccccacaaaagacgaattcgattgcaaagcatgggcgtatttttcagacgttgacttggagaaagatgtacattcaggacttattggtcctttgttggtgtgtcacactaacactctcaatccagcccatggcaggcaggtgacagtccaggaattcgctcttttctttaccatctttgatgagaccaagtcctggtacttcacggaaaacatggagcgcaattgcagagccccctgtaacatacagatggaggaccctacctttaaggaaaattatcggttccacgcaatcaacggatacattatggatacactccctggccttgtgatggctcaggaccaacgaatcaggtggtacctcctcagcatgggttctaatgagaacatacactccattcacttttcaggacatgtgttcactgtccggaagaaagaagagtataagatggccctctacaatttgtatccaggcgtgtttgagaccgttgaaatgcttccctctaaagctggcatctggagagtagagtgcttgatcggagaacatcttcacgcaggtatgagcaccttgttcctcgtgtacagcaacaaatgtcagaatccacttggcatggccagtggacacattcgcgactttcagatcacagcatctggccagtatggacaatgggccccaaagttggctcgcctccattactccggtagcataaatgcgtggtccactaaagaacctttcagctggattaaggtcgatcttcttgcccccatgatcatccacggcattaagacacagggagcgaggcagaaattctcctccctctacatctcacagttcattattatgtatagtttggacggcaagaagtggcaaacttatagaggtaacagtactggaacagacatggtgttcttcggcaacgttgatagctctggcatcaaacacaacatctttaatcctcccataatagctcggtacatcagattgcatccgacccactacagcattaggagtacactccgaatggagcttatgggttgcgacttgaattcctgttcaatgccactcggaatggagtctaaagccatctctgatgcacagataaccgccagtagctactttacgaacatgtttgctacgtggtcaccctctaaggcaaggcttcatttgcaaggccggtctaatgcctggagacctcaggtgaacaacccgaaagaatggctccaggtggactttcagaagaccatgaaagtaacaggtgtcactactcagggagttaagtccttggatactagcatgtatgtgaaggagttccttatttcctcatcacaagatggccaccagtggaccctcttctttcagaatggtaaggtcaaagtgtttcagggcaatcaagacagcttcacacccgtggtgaacagtcttgatcctccactcttgacacgataccttcgaatccatccacagtcttgggagcaccagattgcattgcgcatggaagtacttggatgcgaggctcaggacctctac

SEQ ID NO: 1236 - protein, 1457 aa, synthetic construct
  REGION 1..1457: note = Variant of human B-domain deleted Factor VIII
MQIELSTCFFLCLLRFCFSATRRYYLGAVELSWDYMQSDLGELPVDARFPPRVPKSFPFNTSVVYKKTLFVEFTDHLFNIAKPRPPWMGLLGPTIQAEVYDTVVITLKNMASHPVSLHAVGVSYWKASEGAEYDDQTSQREKEDDKVFPGGSHTYVWQVLKENGPMASDPPCLTYSYLSHVDLVKDLNSGLIGALLVCREGSLAKEKTQTLHKFILLFAVFDEGKSWHSETKNSLMQDRDAASARAWPKMHTVNGYVNRTLPGLIGCHRKSVYWHVIGMGTTPEVHSIFLEGHTFLVRNHRQASLGISPITFLTAQTLLMDLGQFLLFCHIPSHQHDGMEAYVKVDSCPEEPQLRMKNNEEAEDYDDDLTDSEMDVVRFDDDNSPSIIQARSVAKKHPKTWVHYIAAEEEDWDYAPLVLAPDDRSYKSQYLNNGPQRIGRKYKKVRFMAYTDETFKTREAIQHESGILGPLLYGEVGDTLLIIFKNQASRPYNIYPHGITDVRPLYSRRLPKGVKHLKDFPILPGEIFKYKWTVTVEDGPTKSDPRCLTRYYSSFVNMERDLASGLIGPLLICYKESVDQRGNQIMSDKRNVILFSVFDENRSWYLTENIQRFLPNPAGVQLEDPEFQASNIMHSINGYVFDSLQLSVCLHEVAYWYILSIGAQTDFLSVFFSGYTFKHKMVYEDTLTLFPFSGETVFMSMENPGLWILGCHNSDFRNRGMTALLKVSSCDKNTGDYYEDSYEDISAYFDSKNNAIEPRSFSQNPPVLKRHQREITRTTLQSDQEEIDYDDTISVEMKKEDFDIYDEDENQSPRSFQKKTRHYFIAAVERLWDYGMSSSPHVLRNRAQSGSVPQFKKVVFQEFTDGSFTQPLYRGELNEHLGLLGPYIRAEVEDNIMVTFRNQASRPYSFYSSLISYEEDQRQGAEPRKNFVKPNETKTYFWKVQHHMAPTKDEFDCKAWAYFSDVDLEKDVHSGLIGPLLVCHTNTLNPAHGRQVTVQEFALFFTIFDETKSWYFTENMERNCRAPCNIQMEDPTFKENYRFHAINGYIMDTLPGLVMAQDQRIRWYLLSMGSNENIHSIHFSGHVFTVRKKEEYKMALYNLYPGVFETVEMLPSKAGIWRVECLIGEHLHAGMSTLFLVYSNKCQNPLGMASGHIRDFQITASGQYGQWAPKLARLHYSGSINAWSTKEPFSWIKVDLLAPMIIHGIKTQGARQKFSSLYISQFIIMYSLDGKKWQTYRGNSTGTDMVFFGNVDSSGIKHNIFNPPIIARYIRLHPTHYSIRSTLRMELMGCDLNSCSMPLGMESKAISDAQITASSYFTNMFATWSPSKARLHLQGRSNAWRPQVNNPKEWLQVDFQKTMKVTGVTTQGVKSLDTSMYVKEFLISSSQDGHQWTLFFQNGKVKVFQGNQDSFTPVVNSLDPPLLTRYLRIHPQSWEHQIALRMEVLGCEAQDLY

SEQ ID NO: 1237 - DNA, 4371 bp, synthetic construct
  misc_feature 1..4371: note = Variant of human B-domain deleted Factor VIII
  source 1..4371: mol_type = other DNA
atgcagattgaactgtctacctgcttcttcctctgtttgctgaggttctgctttagcgccactagacggtactaccttggcgctgtggagctgtcctgggactatatgcagagtgatttgggagagcttcccgtcgacgcacgatttcctcctcgcgttccaaagtcatttccctttaacacaagcgtcgtgtacaagaagacgctcttcgtcgaattcaccgatcacctgttcaatatcgccaaacccagaccaccatggatgggtcttttggggcctaccatacaagcggaggtgtatgacacagttgttatcactctcaagaacatggcttctcatccggtaagtcttcacgcagtgggcgtgtcctactggaaagcttcagaaggagccgagtatgatgatcagacatcccagagggagaaagaagacgacaaggtatttccaggtgggtctcatacctatgtgtggcaagtgctcaaagagaatggccctatggcaagcgatccgccgtgtttgacttacagctacctttcacacgttgacctcgtcaaggacctcaactccgggttgattggagccttgttggtatgcagggaaggatctcttgccaaagagaagacacagaccctccacaagtttatccttctctttgctgtgttcgatgagggcaaaagttggcatagcgaaacgaagaattccctcatgcaggatcgcgacgcagccagcgccagagcttggcccaagatgcacactgtgaacggatatgtcaataggacgcttcctggcttgattgggtgtcatcggaaaagtgtctactggcacgtgatcggaatggggacaacaccagaggtccactccatatttctcgaaggccataccttccttgttcgaaaccacagacaggcatccttggggatctctcccattacctttctcactgcccaaacgctccttatggacttgggtcagttccttctcttttgccatatcccgtcacaccagcatgatggtatggaagcttatgtgaaagtcgacagttgtcctgaggagccacagttgcgcatgaagaataatgaagaagccgaggattacgacgacgatctcaccgattctgagatggacgtggtgaggtttgatgacgacaactctccctccatcattcaagctcggagcgtggcgaagaaacaccccaagacttgggtccactatatagcggcggaagaggaggattgggattacgctcctcttgtattggcaccagatgaccgctcatacaaaagccagtacctcaacaacggaccgcagagaattggccggaagtataagaaagtgcgatttatggcctatacagacgaaacctttaagacaagggaggccatccagcatgagagtgggattttgggacctcttctttacggcgaagttggtgataccctcctcatcatcttcaagaatcaagcttctcgcccctataacatttacccacacgggatcactgacgttaggcctttgtatagcagaagacttcccaaaggcgtgaagcatctcaaagacttccccattttgccaggcgagatctttaagtacaaatggaccgtcacagtggaagatggaccgactaaatcagaccctcgatgccttacgcggtactattcctccttcgtgaatatggagagagatttggcaagcggactcataggaccactcctcatctgttacaaggaatctgtagaccagaggggtaaccagattatgagtgataaacgcaatgtgatcctttttagcgtcttcgacgagaaccggtcctggtacttgaccgagaatatacaaaggttccttcccaaccccgcaggcgttcagttggaagaccctgagtttcaggccagcaatattatgcactcaatcaacggctatgtgtttgatagtctccagctttctgtttgcctccatgaagtagcctattggtacatcttgtcaattggtgctcaaacagacttcctctccgtcttcttctccggctacacctttaagcacaagatggtgtatgaggacactctcacactctttccattttctggagaaaccgtgttcatgagcatggagaatccaggcctttggatcttgggttgccacaacagtgattttcgcaatcggggaatgactgctctcctcaaagtcagcagctgtgataagaacacaggcgactattacgaagattcttacgaggacataagtgactactttgactcgctggataacgccattgagcccagatcattctcccagaatcctcccgtgcttaaaaggcatcagcgcgaaatcaccagaactactcttcagtctgatcaagaggagattgactatgacgacaccgggagcgtggaaatgaagaaggaggatttcgatatctatgacgaagatgagaacttctctccgcggagctttcagaagaagacgcgacactacttcattgcagcagtcgaaaggctttgggactacggtatgtcatcatcccctcatgtgttgcgcaatagagctcagagtggaagtgttccacagttcaagaaagtcgtctttcaagagtttacagatggcagcttcacacagcctctctatcggggcgagcttaacgaacatttgggactccttggtccctatatccgagccgaagtggaggacaacattatggttacctttaggaatcaagcctctcgcccctacagcttctactcctccctcatcagttatgaggaggatcagagacaaggcgctgaaccacggaagaactttgtgaaaccgaatgagacgaagacctacttctggaaagtacagcaccacatggcccccacaaaagacgaattcgattgcaaagcatgggcgtatttttcagacgttgacttggagaaagatgtacattcaggacttattggtcctttgttggtgtgtcacactaacactctcaatccagcccatggcaggcaggtgacagtccaggaattcgctcttttctttaccatctttgatgagaccaagtcctggtacttcacggaaaacatggagcgcaattgcagagccccctgtaacatacagatggaggaccctacctttaaggaaaattatcggttccacgcaatcaacggatacattatggatacactccctggccttgtgatggctcaggaccaacgaatcaggtggtacctcctcagcatgggttctaatgagaacatacactccattcacttttcaggacatgtgttcactgtccggaagaaagaagagtataagatggccctctacaatttgtatccaggcgtgtttgagaccgttgaaatgcttccctctaaagctggcatctggagagtagagtgcttgatcggagaacatcttcacgcaggtatgagcaccttgttcctcgtgtacagcaacaaatgtcagaccccacttggcatggccagtggacacattcgcgactttcagatcacagcatctggccagtatggacaatgggccccaaagttggctcgcctccattactccggtagcataaatgcgtggtccactaaagaacctttcagctggattaaggtcgatcttcttgcccccatgatcatccacggcattaagacacagggagcgaggcagaaattctcctccctctacatctcacagttcattattatgtatagtttggacggcaagaagtggcaaacttatagaggtaacagtactggaacagacatggtgttcttcggcaacgttgatagctctggcatcaaacacaacatctttaatcctcccataatagctcggtacatcagattgcatccgacccactacagcattaggagtacactccgaatggagcttatgggttgcgacttgaattcctgttcaatgccactcggaatggagtctaaagccatctctgatgcacagataaccgccagtagctactttacgaacatgtttgctacgtggtcaccctctaaggcaaggcttcatttgcaaggccggtctaatgcctggagacctcaggtgaacaacccgaaagaatggctccaggtggactttcagaagaccatgaaagtaacaggtgtcactactcagggagttaagtccttggatactagcatgtatgtgaaggagttccttatttcctcatcacaagatggccaccagtggaccctcttctttcagaatggtaaggtcaaagtgtttcagggcaatcaagacagcttcacacccgtggtgaacagtcttgatcctccactcttgacacgataccttcgaatccatccacagtcttgggagcaccagattgcattgcgcatggaagtacttggatgcgaggctcaggacctctac

SEQ ID NO: 1238 - protein, 1457 aa, synthetic construct
  REGION 1..1457: note = Variant of human B-domain deleted Factor VIII
MQIELSTCFFLCLLRFCFSATRRYYLGAVELSWDYMQSDLGELPVDARFPPRVPKSFPFNTSVVYKKTLFVEFTDHLFNIAKPRPPWMGLLGPTIQAEVYDTVVITLKNMASHPVSLHAVGVSYWKASEGAEYDDQTSQREKEDDKVFPGGSHTYVWQVLKENGPMASDPPCLTYSYLSHVDLVKDLNSGLIGALLVCREGSLAKEKTQTLHKFILLFAVFDEGKSWHSETKNSLMQDRDAASARAWPKMHTVNGYVNRTLPGLIGCHRKSVYWHVIGMGTTPEVHSIFLEGHTFLVRNHRQASLGISPITFLTAQTLLMDLGQFLLFCHIPSHQHDGMEAYVKVDSCPEEPQLRMKNNEEAEDYDDDLTDSEMDVVRFDDDNSPSIIQARSVAKKHPKTWVHYIAAEEEDWDYAPLVLAPDDRSYKSQYLNNGPQRIGRKYKKVRFMAYTDETFKTREAIQHESGILGPLLYGEVGDTLLIIFKNQASRPYNIYPHGITDVRPLYSRRLPKGVKHLKDFPILPGEIFKYKWTVTVEDGPTKSDPRCLTRYYSSFVNMERDLASGLIGPLLICYKESVDQRGNQIMSDKRNVILFSVFDENRSWYLTENIQRFLPNPAGVQLEDPEFQASNIMHSINGYVFDSLQLSVCLHEVAYWYILSIGAQTDFLSVFFSGYTFKHKMVYEDTLTLFPFSGETVFMSMENPGLWILGCHNSDFRNRGMTALLKVSSCDKNTGDYYEDSYEDISDYFDSLDNAIEPRSFSQNPPVLKRHQREITRTTLQSDQEEIDYDDTGSVEMKKEDFDIYDEDENFSPRSFQKKTRHYFIAAVERLWDYGMSSSPHVLRNRAQSGSVPQFKKVVFQEFTDGSFTQPLYRGELNEHLGLLGPYIRAEVEDNIMVTFRNQASRPYSFYSSLISYEEDQRQGAEPRKNFVKPNETKTYFWKVQHHMAPTKDEFDCKAWAYFSDVDLEKDVHSGLIGPLLVCHTNTLNPAHGRQVTVQEFALFFTIFDETKSWYFTENMERNCRAPCNIQMEDPTFKENYRFHAINGYIMDTLPGLVMAQDQRIRWYLLSMGSNENIHSIHFSGHVFTVRKKEEYKMALYNLYPGVFETVEMLPSKAGIWRVECLIGEHLHAGMSTLFLVYSNKCQTPLGMASGHIRDFQITASGQYGQWAPKLARLHYSGSINAWSTKEPFSWIKVDLLAPMIIHGIKTQGARQKFSSLYISQFIIMYSLDGKKWQTYRGNSTGTDMVFFGNVDSSGIKHNIFNPPIIARYIRLHPTHYSIRSTLRMELMGCDLNSCSMPLGMESKAISDAQITASSYFTNMFATWSPSKARLHLQGRSNAWRPQVNNPKEWLQVDFQKTMKVTGVTTQGVKSLDTSMYVKEFLISSSQDGHQWTLFFQNGKVKVFQGNQDSFTPVVNSLDPPLLTRYLRIHPQSWEHQIALRMEVLGCEAQDLY

SEQ ID NO: 1239 - DNA, 4371 bp, synthetic construct
  misc_feature 1..4371: note = Variant of human B-domain deleted Factor VIII
  source 1..4371: mol_type = other DNA
atgcagattgaactgtctacctgcttcttcctctgtttgctgaggttctgctttagcgccactagacggtactaccttggcgctgtggagctgtcctgggactatatgcagagtgatttgggagagcttcccgtcgacgcacgatttcctcctcgcgttccaaagtcatttccctttaacacaagccaggtgtacaagaagacgctcttcgtcgaattcaccgatcacctgttcaatatcgccaaacccagaccaccatggatgggtcttttggggcctaccatacaagcggaggtgtatgacacagttgttatcactctcaagaacatggcttctcatccggtaagtcttcacgcagtgggcgtgtcctactggaaagcttcagaaggagccgagtatgatgatcagacatcccagagggagaaagaagacgacaaggtatttccaggtgggtctcatacctatgtgtggcaagtgctcaaagagaatggccctatggcaagcgatccgccgtgtttgacttacagctacctttcacacgttgacctcgtcaaggacctcaactccgggttgattggagccttgttggtatgcagggaaggatctcttgccaaagagaagacacagaccctccacaagtttatccttctctttgctgtgttcgatgagggcaaaagttggcatagcgaaacgaagaattccctcatgcaggatcgcgacgcagccagcgccagagcttggcccaagatgcacactgtgaacggatatgtcaataggacgcttcctggcttgattgggtgtcatcggaaaagtgtctactggcacgtgatcggaatggggacaacaccagaggtccactccatatttctcgaaggccataccttccttgttcgaaaccacagacaggcatccttggggatctctcccattacctttctcactgcccaaacgctccttatggacttgggtcagttccttctcttttgccatatcccgtcacaccagcatgatggtatggaagcttatgtgaaagtcgacagttgtcctgaggagccacagttgcgcatgaagaataatgaagaagccgaggattacgacgacgatctcaccgattctgagatggacgtggtgaggtttgatgacgacaactctccctccatcattcaagctcggagcgtggcgaagaaacaccccaagacttgggtccactatatagcggcggaagaggaggattgggattacgctcctcttgtattggcaccagatgaccgctcatacaaaagccagtacctcaacaacggaccgcagagaattggccggaagtataagaaagtgcgatttatggcctatacagacgaaacctttaagacaagggaggccatccagcatgagagtgggattttgggacctcttctttacggcgaagttggtgataccctcctcatcatcttcaagaatcaagcttctcgcccctataacatttacccacacgggatcactgacgttaggcctttgtatagcagaagacttcccaaaggcgtgaagcatctcaaagacttccccattttgccaggcgagatctttaagtacaaatggaccgtcacagtggaagatggaccgactaaatcagaccctcgatgccttacgcggtactattcctccttcgtgaatatggagagagatttggcaagcggactcataggaccactcctcatctgttacaaggaatctgtagaccagaggggtaaccagattatgagtgataaacgcaatgtgatcctttttagcgtcttcgacgagaaccggtcctggtacttgaccgagaatatacaaaggttccttcccaaccccgcaggcgttcagttggaagaccctgagtttcaggccagcaatattatgcactcaatcaacggctatgtgtttgatagtctccagctttctgtttgcctccatgaagtagcctattggtacatcttgtcaattggtgctcaaacagacttcctctccgtcttcttctccggctacacctttaagcacaagatggtgtatgaggacactctcacactctttccattttctggagaaaccgtgttcatgagcatggagaatccaggcctttggatcttgggttgccacaacagtgattttcgcaatcggggaatgactgctctcctcaaagtcagcagctgtgataagaacacaggcgactattacgaagattcttacgaggacataagtgcctactttgactccaagaataacgccattgagcccagatcattctcccagaatcctcccgtgcttaaaaggcatcagcgcgaaatcaccagaactactcttcagtctgatcaagaggagattgactatgacgacaccataagcgtggaaatgaagaaggaggatttcgatatctatgacgaagatgagaaccagtctccgcggagctttcagaagaagacgcgacactacttcattgcagcagtcgaaaggctttgggactacggtatgtcatcatcccctcatgtgttgcgcaatagagctcagagtggaagtgttccacagttcaagaaagtcgtctttcaagagtttacagatggcagcttcacacagcctctctatcggggcgagcttaacgaacatttgggactccttggtccctatatccgagccgaagtggaggacaacattatggttacctttaggaatcaagcctctcgcccctacagcttctactcctccctcatcagttatgaggaggatcagagacaaggcgctgaaccacggaagaactttgtgaaaccgaatgagacgaagacctacttctggaaagtacagcaccacatggcccccacaaaagacgaattcgattgcaaagcatgggcgtatttttcagacgttgacttggagaaagatgtacattcaggacttattggtcctttgttggtgtgtcacactaacactctcaatccagcccatggcaggcaggtgacagtccaggaattcgctcttttctttaccatctttgatgagaccaagtcctggtacttcacggaaaacatggagcgcaattgcagagccccctgtaacatacagatggaggaccctacctttaaggaaaattatcggttccacgcaatcaacggatacattatggatacactccctggccttgtgatggctcaggaccaacgaatcaggtggtacctcctcagcatgggttctaatgagaacatacactccattcacttttcaggacatgtgttcactgtccggaagaaagaagagtataagatggccctctacaatttgtatccaggcgtgtttgagaccgttgaaatgcttccctctaaagctggcatctggagagtagagtgcttgatcggagaacatcttcacgcaggtatgagcaccttgttcctcgtgtacagcaacaaatgtcagactccacttggcatggccagtggacacattcgcgactttcagatcacagcatctggccagtatggacaatgggccccaaagttggctcgcctccattactccggtagcataaatgcgtggtccactaaagaacctttcagctggattaaggtcgatcttcttgcccccatgatcatccacggcattaagacacagggagcgaggcagaaattctcctccctctacatctcacagttcattattatgtatagtttggacggcaagaagtggcaaacttatagaggtaacagtactggaacagacatggtgttcttcggcaacgttgatagctctggcatcaaacacaacatctttaatcctcccataatagctcggtacatcagattgcatccgacccactacagcattaggagtacactccgaatggagcttatgggttgcgacttgaattcctgttcaatgccactcggaatggagtctaaagccatctctgatgcacagataaccgccagtagctactttacgaacatgtttgctacgtggtcaccctctaaggcaaggcttcatttgcaaggccggtctaatgcctggagacctcaggtgaacaacccgaaagaatggctccaggtggactttcagaagaccatgaaagtaacaggtgtcactactcagggagttaagtccttggatactagcatgtatgtgaaggagttccttatttcctcatcacaagatggccaccagtggaccctcttctttcagaatggtaaggtcaaagtgtttcagggcaatcaagacagcttcacacccgtggtgaacagtcttgatcctccactcttgacacgataccttcgaatccatccacagtcttgggagcaccagattgcattgcgcatggaagtacttggatgcgaggctcaggacctctac

SEQ ID NO: 1240 - protein, 1457 aa, synthetic construct
  REGION 1..1457: note = Variant of human B-domain deleted Factor VIII
MQIELSTCFFLCLLRFCFSATRRYYLGAVELSWDYMQSDLGELPVDARFPPRVPKSFPFNTSQVYKKTLFVEFTDHLFNIAKPRPPWMGLLGPTIQAEVYDTVVITLKNMASHPVSLHAVGVSYWKASEGAEYDDQTSQREKEDDKVFPGGSHTYVWQVLKENGPMASDPPCLTYSYLSHVDLVKDLNSGLIGALLVCREGSLAKEKTQTLHKFILLFAVFDEGKSWHSETKNSLMQDRDAASARAWPKMHTVNGYVNRTLPGLIGCHRKSVYWHVIGMGTTPEVHSIFLEGHTFLVRNHRQASLGISPITFLTAQTLLMDLGQFLLFCHIPSHQHDGMEAYVKVDSCPEEPQLRMKNNEEAEDYDDDLTDSEMDVVRFDDDNSPSIIQARSVAKKHPKTWVHYIAAEEEDWDYAPLVLAPDDRSYKSQYLNNGPQRIGRKYKKVRFMAYTDETFKTREAIQHESGILGPLLYGEVGDTLLIIFKNQASRPYNIYPHGITDVRPLYSRRLPKGVKHLKDFPILPGEIFKYKWTVTVEDGPTKSDPRCLTRYYSSFVNMERDLASGLIGPLLICYKESVDQRGNQIMSDKRNVILFSVFDENRSWYLTENIQRFLPNPAGVQLEDPEFQASNIMHSINGYVFDSLQLSVCLHEVAYWYILSIGAQTDFLSVFFSGYTFKHKMVYEDTLTLFPFSGETVFMSMENPGLWILGCHNSDFRNRGMTALLKVSSCDKNTGDYYEDSYEDISAYFDSKNNAIEPRSFSQNPPVLKRHQREITRTTLQSDQEEIDYDDTISVEMKKEDFDIYDEDENQSPRSFQKKTRHYFIAAVERLWDYGMSSSPHVLRNRAQSGSVPQFKKVVFQEFTDGSFTQPLYRGELNEHLGLLGPYIRAEVEDNIMVTFRNQASRPYSFYSSLISYEEDQRQGAEPRKNFVKPNETKTYFWKVQHHMAPTKDEFDCKAWAYFSDVDLEKDVHSGLIGPLLVCHTNTLNPAHGRQVTVQEFALFFTIFDETKSWYFTENMERNCRAPCNIQMEDPTFKENYRFHAINGYIMDTLPGLVMAQDQRIRWYLLSMGSNENIHSIHFSGHVFTVRKKEEYKMALYNLYPGVFETVEMLPSKAGIWRVECLIGEHLHAGMSTLFLVYSNKCQTPLGMASGHIRDFQITASGQYGQWAPKLARLHYSGSINAWSTKEPFSWIKVDLLAPMIIHGIKTQGARQKFSSLYISQFIIMYSLDGKKWQTYRGNSTGTDMVFFGNVDSSGIKHNIFNPPIIARYIRLHPTHYSIRSTLRMELMGCDLNSCSMPLGMESKAISDAQITASSYFTNMFATWSPSKARLHLQGRSNAWRPQVNNPKEWLQVDFQKTMKVTGVTTQGVKSLDTSMYVKEFLISSSQDGHQWTLFFQNGKVKVFQGNQDSFTPVVNSLDPPLLTRYLRIHPQSWEHQIALRMEVLGCEAQDLY

SEQ ID NO: 1241 - DNA, 4371 bp, synthetic construct
  misc_feature 1..4371: note = Variant of human B-domain deleted Factor VIII
  source 1..4371: mol_type = other DNA
atgcagattgaactgtctacctgcttcttcctctgtttgctgaggttctgctttagcgccactagacggtactaccttggcgctgtggagctgtcctgggactatatgcagagtgatttgggagagcttcccgtcgacgcacgatttcctcctcgcgttccaaagtcatttccctttaacacaagcgtcgtgtacaagaagacgctcttcgtcgaattcaccgatcacctgttcaatatcgccaaacccagaccaccatggatgggtcttttggggcctaccatacaagcggaggtgtatgacacagttgttatcactctcaagaacatggcttctcatccggtaagtcttcacgcagtgggcgtgtcctactggaaagcttcagaaggagccgagtatgatgatcagacatcccagagggagaaagaagacgacaaggtatttccaggtgggtctcatacctatgtgtggcaagtgctcaaagagaatggccctatggcaagcgatccgccgtgtttgacttacagctacctttcacacgttgacctcgtcaaggacctcaactccgggttgattggagccttgttggtatgcagggaaggatctcttgccaaagagaagacacagaccctccacaagtttatccttctctttgctgtgttcgatgagggcaaaagttggcatagcgaaacgaagaattccctcatgcaggatcgcgacgcagccagcgccagagcttggcccaagatgcacactgtgaacggatatgtcaataggacgcttcctggcttgattgggtgtcatcggaaaagtgtctactggcacgtgatcggaatggggacaacaccagaggtccactccatatttctcgaaggccataccttccttgttcgaaaccacagacaggcatccttggggatctctcccattacctttctcactgcccaaacgctccttatggacttgggtcagttccttctcttttgccatatcccgtcacaccagcatgatggtatggaagcttatgtgaaagtcgacagttgtcctgaggagccacagttgcgcatgaagaataatgaagaagccgaggattacgacgacgatctcaccgattctgagatggacgtggtgaggtttgatgacgacaactctccctccatcattcaagctcggagcgtggcgaagaaacaccccaagacttgggtccactatatagcggcggaagaggaggattgggattacgctcctcttgtattggcaccagatgaccgctcatacaaaagccagtacctcaacaacggaccgcagagaattggccggaagtataagaaagtgcgatttatggcctatacagacgaaacctttaagacaagggaggccatccagcatgagagtgggattttgggacctcttctttacggcgaagttggtgataccctcctcatcatcttcaagaatcaagcttctcgcccctataacatttacccacacgggatcactgacgttaggcctttgtatagcagaagacttcccaaaggcgtgaagcatctcaaagacttccccattttgccaggcgagatctttaagtacaaatggaccgtcacagtggaagatggaccgactaaatcagaccctcgatgccttacgcggtactattcctccttcgtgaatatggagagagatttggcaagcggactcataggaccactcctcatctgttacaaggaatctgtagaccagaggggtaaccagattatgagtgataaacgcaatgtgatcctttttagcgtcttcgacgagaaccggtcctggtacttgaccgagaatatacaaaggttccttcccaaccccgcaggcgttcagttggaagaccctgagtttcaggccagcaatattatgcactcaatcaacggctatgtgtttgatagtctccagctttctgtttgcctccatgaagtagcctattggtacatcttgtcaattggtgctcaaacagacttcctctccgtcttcttctccggctacacctttaagcacaagatggtgtatgaggacactctcacactctttccattttctggagaaaccgtgttcatgagcatggagaatccaggcctttggatcttgggttgccacaacagtgattttcgcaatcggggaatgactgctctcctcaaagtcagcagctgtgataagaacacaggcgactattacgaagattcttacgaggacataagtgcctactttgactccaagaataacgccattgagcccagatcattctcccagaatcctcccgtgcttaaaaggcatcagcgcgaaatcaccagaactactcttcagtctgatcaagaggagattgactatgacgacaccattagcgtggaatggaagaaggaggatttcgatatctatgacgaagatgagaaccagtctccgcggagctttcagaagaagacgcgacactacttcattgcagcagtcgaaaggctttgggactacggtatgtcatcatcccctcatgtgttgcgcaatagagctcagagtggaagtgttccacagttcaagaaagtcgtctttcaagagtttacagatggcagcttcacacagcctctctatcggggcgagcttaacgaacatttgggactccttggtccctatatccgagccgaagtggaggacaacattatggttacctttaggaatcaagcctctcgcccctacagcttctactcctccctcatcagttatgaggaggatcagagacaaggcgctgaaccacggaagaactttgtgaaaccgaatgagacgaagacctacttctggaaagtacagcaccacatggcccccacaaaagacgaattcgattgcaaagcatgggcgtatttttcagacgttgacttggagaaagatgtacattcaggacttattggtcctttgttggtgtgtcacactaacactctcaatccagcccatggcaggcaggtgacagtccaggaattcgctcttttctttaccatctttgatgagaccaagtcctggtacttcacggaaaacatggagcgcaattgcagagccccctgtaacatacagatggaggaccctacctttaaggaaaattatcggttccacgcaatcaacggatacattatggatacactccctggccttgtgatggctcaggaccaacgaatcaggtggtacctcctcagcatgggttctaatgagaacatacactccattcacttttcaggacatgtgttcactgtccggaagaaagaagagtataagatggccctctacaatttgtatccaggcgtgtttgagaccgttgaaatgcttccctctaaagctggcatctggagagtagagtgcttgatcggagaacatcttcacgcaggtatgagcaccttgttcctcgtgtacagcaacaaatgtcagaatccacttggcatggccagtggacacattcgcgactttcagatcacagcatctggccagtatggacaatgggccccaaagttggctcgcctccattactccggtagcataaatgcgtggtccactaaagaacctttcagctggattaaggtcgatcttcttgcccccatgatcatccacggcattaagacacagggagcgaggcagaaattctcctccctctacatctcacagttcattattatgtatagtttggacggcaagaagtggcaaacttatagaggtaacagtactggaacagacatggtgttcttcggcaacgttgatagctctggcatcaaacacaacatctttaatcctcccataatagctcggtacatcagattgcatccgacccactacagcattaggagtacactccgaatggagcttatgggttgcgacttgaattcctgttcaatgccactcggaatggagtctaaagccatctctgatgcacagataaccgccagtagctactttacgaacatgtttgctacgtggtcaccctctaaggcaaggcttcatttgcaaggccggtctaatgcctggagacctcaggtgaacaacccgaaagaatggctccaggtggactttcagaagaccatgaaagtaacaggtgtcactactcagggagttaagtccttggatactagcatgtatgtgaaggagttccttatttcctcatcacaagatggccaccagtggaccctcttctttcagaatggtaaggtcaaagtgtttcagggcaatcaagacagcttcacacccgtggtgaacagtcttgatcctccactcttgacacgataccttcgaatccatccacagtcttgggagcaccagattgcattgcgcatggaagtacttggatgcgaggctcaggacctctac

SEQ ID NO: 1242 - protein, 1457 aa, synthetic construct
  REGION 1..1457: note = Variant of human B-domain deleted Factor VIII
MQIELSTCFFLCLLRFCFSATRRYYLGAVELSWDYMQSDLGELPVDARFPPRVPKSFPFNTSVVYKKTLFVEFTDHLFNIAKPRPPWMGLLGPTIQAEVYDTVVITLKNMASHPVSLHAVGVSYWKASEGAEYDDQTSQREKEDDKVFPGGSHTYVWQVLKENGPMASDPPCLTYSYLSHVDLVKDLNSGLIGALLVCREGSLAKEKTQTLHKFILLFAVFDEGKSWHSETKNSLMQDRDAASARAWPKMHTVNGYVNRTLPGLIGCHRKSVYWHVIGMGTTPEVHSIFLEGHTFLVRNHRQASLGISPITFLTAQTLLMDLGQFLLFCHIPSHQHDGMEAYVKVDSCPEEPQLRMKNNEEAEDYDDDLTDSEMDVVRFDDDNSPSIIQARSVAKKHPKTWVHYIAAEEEDWDYAPLVLAPDDRSYKSQYLNNGPQRIGRKYKKVRFMAYTDETFKTREAIQHESGILGPLLYGEVGDTLLIIFKNQASRPYNIYPHGITDVRPLYSRRLPKGVKHLKDFPILPGEIFKYKWTVTVEDGPTKSDPRCLTRYYSSFVNMERDLASGLIGPLLICYKESVDQRGNQIMSDKRNVILFSVFDENRSWYLTENIQRFLPNPAGVQLEDPEFQASNIMHSINGYVFDSLQLSVCLHEVAYWYILSIGAQTDFLSVFFSGYTFKHKMVYEDTLTLFPFSGETVFMSMENPGLWILGCHNSDFRNRGMTALLKVSSCDKNTGDYYEDSYEDISAYFDSKNNAIEPRSFSQNPPVLKRHQREITRTTLQSDQEEIDYDDTISVEWKKEDFDIYDEDENQSPRSFQKKTRHYFIAAVERLWDYGMSSSPHVLRNRAQSGSVPQFKKVVFQEFTDGSFTQPLYRGELNEHLGLLGPYIRAEVEDNIMVTFRNQASRPYSFYSSLISYEEDQRQGAEPRKNFVKPNETKTYFWKVQHHMAPTKDEFDCKAWAYFSDVDLEKDVHSGLIGPLLVCHTNTLNPAHGRQVTVQEFALFFTIFDETKSWYFTENMERNCRAPCNIQMEDPTFKENYRFHAINGYIMDTLPGLVMAQDQRIRWYLLSMGSNENIHSIHFSGHVFTVRKKEEYKMALYNLYPGVFETVEMLPSKAGIWRVECLIGEHLHAGMSTLFLVYSNKCQNPLGMASGHIRDFQITASGQYGQWAPKLARLHYSGSINAWSTKEPFSWIKVDLLAPMIIHGIKTQGARQKFSSLYISQFIIMYSLDGKKWQTYRGNSTGTDMVFFGNVDSSGIKHNIFNPPIIARYIRLHPTHYSIRSTLRMELMGCDLNSCSMPLGMESKAISDAQITASSYFTNMFATWSPSKARLHLQGRSNAWRPQVNNPKEWLQVDFQKTMKVTGVTTQGVKSLDTSMYVKEFLISSSQDGHQWTLFFQNGKVKVFQGNQDSFTPVVNSLDPPLLTRYLRIHPQSWEHQIALRMEVLGCEAQDLY

SEQ ID NO: 1243 - DNA, 4371 bp, synthetic construct
  misc_feature 1..4371: note = Variant of human B-domain deleted Factor VIII
  source 1..4371: mol_type = other DNA
atgcagattgaactgtctacctgcttcttcctctgtttgctgaggttctgctttagcgccactagacggtactaccttggcgctgtggagctgtcctgggactatatgcagagtgatttgggagagcttcccgtcgacgcacgatttcctcctcgcgttccaaagtcatttccctttaacacaagcgtcgtgtacaagaagacgctcttcgtcgaattcaccgatcacctgttcaatatcgccaaacccagaccaccatggatgggtcttttggggcctaccatacaagcggaggtgtatgacacagttgttatcactctcaagaacatggcttctcatccggtaagtcttcacgcagtgggcgtgtcctactggaaagcttcagaaggagccgagtatgatgatcagacatcccagagggagaaagaagacgacaaggtatttccaggtgggtctcatacctatgtgtggcaagtgctcaaagagaatggccctatggcaagcgatccgccgtgtttgacttacagctacctttcacacgttgacctcgtcaaggacctcaactccgggttgattggagccttgttggtatgcagggaaggatctcttgccaaagagaagacacagaccctccacaagtttatccttctctttgctgtgttcgatgagggcaaaagttggcatagcgaaacgaagaattccctcatgcaggatcgcgacgcagccagcgccagagcttggcccaagatgcacactgtgaacggatatgtcaataggacgcttcctggcttgattgggtgtcatcggaaaagtgtctactggcacgtgatcggaatggggacaacaccagaggtccactccatatttctcgaaggccataccttccttgttcgaaaccacagacaggcatccttggggatctctcccattacctttctcactgcccaaacgctccttatggacttgggtcagttccttctcttttgccatatcccgtcacaccagcatgatggtatggaagcttatgtgaaagtcgacagttgtcctgaggagccacagttgcgcatgaagaataatgaagaagccgaggattacgacgacgatctcaccgattctgagatggacgtggtgaggtttgatgacgacaactctccctccatcattcaagctcggagcgtggcgaagaaacaccccaagacttgggtccactatatagcggcggaagaggaggattgggattacgctcctcttgtattggcaccagatgaccgctcatacaaaagccagtacctcaacaacggaccgcagagaattggccggaagtataagaaagtgcgatttatggcctatacagacgaaacctttaagacaagggaggccatccagcatgagagtgggattttgggacctcttctttacggcgaagttggtgataccctcctcatcatcttcaagaatcaagcttctcgcccctataacatttacccacacgggatcactgacgttaggcctttgtatagcagaagacttcccaaaggcgtgaagcatctcaaagacttccccattttgccaggcgagatctttaagtacaaatggaccgtcacagtggaagatggaccgactaaatcagaccctcgatgccttacgcggtactattcctccttcgtgaatatggagagagatttggcaagcggactcataggaccactcctcatctgttacaaggaatctgtagaccagaggggtaaccagattatgagtgataaacgcaatgtgatcctttttagcgtcttcgacgagaaccggtcctggtacttgaccgagaatatacaaaggttccttcccaaccccgcaggcgttcagttggaagaccctgagtttcaggccagcaatattatgcactcaatcaacggctatgtgtttgatagtctccagctttctgtttgcctccatgaagtagcctattggtacatcttgtcaattggtgctcaaacagacttcctctccgtcttcttctccggctacacctttaagcacaagatggtgtatgaggacactctcacactctttccattttctggagaaaccgtgttcatgagcatggagaatccaggcctttggatcttgggttgccacaacagtgattttcgcaatcggggaatgactgctctcctcaaagtcagcagctgtgataagaacacaggcgactattacgaagattcttacgaggacataagtgcctactttgactacctggataacgccattgagcccagatcattctcccagaatcctcccgtgcttaaaaggcatcagcgcgaaatcaccagaactactcttcagtctgatcaagaggagattgactatgacgacaccattagcgtggaaatgaagaaggaggatttcgatatctatgacgaagatgagaaccagtctccgcggagctttcagaagaagacgcgacactacttcattgcagcagtcgaaaggctttgggactacggtatgtcatcatcccctcatgtgttgcgcaatagagctcagagtggaagtgttccacagttcaagaaagtcgtctttcaagagtttacagatggcagcttcacacagcctctctatcggggcgagcttaacgaacatttgggactccttggtccctatatccgagccgaagtggaggacaacattatggttacctttaggaatcaagcctctcgcccctacagcttctactcctccctcatcagttatgaggaggatcagagacaaggcgctgaaccacggaagaactttgtgaaaccgaatgagacgaagacctacttctggaaagtacagcaccacatggcccccacaaaagacgaattcgattgcaaagcatgggcgtatttttcagacgttgacttggagaaagatgtacattcaggacttattggtcctttgttggtgtgtcacactaacactctcaatccagcccatggcaggcaggtgacagtccaggaattcgctcttttctttaccatctttgatgagaccaagtcctggtacttcacggaaaacatggagcgcaattgcagagccccctgtaacatacagatggaggaccctacctttaaggaaaattatcggttccacgcaatcaacggatacattcgtgatacactccctggccttgtgatggctcaggaccaacgaatcaggtggtacctcctcagcatgggttctaatgagaacatacactccattcacttttcaggacatgtgttcactgtccggaagaaagaagagtataagatggccctctacaatttgtatccaggcgtgtttgagaccgttgaaatgcttccctctaaagctggcatctggagagtagagtgcttgatcggagaacatcttcacgcaggtatgagcaccttgttcctcgtgtacagcaacaaatgtcagaccccacttggcatggccagtggacacattcgcgactttcagatcacagcatctggccagtatggacaatgggccccaaagttggctcgcctccattactccggtagcataaatgcgtggtccactaaagaacctttcagctggattaaggtcgatcttcttgcccccatgatcatccacggcattaagacacagggagcgaggcagaaattctcctccctctacatctcacagttcattattatgtatagtttggacggcaagaagtggcaaacttatagaggtaacagtactggaacagacatggtgttcttcggcaacgttgatagctctggcatcaaacacaacatctttaatcctcccataatagctcggtacatcagattgcatccgacccactacagcattaggagtacactccgaatggagcttatgggttgcgacttgaattcctgttcaatgccactcggaatggagtctaaagccatctctgatgcacagataaccgccagtagctactttacgaacatgtttgctacgtggtcaccctctaaggcaaggcttcatttgcaaggccggtctaatgcctggagacctcaggtgaacaacccgaaagaatggctccaggtggactttcagaagaccatgaaagtaacaggtgtcactactcagggagttaagtccttggatactagcatgtatgtgaaggagttccttatttcctcatcacaagatggccaccagtggaccctcttctttcagaatggtaaggtcaaagtgtttcagggcaatcaagacagcttcacacccgtggtgaacagtcttgatcctccactcttgacacgataccttcgaatccatccacagtcttgggagcaccagattgcattgcgcatggaagtacttggatgcgaggctcaggacctctac

SEQ ID NO: 1244 - protein, 1457 aa, synthetic construct
  REGION 1..1457: note = Variant of human B-domain deleted Factor VIII
MQIELSTCFFLCLLRFCFSATRRYYLGAVELSWDYMQSDLGELPVDARFPPRVPKSFPFNTSVVYKKTLFVEFTDHLFNIAKPRPPWMGLLGPTIQAEVYDTVVITLKNMASHPVSLHAVGVSYWKASEGAEYDDQTSQREKEDDKVFPGGSHTYVWQVLKENGPMASDPPCLTYSYLSHVDLVKDLNSGLIGALLVCREGSLAKEKTQTLHKFILLFAVFDEGKSWHSETKNSLMQDRDAASARAWPKMHTVNGYVNRTLPGLIGCHRKSVYWHVIGMGTTPEVHSIFLEGHTFLVRNHRQASLGISPITFLTAQTLLMDLGQFLLFCHIPSHQHDGMEAYVKVDSCPEEPQLRMKNNEEAEDYDDDLTDSEMDVVRFDDDNSPSIIQARSVAKKHPKTWVHYIAAEEEDWDYAPLVLAPDDRSYKSQYLNNGPQRIGRKYKKVRFMAYTDETFKTREAIQHESGILGPLLYGEVGDTLLIIFKNQASRPYNIYPHGITDVRPLYSRRLPKGVKHLKDFPILPGEIFKYKWTVTVEDGPTKSDPRCLTRYYSSFVNMERDLASGLIGPLLICYKESVDQRGNQIMSDKRNVILFSVFDENRSWYLTENIQRFLPNPAGVQLEDPEFQASNIMHSINGYVFDSLQLSVCLHEVAYWYILSIGAQTDFLSVFFSGYTFKHKMVYEDTLTLFPFSGETVFMSMENPGLWILGCHNSDFRNRGMTALLKVSSCDKNTGDYYEDSYEDISAYFDYLDNAIEPRSFSQNPPVLKRHQREITRTTLQSDQEEIDYDDTISVEMKKEDFDIYDEDENQSPRSFQKKTRHYFIAAVERLWDYGMSSSPHVLRNRAQSGSVPQFKKVVFQEFTDGSFTQPLYRGELNEHLGLLGPYIRAEVEDNIMVTFRNQASRPYSFYSSLISYEEDQRQGAEPRKNFVKPNETKTYFWKVQHHMAPTKDEFDCKAWAYFSDVDLEKDVHSGLIGPLLVCHTNTLNPAHGRQVTVQEFALFFTIFDETKSWYFTENMERNCRAPCNIQMEDPTFKENYRFHAINGYIRDTLPGLVMAQDQRIRWYLLSMGSNENIHSIHFSGHVFTVRKKEEYKMALYNLYPGVFETVEMLPSKAGIWRVECLIGEHLHAGMSTLFLVYSNKCQTPLGMASGHIRDFQITASGQYGQWAPKLARLHYSGSINAWSTKEPFSWIKVDLLAPMIIHGIKTQGARQKFSSLYISQFIIMYSLDGKKWQTYRGNSTGTDMVFFGNVDSSGIKHNIFNPPIIARYIRLHPTHYSIRSTLRMELMGCDLNSCSMPLGMESKAISDAQITASSYFTNMFATWSPSKARLHLQGRSNAWRPQVNNPKEWLQVDFQKTMKVTGVTTQGVKSLDTSMYVKEFLISSSQDGHQWTLFFQNGKVKVFQGNQDSFTPVVNSLDPPLLTRYLRIHPQSWEHQIALRMEVLGCEAQDLY

SEQ ID NO: 1245 - DNA, 4371 bp, synthetic construct
  misc_feature 1..4371: note = Variant of human B-domain deleted Factor VIII
  source 1..4371: mol_type = other DNA
atgcagattgaactgtctacctgcttcttcctctgtttgctgaggttctgctttagcgccactagacggtactaccttggcgctgtggagctgtcctgggactatatgcagagtgatttgggagagcttcccgtcgacgcacgatttcctcctcgcgttccaaagtcatttccctttaacacaagccaggtgtacaagaagacgctcttcgtcgaattcaccgatcacctgttcaatatcgccaaacccagaccaccatggatgggtcttttggggcctaccatacaagcggaggtgtatgacacagttgttatcactctcaagaacatggcttctcatccggtaagtcttcacgcagtgggcgtgtcctactggaaagcttcagaaggagccgagtatgatgatcagacatcccagagggagaaagaagacgacaaggtatttccaggtgggtctcatacctatgtgtggcaagtgctcaaagagaatggccctatggcaagcgatccgccgtgtttgacttacagctacctttcacacgttgacctcgtcaaggacctcaactccgggttgattggagccttgttggtatgcagggaaggatctcttgccaaagagaagacacagaccctccacaagtttatccttctctttgctgtgttcgatgagggcaaaagttggcatagcgaaacgaagaattccctcatgcaggatcgcgacgcagccagcgccagagcttggcccaagatgcacactgtgaacggatatgtcaataggacgcttcctggcttgattgggtgtcatcggaaaagtgtctactggcacgtgatcggaatggggacaacaccagaggtccactccatatttctcgaaggccataccttccttgttcgaaaccacagacaggcatccttggggatctctcccattacctttctcactgcccaaacgctccttatggacttgggtcagttccttctcttttgccatatcccgtcacaccagcatgatggtatggaagcttatgtgaaagtcgacagttgtcctgaggagccacagttgcgcatgaagaataatgaagaagccgaggattacgacgacgatctcaccgattctgagatggacgtggtgaggtttgatgacgacaactctccctccatcattcaagctcggagcgtggcgaagaaacaccccaagacttgggtccactatatagcggcggaagaggaggattgggattacgctcctcttgtattggcaccagatgaccgctcatacaaaagccagtacctcaacaacggaccgcagagaattggccggaagtataagaaagtgcgatttatggcctatacagacgaaacctttaagacaagggaggccatccagcatgagagtgggattttgggacctcttctttacggcgaagttggtgataccctcctcatcatcttcaagaatcaagcttctcgcccctataacatttacccacacgggatcactgacgttaggcctttgtatagcagaagacttcccaaaggcgtgaagcatctcaaagacttccccattttgccaggcgagatctttaagtacaaatggaccgtcacagtggaagatggaccgactaaatcagaccctcgatgccttacgcggtactattcctccttcgtgaatatggagagagatttggcaagcggactcataggaccactcctcatctgttacaaggaatctgtagaccagaggggtaaccagattatgagtgataaacgcaatgtgatcctttttagcgtcttcgacgagaaccggtcctggtacttgaccgagaatatacaaaggttccttcccaaccccgcaggcgttcagttggaagaccctgagtttcaggccagcaatattatgcactcaatcaacggctatgtgtttgatagtctccagctttctgtttgcctccatgaagtagcctattggtacatcttgtcaattggtgctcaaacagacttcctctccgtcttcttctccggctacacctttaagcacaagatggtgtatgaggacactctcacactctttccattttctggagaaaccgtgttcatgagcatggagaatccaggcctttggatcttgggttgccacaacagtgattttcgcaatcggggaatgactgctctcctcaaagtcagcagctgtgattggaacacaggcgactattacgaagattcttacgaggacataagtgcctactttgactccaagaataacgccattgagcccagatcattctcccagaatcctcccgtgcttaaaaggcatcagcgcgaaatcaccagaactactcttcagtctgatcaagaggagattgactatgacgacaccataagcgtggaaatgaagaaggaggatttcgatatctatgacgaagatgagaaccagtctccgcggagctttcagaagaagacgcgacactacttcattgcagcagtcgaaaggctttgggactacggtatgtcatcatcccctcatgtgttgcgcaatagagctcagagtggaagtgttccacagttcaagaaagtcgtctttcaagagtttacagatggcagcttcacacagcctctctatcggggcgagcttaacgaacatttgggactccttggtccctatatccgagccgaagtggaggacaacattatggttacctttaggaatcaagcctctcgcccctacagcttctactcctccctcatcagttatgaggaggatcagagacaaggcgctgaaccacggaagaactttgtgaaaccgaatgagacgaagacctacttctggaaagtacagcaccacatggcccccacaaaagacgaattcgattgcaaagcatgggcgtatttttcagacgttgacttggagaaagatgtacattcaggacttattggtcctttgttggtgtgtcacactaacactctcaatccagcccatggcaggcaggtgacagtccaggaattcgctcttttctttaccatctttgatgagaccaagtcctggtacttcacggaaaacatggagcgcaattgcagagccccctgtaacatacagatggaggaccctacctttaaggaaaattatcggttccacgcaatcaacggatacattcgtgatacactccctggccttgtgatggctcaggaccaacgaatcaggtggtacctcctcagcatgggttctaatgagaacatacactccattcacttttcaggacatgtgttcactgtccggaagaaagaagagtataagatggccctctacaatttgtatccaggcgtgtttgagaccgttgaaatgcttccctctaaagctggcatctggagagtagagtgcttgatcggagaacatcttcacgcaggtatgagcaccttgttcctcgtgtacagcaacaaatgtcagaccccacttggcatggccagtggacacattcgcgactttcagatcacagcatctggccagtatggacaatgggccccaaagttggctcgcctccattactccggtagcataaatgcgtggtccactaaagaacctttcagctggattaaggtcgatcttcttgcccccatgatcatccacggcattaagacacagggagcgaggcagaaattctcctccctctacatctcacagttcattattatgtatagtttggacggcaagaagtggcaaacttatagaggtaacagtactggaacagacatggtgttcttcggcaacgttgatagctctggcatcaaacacaacatctttaatcctcccataatagctcggtacatcagattgcatccgacccactacagcattaggagtacactccgaatggagcttatgggttgcgacttgaattcctgttcaatgccactcggaatggagtctaaagccatctctgatgcacagataaccgccagtagctactttacgaacatgtttgctacgtggtcaccctctaaggcaaggcttcatttgcaaggccggtctaatgcctggagacctcaggtgaacaacccgaaagaatggctccaggtggactttcagaagaccatgaaagtaacaggtgtcactactcagggagttaagtccttggatactagcatgtatgtgaaggagttccttatttcctcatcacaagatggccaccagtggaccctcttctttcagaatggtaaggtcaaagtgtttcagggcaatcaagacagcttcacacccgtggtgaacagtcttgatcctccactcttgacacgataccttcgaatccatccacagtcttgggagcaccagattgcattgcgcatggaagtacttggatgcgaggctcaggacctctac

SEQ ID NO: 1246 - protein, 1457 aa, synthetic construct
  REGION 1..1457: note = Variant of human B-domain deleted Factor VIII
MQIELSTCFFLCLLRFCFSATRRYYLGAVELSWDYMQSDLGELPVDARFPPRVPKSFPFNTSQVYKKTLFVEFTDHLFNIAKPRPPWMGLLGPTIQAEVYDTVVITLKNMASHPVSLHAVGVSYWKASEGAEYDDQTSQREKEDDKVFPGGSHTYVWQVLKENGPMASDPPCLTYSYLSHVDLVKDLNSGLIGALLVCREGSLAKEKTQTLHKFILLFAVFDEGKSWHSETKNSLMQDRDAASARAWPKMHTVNGYVNRTLPGLIGCHRKSVYWHVIGMGTTPEVHSIFLEGHTFLVRNHRQASLGISPITFLTAQTLLMDLGQFLLFCHIPSHQHDGMEAYVKVDSCPEEPQLRMKNNEEAEDYDDDLTDSEMDVVRFDDDNSPSIIQARSVAKKHPKTWVHYIAAEEEDWDYAPLVLAPDDRSYKSQYLNNGPQRIGRKYKKVRFMAYTDETFKTREAIQHESGILGPLLYGEVGDTLLIIFKNQASRPYNIYPHGITDVRPLYSRRLPKGVKHLKDFPILPGEIFKYKWTVTVEDGPTKSDPRCLTRYYSSFVNMERDLASGLIGPLLICYKESVDQRGNQIMSDKRNVILFSVFDENRSWYLTENIQRFLPNPAGVQLEDPEFQASNIMHSINGYVFDSLQLSVCLHEVAYWYILSIGAQTDFLSVFFSGYTFKHKMVYEDTLTLFPFSGETVFMSMENPGLWILGCHNSDFRNRGMTALLKVSSCDWNTGDYYEDSYEDISAYFDSKNNAIEPRSFSQNPPVLKRHQREITRTTLQSDQEEIDYDDTISVEMKKEDFDIYDEDENQSPRSFQKKTRHYFIAAVERLWDYGMSSSPHVLRNRAQSGSVPQFKKVVFQEFTDGSFTQPLYRGELNEHLGLLGPYIRAEVEDNIMVTFRNQASRPYSFYSSLISYEEDQRQGAEPRKNFVKPNETKTYFWKVQHHMAPTKDEFDCKAWAYFSDVDLEKDVHSGLIGPLLVCHTNTLNPAHGRQVTVQEFALFFTIFDETKSWYFTENMERNCRAPCNIQMEDPTFKENYRFHAINGYIRDTLPGLVMAQDQRIRWYLLSMGSNENIHSIHFSGHVFTVRKKEEYKMALYNLYPGVFETVEMLPSKAGIWRVECLIGEHLHAGMSTLFLVYSNKCQTPLGMASGHIRDFQITASGQYGQWAPKLARLHYSGSINAWSTKEPFSWIKVDLLAPMIIHGIKTQGARQKFSSLYISQFIIMYSLDGKKWQTYRGNSTGTDMVFFGNVDSSGIKHNIFNPPIIARYIRLHPTHYSIRSTLRMELMGCDLNSCSMPLGMESKAISDAQITASSYFTNMFATWSPSKARLHLQGRSNAWRPQVNNPKEWLQVDFQKTMKVTGVTTQGVKSLDTSMYVKEFLISSSQDGHQWTLFFQNGKVKVFQGNQDSFTPVVNSLDPPLLTRYLRIHPQSWEHQIALRMEVLGCEAQDLY

SEQ ID NO: 1247 - DNA, 4371 bp, synthetic construct
  misc_feature 1..4371: note = Variant of human B-domain deleted Factor VIII
  source 1..4371: mol_type = other DNA
atgcagattgaactgtctacctgcttcttcctctgtttgctgaggttctgctttagcgccactagacggtactaccttggcgctgtggagctgtcctgggactatatgcagagtgatttgggagagcttcccgtcgacgcacgatttcctcctcgcgttccaaagtcatttccctttaacacaagcgtggtgtacaagaagacgctcttcgtcgaattcaccgatcacctgttcaatatcgccaaacccagaccaccatggatgggtcttttggggcctaccatacaagcggaggtgtatgacacagttgttatcactctcaagaacatggcttctcatccggtaagtcttcacgcagtgggcgtgtcctactggaaagcttcagaaggagccgagtatgatgatcagacatcccagagggagaaagaagacgacaaggtatttccaggtgggtctcatacctatgtgtggcaagtgctcaaagagaatggccctatggcaagcgatccgccgtgtttgacttacagctacctttcacacgttgacctcgtcaaggacctcaactccgggttgattggagccttgttggtatgcagggaaggatctcttgccaaagagaagacacagaccctccacaagtttatccttctctttgctgtgttcgatgagggcaaaagttggcatagcgaaacgaagaattccctcatgcaggatcgcgacgcagccagcgccagagcttggcccaagatgcacactgtgaacggatatgtcaataggacgcttcctggcttgattgggtgtcatcggaaaagtgtctactggcacgtgatcggaatggggacaacaccagaggtccactccatatttctcgaaggccataccttccttgttcgaaaccacagacaggcatccttggggatctctcccattacctttctcactgcccaaacgctccttatggacttgggtcagttccttctcttttgccatatcccgtcacaccagcatgatggtatggaagcttatgtgaaagtcgacagttgtcctgaggagccacagttgcgcatgaagaataatgaagaagccgaggattacgacgacgatctcaccgattctgagatggacgtggtgaggtttgatgacgacaactctccctccatcattcaagctcggagcgtggcgaagaaacaccccaagacttgggtccactatatagcggcggaagaggaggattgggattacgctcctcttgtattggcaccagatgaccgctcatacaaaagccagtacctcaacaacggaccgcagagaattggccggaagtataagaaagtgcgatttatggcctatacagacgaaacctttaagacaagggaggccatccagcatgagagtgggattttgggacctcttctttacggcgaagttggtgataccctcctcatcatcttcaagaatcaagcttctcgcccctataacatttacccacacgggatcactgacgttaggcctttgtatagcagaagacttcccaaaggcgtgaagcatctcaaagacttccccattttgccaggcgagatctttaagtacaaatggaccgtcacagtggaagatggaccgactaaatcagaccctcgatgccttacgcggtactattcctccttcgtgaatatggagagagatttggcaagcggactcataggaccactcctcatctgttacaaggaatctgtagaccagaggggtaaccagattatgagtgataaacgcaatgtgatcctttttagcgtcttcgacgagaaccggtcctggtacttgaccgagaatatacaaaggttccttcccaaccccgcaggcgttcagttggaagaccctgagtttcaggccagcaatattatgcactcaatcaacggctatgtgtttgatagtctccagctttctgtttgcctccatgaagtagcctattggtacatcttgtcaattggtgctcaaacagacttcctctccgtcttcttctccggctacacctttaagcacaagatggtgtatgaggacactctcacactctttccattttctggagaaaccgtgttcatgagcatggagaatccaggcctttggatcttgggttgccacaacagtgattttcgcaatcggggaatgactgctctcctcaaagtcagcagctgtgataagaacacaggcgactattacgaagattcttacgaggacataagtgcctactttgactcgggcaataacgccattgagcccagatcattctcccagaatcctcccgtgcttaaaaggcatcagcgcgaaatcaccagaactactcttcagtctgatcaagaggagattgactatgacgacaccattagcgtggaatggaagaaggaggatttcgatatctatgacgaagatgagaaccagtctccgcggatctttcagaagaaaacgcgacactacttcattgcagcagtcgaaaggctttgggactacggtatgtcatcatcccctcatgtgttgcgcaatagagctcagagtggaagtgttccacagttcaagaaagtcgtctttcaagagtttacagatggcagcttcacacagcctctctatcggggcgagcttaacgaacatttgggactccttggtccctatatccgagccgaagtggaggacaacattatggttacctttaggaatcaagcctctcgcccctacagcttctactcctccctcatcagttatgaggaggatcagagaatgggcgctgaaccacggaagaactttgtgaaaccgaatgagacgaagacctacttctggaaagtacagcaccacatggcccccacaaaagacgaattcgattgcaaagcatgggcgtatttttcagacgttgacttggagaaagatgtacattcaggacttattggtcctttgttggtgtgtcacactaacactctcaatccagcccatggcaggcaggtgacagtccaggaattcgctcttttctttaccatctttgatgagaccaagtcctggtacttcacggaaaacatggagcgcaattgcagagccccctgtaacatacagatggaggaccctacctttaaggaaaattatcggttccacgcaatcaacggatacattcgtgatacactccctggccttgtgatggctcaggaccaacgaatcaggtggtacctcctcagcatgggttctaatgagaacatacactccattcacttttcaggacatgtgttcactgtccggaagaaagaagagtataagatggccctctacaatttgtatccaggcgtgtttgagaccgttgaaatgcttccctctaaagctggcatctggagagtagagtgcttgatcggagaacatcttcacgcaggtatgagcaccttgttcctcgtgtacagcaacaaatgtcagaatccacttggcatggccagtggacacattcgcgactttcagatcacagcatctggccagtatggacaatgggccccaaagttggctcgcctccattactccggtagcataaatgcgtggtccactaaagaacctttcagctggattaaggtcgatcttcttgcccccatgatcatccacggcattaagacacagggagcgaggcagaaattctcctccctctacatctcacagttcattattatgtatagtttggacggcaagaagtggcaaacttatagaggtaacagtactggaacagacatggtgttcttcggcaacgttgatagctctggcatcaaacacaacatctttaatcctcccataatagctcggtacatcagattgcatccgacccactacagcattaggagtacactccgaatggagcttatgggttgcgacttgaattcctgttcaatgccactcggaatggagtctaaagccatctctgatgcacagataaccgccagtagctactttacgaacatgtttgctacgtggtcaccctctaaggcaaggcttcatttgcaaggccggtctaatgcctggagacctcaggtgaacaacccgaaagaatggctccaggtggactttcagaagaccatgaaagtaacaggtgtcactactcagggagttaagtccttggatactagcatgtatgtgaaggagttccttatttcctcatcacaagatggccaccagtggaccctcttctttcagaatggtaaggtcaaagtgtttcagggcaatcaagacagcttcacacccgtggtgaacagtcttgatcctccactcttgacacgataccttcgaatccatccacagtcttgggagcaccagattgcattgcgcatggaagtacttggatgcgaggctcaggacctctac

SEQ ID NO: 1248 - protein, 1457 aa, synthetic construct
  REGION 1..1457: note = Variant of human B-domain deleted Factor VIII
MQIELSTCFFLCLLRFCFSATRRYYLGAVELSWDYMQSDLGELPVDARFPPRVPKSFPFNTSVVYKKTLFVEFTDHLFNIAKPRPPWMGLLGPTIQAEVYDTVVITLKNMASHPVSLHAVGVSYWKASEGAEYDDQTSQREKEDDKVFPGGSHTYVWQVLKENGPMASDPPCLTYSYLSHVDLVKDLNSGLIGALLVCREGSLAKEKTQTLHKFILLFAVFDEGKSWHSETKNSLMQDRDAASARAWPKMHTVNGYVNRTLPGLIGCHRKSVYWHVIGMGTTPEVHSIFLEGHTFLVRNHRQASLGISPITFLTAQTLLMDLGQFLLFCHIPSHQHDGMEAYVKVDSCPEEPQLRMKNNEEAEDYDDDLTDSEMDVVRFDDDNSPSIIQARSVAKKHPKTWVHYIAAEEEDWDYAPLVLAPDDRSYKSQYLNNGPQRIGRKYKKVRFMAYTDETFKTREAIQHESGILGPLLYGEVGDTLLIIFKNQASRPYNIYPHGITDVRPLYSRRLPKGVKHLKDFPILPGEIFKYKWTVTVEDGPTKSDPRCLTRYYSSFVNMERDLASGLIGPLLICYKESVDQRGNQIMSDKRNVILFSVFDENRSWYLTENIQRFLPNPAGVQLEDPEFQASNIMHSINGYVFDSLQLSVCLHEVAYWYILSIGAQTDFLSVFFSGYTFKHKMVYEDTLTLFPFSGETVFMSMENPGLWILGCHNSDFRNRGMTALLKVSSCDKNTGDYYEDSYEDISAYFDSGNNAIEPRSFSQNPPVLKRHQREITRTTLQSDQEEIDYDDTISVEWKKEDFDIYDEDENQSPRIFQKKTRHYFIAAVERLWDYGMSSSPHVLRNRAQSGSVPQFKKVVFQEFTDGSFTQPLYRGELNEHLGLLGPYIRAEVEDNIMVTFRNQASRPYSFYSSLISYEEDQRMGAEPRKNFVKPNETKTYFWKVQHHMAPTKDEFDCKAWAYFSDVDLEKDVHSGLIGPLLVCHTNTLNPAHGRQVTVQEFALFFTIFDETKSWYFTENMERNCRAPCNIQMEDPTFKENYRFHAINGYIRDTLPGLVMAQDQRIRWYLLSMGSNENIHSIHFSGHVFTVRKKEEYKMALYNLYPGVFETVEMLPSKAGIWRVECLIGEHLHAGMSTLFLVYSNKCQNPLGMASGHIRDFQITASGQYGQWAPKLARLHYSGSINAWSTKEPFSWIKVDLLAPMIIHGIKTQGARQKFSSLYISQFIIMYSLDGKKWQTYRGNSTGTDMVFFGNVDSSGIKHNIFNPPIIARYIRLHPTHYSIRSTLRMELMGCDLNSCSMPLGMESKAISDAQITASSYFTNMFATWSPSKARLHLQGRSNAWRPQVNNPKEWLQVDFQKTMKVTGVTTQGVKSLDTSMYVKEFLISSSQDGHQWTLFFQNGKVKVFQGNQDSFTPVVNSLDPPLLTRYLRIHPQSWEHQIALRMEVLGCEAQDLY

SEQ ID NO: 1249 - DNA, 4371 bp, synthetic construct
  misc_feature 1..4371: note = Variant of human B-domain deleted Factor VIII
  source 1..4371: mol_type = other DNA
atgcagattgaactgtctacctgcttcttcctctgtttgctgaggttctgctttagcgccactagacggtactaccttggcgctgtggagctgtcctgggactatatgcagagtgatttgggagagcttcccgtcgacgcacgatttcctcctcgcgttccaaagtcatttccctttaacacaagcgtggtgtacaagaagacgctcttcgtcgaattcaccgatcacctgttcaatatcgccaaacccagaccaccatggatgggtcttttggggcctaccatacaagcggaggtgtatgacacagttgttatcactctcaagaacatggcttctcatccggtaagtcttcacgcagtgggcgtgtcctactggaaagcttcagaaggagccgagtatgatgatcagacatcccagagggagaaagaagacgacaaggtatttccaggtgggtctcatacctatgtgtggcaagtgctcaaagagaatggccctatggcaagcgatccgccgtgtttgacttacagctacctttcacacgttgacctcgtcaaggacctcaactccgggttgattggagccttgttggtatgcagggaaggatctcttgccaaagagaagacacagaccctccacaagtttatccttctctttgctgtgttcgatgagggcaaaagttggcatagcgaaacgaagaattccctcatgcaggatcgcgacgcagccagcgccagagcttggcccaagatgcacactgtgaacggatatgtcaataggacgcttcctggcttgattgggtgtcatcggaaaagtgtctactggcacgtgatcggaatggggacaacaccagaggtccactccatatttctcgaaggccataccttccttgttcgaaaccacagacaggcatccttggggatctctcccattacctttctcactgcccaaacgctccttatggacttgggtcagttccttctcttttgccatatcccgtcacaccagcatgatggtatggaagcttatgtgaaagtcgacagttgtcctgaggagccacagttgcgcatgaagaataatgaagaagccgaggattacgacgacgatctcaccgattctgagatggacgtggtgaggtttgatgacgacaactctccctccatcattcaagctcggagcgtggcgaagaaacaccccaagacttgggtccactatatagcggcggaagaggaggattgggattacgctcctcttgtattggcaccagatgaccgctcatacaaaagccagtacctcaacaacggaccgcagagaattggccggaagtataagaaagtgcgatttatggcctatacagacgaaacctttaagacaagggaggccatccagcatgagagtgggattttgggacctcttctttacggcgaagttggtgataccctcctcatcatcttcaagaatcaagcttctcgcccctataacatttacccacacgggatcactgacgttaggcctttgtatagcagaagacttcccaaaggcgtgaagcatctcaaagacttccccattttgccaggcgagatctttaagtacaaatggaccgtcacagtggaagatggaccgactaaatcagaccctcgatgccttacgcggtactattcctccttcgtgaatatggagagagatttggcaagcggactcataggaccactcctcatctgttacaaggaatctgtagaccagaggggtaaccagattatgagtgataaacgcaatgtgatcctttttagcgtcttcgacgagaaccggtcctggtacttgaccgagaatatacaaaggttccttcccaaccccgcaggcgttcagttggaagaccctgagtttcaggccagcaatattatgcactcaatcaacggctatgtgtttgatagtctccagctttctgtttgcctccatgaagtagcctattggtacatcttgtcaattggtgctcaaacagacttcctctccgtcttcttctccggctacacctttaagcacaagatggtgtatgaggacactctcacactctttccattttctggagaaaccgtgttcatgagcatggagaatccaggcctttggatcttgggttgccacaacagtgattttcgcaatcggggaatgactgctctcctcaaagtcagcagctgtgataagaacacaggcgactattacgaagattcttacgaggacataagtgactactttgactcgaaagataacgccattgagcccagatcattctcccagaatcctcccgtgcttaaaaggcatcagcgcgaaatcaccagaactactcttcagtctgatcaagaggagattgactatgacgacaccataagcgtggaaatgaagaaggaggatttcgatatctatgacgaagatgagaaccagtctccgcggagctttcagaagaagacgcgacactacttcattgcagcagtcgaaaggctttgggactacggtatgtcatcatcccctcatgtgttgcgcaatagagctcagagtggaagtgttccacagttcaagaaagtcgtctttcaagagtttacagatggcagcttcacacagcctctctatcggggcgagcttaacgaacatttgggactccttggtccctatatccgagccgaagtggaggacaacattatggttacctttaggaatcaagcctctcgcccctacagcttctactcctccctcatcagttatgaggaggatcagagacaaggcgctgaaccacggaagaactttgtgaaaccgaatgagacgaagacctacttctggaaagtacagcaccacatggcccccacaaaagacgaattcgattgcaaagcatgggcgtatttttcagacgttgacttggagaaagatgtacattcaggacttattggtcctttgttggtgtgtcacactaacactctcaatccagcccatggcaggcaggtgacagtccaggaattcgctcttttctttaccatctttgatgagaccaagtcctggtacttcacggaaaacatggagcgcaattgcagagccccctgtaacatacagatggaggaccctacctttaaggaaaattatcggttccacgcaatcaacggatacattatggatacactccctggccttgtgatggctcaggaccaacgaatcaggtggtacctcctcagcatgggttctaatgagaacatacactccattcacttttcaggacatgtgttcactgtccggaagaaagaagagtataagatggccctctacaatttgtatccaggcgtgtttgagaccgttgaaatgcttccctctaaagctggcatctggagagtagagtgcttgatcggagaacatcttcacgcaggtatgagcaccttgttcctcgtgtacagcaacaaatgtcagaccccacttggcatggccagtggacacattcgcgactttcagatcacagcatctggccagtatggacaatgggccccaaagttggctcgcctccattactccggtagcataaatgcgtggtccactaaagaacctttcagctggattaaggtcgatcttcttgcccccatgatcatccacggcattaagacacagggagcgaggcagaaattctcctccctctacatctcacagttcattattatgtatagtttggacggcaagaagtggcaaacttatagaggtaacagtactggaacagacatggtgttcttcggcaacgttgatagctctggcatcaaacacaacatctttaatcctcccataatagctcggtacatcagattgcatccgacccactacagcattaggagtacactccgaatggagcttatgggttgcgacttgaattcctgttcaatgccactcggaatggagtctaaagccatctctgatgcacagataaccgccagtagctactttacgaacatgtttgctacgtggtcaccctctaaggcaaggcttcatttgcaaggccggtctaatgcctggagacctcaggtgaacaacccgaaagaatggctccaggtggactttcagaagaccatgaaagtaacaggtgtcactactcagggagttaagtccttggatactagcatgtatgtgaaggagttccttatttcctcatcacaagatggccaccagtggaccctcttctttcagaatggtaaggtcaaagtgtttcagggcaatcaagacagcttcacacccgtggtgaacagtcttgatcctccactcttgacacgataccttcgaatccatccacagtcttgggagcaccagattgcattgcgcatggaagtacttggatgcgaggctcaggacctctac

SEQ ID NO: 1250 - protein, 1457 aa, synthetic construct
  REGION 1..1457: note = Variant of human B-domain deleted Factor VIII
MQIELSTCFFLCLLRFCFSATRRYYLGAVELSWDYMQSDLGELPVDARFPPRVPKSFPFNTSVVYKKTLFVEFTDHLFNIAKPRPPWMGLLGPTIQAEVYDTVVITLKNMASHPVSLHAVGVSYWKASEGAEYDDQTSQREKEDDKVFPGGSHTYVWQVLKENGPMASDPPCLTYSYLSHVDLVKDLNSGLIGALLVCREGSLAKEKTQTLHKFILLFAVFDEGKSWHSETKNSLMQDRDAASARAWPKMHTVNGYVNRTLPGLIGCHRKSVYWHVIGMGTTPEVHSIFLEGHTFLVRNHRQASLGISPITFLTAQTLLMDLGQFLLFCHIPSHQHDGMEAYVKVDSCPEEPQLRMKNNEEAEDYDDDLTDSEMDVVRFDDDNSPSIIQARSVAKKHPKTWVHYIAAEEEDWDYAPLVLAPDDRSYKSQYLNNGPQRIGRKYKKVRFMAYTDETFKTREAIQHESGILGPLLYGEVGDTLLIIFKNQASRPYNIYPHGITDVRPLYSRRLPKGVKHLKDFPILPGEIFKYKWTVTVEDGPTKSDPRCLTRYYSSFVNMERDLASGLIGPLLICYKESVDQRGNQIMSDKRNVILFSVFDENRSWYLTENIQRFLPNPAGVQLEDPEFQASNIMHSINGYVFDSLQLSVCLHEVAYWYILSIGAQTDFLSVFFSGYTFKHKMVYEDTLTLFPFSGETVFMSMENPGLWILGCHNSDFRNRGMTALLKVSSCDKNTGDYYEDSYEDISDYFDSKDNAIEPRSFSQNPPVLKRHQREITRTTLQSDQEEIDYDDTISVEMKKEDFDIYDEDENQSPRSFQKKTRHYFIAAVERLWDYGMSSSPHVLRNRAQSGSVPQFKKVVFQEFTDGSFTQPLYRGELNEHLGLLGPYIRAEVEDNIMVTFRNQASRPYSFYSSLISYEEDQRQGAEPRKNFVKPNETKTYFWKVQHHMAPTKDEFDCKAWAYFSDVDLEKDVHSGLIGPLLVCHTNTLNPAHGRQVTVQEFALFFTIFDETKSWYFTENMERNCRAPCNIQMEDPTFKENYRFHAINGYIMDTLPGLVMAQDQRIRWYLLSMGSNENIHSIHFSGHVFTVRKKEEYKMALYNLYPGVFETVEMLPSKAGIWRVECLIGEHLHAGMSTLFLVYSNKCQTPLGMASGHIRDFQITASGQYGQWAPKLARLHYSGSINAWSTKEPFSWIKVDLLAPMIIHGIKTQGARQKFSSLYISQFIIMYSLDGKKWQTYRGNSTGTDMVFFGNVDSSGIKHNIFNPPIIARYIRLHPTHYSIRSTLRMELMGCDLNSCSMPLGMESKAISDAQITASSYFTNMFATWSPSKARLHLQGRSNAWRPQVNNPKEWLQVDFQKTMKVTGVTTQGVKSLDTSMYVKEFLISSSQDGHQWTLFFQNGKVKVFQGNQDSFTPVVNSLDPPLLTRYLRIHPQSWEHQIALRMEVLGCEAQDLY

SEQ ID NO: 1251 - DNA, 4371 bp, synthetic construct
  misc_feature 1..4371: note = Variant of human B-domain deleted Factor VIII
  source 1..4371: mol_type = other DNA
atgcagattgaactgtctacctgcttcttcctctgtttgctgaggttctgctttagcgccactagacggtactaccttggcgctgtggagctgtcctgggactatatgcagagtgatttgggagagcttcccgtcgacgcacgatttcctcctcgcgttccaaagtcatttccctttaacacaagccaggtgtacaagaagacgctcttcgtcgaattcaccgatcacctgttcaatatcgccaaacccagaccaccatggatgggtcttttggggcctaccatacaagcggaggtgtatgacacagttgttatcactctcaagaacatggcttctcatccggtaagtcttcacgcagtgggcgtgtcctactggaaagcttcagaaggagccgagtatgatgatcagacatcccagagggagaaagaagacgacaaggtatttccaggtgggtctcatacctatgtgtggcaagtgctcaaagagaatggccctatggcaagcgatccgccgtgtttgacttacagctacctttcacacgttgacctcgtcaaggacctcaactccgggttgattggagccttgttggtatgcagggaaggatctcttgccaaagagaagacacagaccctgcacaagtttatccttctctttgctgtgttcgatgagggcaaaagttggcatagcgaaacgaagaattccctcatgcaggatcgcgacgcagccagcgccagagcttggcccaagatgcacactgtgaacggatatgtcaataggacgcttcctggcttgattgggtgtcatcggaaaagtgtctactggcacgtgatcggaatggggacaacaccagaggtccactccatatttctcgaaggccataccttccttgttcgaaaccacagacaggcatccttggggatctctcccattacctttctcactgcccaaacgctccttatggacttgggtcagttccttctcttttgccatatcccgtcacaccagcatgatggtatggaagcttatgtgaaagtcgacagttgtcctgaggagccacagttgcgcatgaagaataatgaagaagccgaggattacgacgacgatctcaccgattctgagatggacgtggtgaggtttgatgacgacaactctccctccatcattcaagctcggagcggggcgaagaaacaccccaagacttgggtccactatatagcggcggaagaggaggattgggattacgctcctcttgtattggcaccagatgaccgctcatacaaaagccagtacctcaacaacggaccgcagagaattggccggaagtataagaaagtgcgatttatggcctatacagacgaaacctttaagacaagggaggccatccagcatgagagtgggattttgggacctcttctttacggcgaagttggtgataccctcctcatcatcttcaagaatcaagcttctcgcccctataacatttacccacacgggatcactgacgttaggcctttgtatagcagaagacttcccaaaggcgtgaagcatctcaaagacttccccattttgccaggcgagatctttaagtacaaatggaccgtcacagtcgaagatggaccgactaaatcagaccctcgatgccttacgcggtactattcctccttcgtgaatatggagagagatttggcaagcggactcataggaccactcctcatctgttacaaggaatctgtagaccagaggggtaaccagattatgagtgataaacgcaatgtgatcctttttagcgtcttcgacgagaaccggtcctggtacttgaccgagaatatacaaaggttccttcccaacccggcaggcgttcagctggaagaccctgagtttcaggccagcaatattatgcactcaatcaacggctatgtgtttgatagtctccagctttctgtttgcctccatgaagtagcctattggtacatcttgtcaattggtgctcaaacagacttcctctccgtcttcttctccggctacacctttaagcacaaggcagtgtatgaggacactctcacactctttccattttctggagaaaccgtgttcatgagcatggagaatccaggcctttggatcttgggttgccacaacagtgattttcgcaatcggggaatgactgctctcctcaaagtcagcagctgtgattggaacacaggcgactattacgaagattcttacgaggacataagtgcctactttgactccaagaataacgccattgagcccagatcattctcccagaatcctcccgtgcttaaaaggcatcagcgcgaaggtaccagaactactcttcagtctgatcaagaggagattgactatgacgacaccattagcgtggaaatgaagaaggaggatttcgatatctatgacgaagatgagaaccagtctccgcggagctttcagaagaagacgcgacactacttcattgcagcagtcgaaaggctttgggactacggtatgtcatcatcccctcatgtgttgcgcaatagagctcagagtggaagtgttccacagttcaagaaagtcgtctttcaagagtttacagatggcagcttcacacagcctctctatcggggcgagcttaacgaacatttgggactccttggtccctatatccgagccgaagtggaggacaacattatggttacctttaggaatcaagcctctcgcccctacagcttctactcctccctcatcagttatgaggaggatcagagacaaggcgctgaaccacggaagaactttgtgaaaccgaatgagacgaagacctacttctggaaagtacagcaccacatggcccccacaaaagacgaattcgattgcaaagcatgggcgtatttttcagacgttgacttggagaaagatgtacattcaggacttattggtcctttgttggtgtgtcacactaacactctcaatccagcccatggcaggcaggtgacagtccaggaattcgctcttttctttaccatctttgatgagaccaagtcctggtacttcacggaaaacatggagcgcaattgcagagccccctgtaacatacagatggaggaccctacctttaaggaaaattatcggttccacgcaatcaacggatacattatggatacactccctggccttgtgatggctcaggaccaacgaatcaggtggtacctcctcagcatgggttctaatgagaacatacactccattcacttttcaggacatgtgttcactgtccggaagaaagaagagtataagatggccctctacaatttgtatccaggcgtgtttgagaccgttgaaatgcttccctctaaagctggcatctggagagtagagtgcttgatcggagaacatcttcacgcaggtatgagcaccttgttcctcgtgtacagcaacaaatgtcagaatccacttggcatggccagtggacacattcgcgactttcagatcacagcatctggccagtatggacaatgggccccaaagttggctcgcctccattactccggtagcataaatgcgtggtccactaaagaacctttcagctggattaaggtcgatcttcttgcccccatgatcatccacggcattaagacacagggagcgaggcagaaattctcctccctctacatctcacagttcattattatgtatagtttggacggcaagaagtggcaaacttatagaggtaacagtactggaacagacatggtgttcttcggcaacgttgatagctctggcatcaaacacaacatctttaatcctcccataatagctcggtacatcagattgcatccgacccactacagcattaggagtacactccgaatggagcttatgggttgcgacttgaattcctgttcaatgccactcggaatggagtctaaagccatctctgatgcacagataaccgccagtagctactttacgaacatgtttgctacgtggtcaccctctaaggcaaggcttcatttgcaaggccggtctaatgcctggagacctcaggtgaacaacccgaaagaatggctccaggtggactttcagaagaccatgaaagtaacaggtgtcactactcagggagttaagtccttggatactagcatgtatgtgaaggagttccttatttcctcatcacaagatggccaccagtggaccctcttctttcagaatggtaaggtcaaagtgtttcagggcaatcaagacagcttcacacccgtggtgaacagtcttgatcctccactcttgacacgataccttcgaatccatccacagtcttgggagcaccagattgcattgcgcatggaagtacttggatgcgaggctcaggacctctac

SEQ ID NO: 1252 - protein, 1457 aa, synthetic construct
  REGION 1..1457: note = Variant of human B-domain deleted Factor VIII
MQIELSTCFFLCLLRFCFSATRRYYLGAVELSWDYMQSDLGELPVDARFPPRVPKSFPFNTSQVYKKTLFVEFTDHLFNIAKPRPPWMGLLGPTIQAEVYDTVVITLKNMASHPVSLHAVGVSYWKASEGAEYDDQTSQREKEDDKVFPGGSHTYVWQVLKENGPMASDPPCLTYSYLSHVDLVKDLNSGLIGALLVCREGSLAKEKTQTLHKFILLFAVFDEGKSWHSETKNSLMQDRDAASARAWPKMHTVNGYVNRTLPGLIGCHRKSVYWHVIGMGTTPEVHSIFLEGHTFLVRNHRQASLGISPITFLTAQTLLMDLGQFLLFCHIPSHQHDGMEAYVKVDSCPEEPQLRMKNNEEAEDYDDDLTDSEMDVVRFDDDNSPSIIQARSGAKKHPKTWVHYIAAEEEDWDYAPLVLAPDDRSYKSQYLNNGPQRIGRKYKKVRFMAYTDETFKTREAIQHESGILGPLLYGEVGDTLLIIFKNQASRPYNIYPHGITDVRPLYSRRLPKGVKHLKDFPILPGEIFKYKWTVTVEDGPTKSDPRCLTRYYSSFVNMERDLASGLIGPLLICYKESVDQRGNQIMSDKRNVILFSVFDENRSWYLTENIQRFLPNPAGVQLEDPEFQASNIMHSINGYVFDSLQLSVCLHEVAYWYILSIGAQTDFLSVFFSGYTFKHKAVYEDTLTLFPFSGETVFMSMENPGLWILGCHNSDFRNRGMTALLKVSSCDWNTGDYYEDSYEDISAYFDSKNNAIEPRSFSQNPPVLKRHQREGTRTTLQSDQEEIDYDDTISVEMKKEDFDIYDEDENQSPRSFQKKTRHYFIAAVERLWDYGMSSSPHVLRNRAQSGSVPQFKKVVFQEFTDGSFTQPLYRGELNEHLGLLGPYIRAEVEDNIMVTFRNQASRPYSFYSSLISYEEDQRQGAEPRKNFVKPNETKTYFWKVQHHMAPTKDEFDCKAWAYFSDVDLEKDVHSGLIGPLLVCHTNTLNPAHGRQVTVQEFALFFTIFDETKSWYFTENMERNCRAPCNIQMEDPTFKENYRFHAINGYIMDTLPGLVMAQDQRIRWYLLSMGSNENIHSIHFSGHVFTVRKKEEYKMALYNLYPGVFETVEMLPSKAGIWRVECLIGEHLHAGMSTLFLVYSNKCQNPLGMASGHIRDFQITASGQYGQWAPKLARLHYSGSINAWSTKEPFSWIKVDLLAPMIIHGIKTQGARQKFSSLYISQFIIMYSLDGKKWQTYRGNSTGTDMVFFGNVDSSGIKHNIFNPPIIARYIRLHPTHYSIRSTLRMELMGCDLNSCSMPLGMESKAISDAQITASSYFTNMFATWSPSKARLHLQGRSNAWRPQVNNPKEWLQVDFQKTMKVTGVTTQGVKSLDTSMYVKEFLISSSQDGHQWTLFFQNGKVKVFQGNQDSFTPVVNSLDPPLLTRYLRIHPQSWEHQIALRMEVLGCEAQDLY

SEQ ID NO: 1253 - DNA, 4371 bp, synthetic construct
  misc_feature 1..4371: note = Variant of human B-domain deleted Factor VIII
  source 1..4371: mol_type = other DNA
atgcagattgaactgtctacctgcttcttcctctgtttgctgaggttctgctttagcgccactagacggtactaccttggcgctgtggagctgtcctgggactatatgcagagtgatttgggagagcttcccgtcgacgcacgatttcctcctcgcgttccaaagtcatttccctttaacacaagccaggtgtacaagaagacgctcttcgtcgaattcaccgatcacctgttcaatatcgccaaacccagaccaccatggatgggtcttttggggcctaccatacaagcggaggtgtatgacacagttgttatcactctcaagaacatggcttctcatccggtaagtcttcacgcagtgggcgtgtcctactggaaagcttcagaaggagccgagtatgatgatcagacatcccagagggagaaagaagacgacaaggtatttccaggtgggtctcatacctatgtgtggcaagtgctcaaagagaatggccctatggcaagcgatccgccgtgtttgacttacagctacctttcacacgttgacctcgtcaaggacctcaactccgggttgattggagccttgttggtatgcagggaaggatctcttgccaaagagaagacacagaccctgcacaagtttatccttctctttgctgtgttcgatgagggcaaaagttggcatagcgaaacgaagaattccctcatgcaggatcgcgacgcagccagcgccagagcttggcccaagatgcacactgtgaacggatatgtcaataggacgcttcctggcttgattgggtgtcatcggaaaagtgtctactggcacgtgatcggaatggggacaacaccagaggtccactccatatttctcgaaggccataccttccttgttcgaaaccacagacaggcatccttggggatctctcccattacctttctcactgcccaaacgctccttatggacttgggtcagttccttctcttttgccatatcccgtcacaccagcatgatggtatggaagcttatgtgaaagtcgacagttgtcctgaggagccacagttgcgcatgaagaataatgaagaagccgaggattacgacgacgatctcaccgattctgagatggacgtggtgaggtttgatgacgacaactctccctccatcattcaagctcggagcggggcgaagaaacaccccaagacttgggtccactatatagcggcggaagaggaggattgggattacgctcctcttgtattggcaccagatgaccgctcatacaaaagccagtacctcaacaacggaccgcagagaattggccggaagtataagaaagtgcgatttatggcctatacagacgaaacctttaagacaagggaggccatccagcatgagagtgggattttgggacctcttctttacggcgaagttggtgataccctcctcatcatcttcaagaatcaagcttctcgcccctataacatttacccacacgggatcactgacgttaggcctttgtatagcagaagacttcccaaaggcgtgaagcatctcaaagacttccccattttgccaggcgagatctttaagtacaaatggaccgtcacagtggaagatggaccgactaaatcagaccctcgatgccttacgcggtactattcctccttcgtgaatatggagagagatttggcaagcggactcataggaccactcctcatctgttacaaggaatctgtagaccagaggggtaaccagattatgagtgataaacgcaatgtgatcctttttagcgtcttcgacgagaaccggtcctggtacttgaccgagaatatacaaaggttccttcccaacccggcaggcgttcaggacgaagaccctgagtttcaggccagcaatattatgcactcaatcaacggctatgtgtttgatagtctccagctttctgtttgcctccatgaagtagcctattggtacatcttgtcaattggtgctcaaacagacttcctctccgtcttcttctccggctacacctttaagcacaagatggtgtatgaggacactctcacactctttccattttctggagaaaccgtgttcatgagcatggagaatccaggcctttggatcttgggttgccacaacagtgattttcgcaatcggggaatgactgctctcctcaaagtcagcagctgtgattggaacacaggcgactattacgaagattcttacgaggacataagtgcctactttgactccaagaataacgccattgagcccagatcattctcccagaatcctcccgtgcttaaaaggcatcagcgcgaaggtaccagaactactcttcagtctgatcaagaggagattgactatgacgacaccattagcgtggaaatgaagaaggaggatttcgatatctatgacgaagatgagaaccagtctccgcggagctttcagaagaagacgcgacactacttcattgcagcagtcgaaaggctttgggactacggtatgtcatcatcccctcatgtgttgcgcaatagagctcagagtggaagtgttccacagttcaagaaagtcgtctttcaagagtttacagatggcagcttcacacagcctctctatcggggcgagcttaacgaacatttgggactccttggtccctatatccgagccgaagtggaggacaacattatggttacctttaggaatcaagcctctcgcccctacagcttctactcctccctcatcagttatgaggaggatcagagacaaggcgctgaaccacggaagaactttgtgaaaccgaatgagacgaagacctacttctggaaagtacagcaccacatggcccccacaaaagacgaattcgattgcaaagcatgggcgtatttttcagacgttgacttggagaaagatgtacattcaggacttattggtcctttgttggtgtgtcacactaacactctcaatccagcccatggcaggcaggtgacagtccaggaattcgctcttttctttaccatctttgatgagaccaagtcctggtacttcacggaaaacatggagcgcaattgcagagccccctgtaacatacagatggaggaccctacctttaaggaaaattatcggttccacgcaatcaacggatacattatggatacactccctggccttgtgatggctcaggaccaacgaatcaggtggtacctcctcagcatgggttctaatgagaacatacactccattcacttttcaggacatgtgttcactgtccggaagaaagaagagtataagatggccctctacaatttgtatccaggcgtgtttgagaccgttgaaatgcttccctctaaagctggcatctggagagtagagtgcttgatcggagaacatcttcacgcaggtatgagcaccttgttcctcgtgtacagcaacaaatgtcagaatccacttggcatggccagtggacacattcgcgactttcagatcacagcatctggccagtatggacaatgggccccaaagttggctcgcctccattactccggtagcataaatgcgtggtccactaaagaacctttcagctggattaaggtcgatcttcttgcccccatgatcatccacggcattaagacacagggagcgaggcagaaattctcctccctctacatctcacagttcattattatgtatagtttggacggcaagaagtggcaaacttatagaggtaacagtactggaacagacatggtgttcttcggcaacgttgatagctctggcatcaaacacaacatctttaatcctcccataatagctcggtacatcagattgcatccgacccactacagcattaggagtacactccgaatggagcttatgggttgcgacttgaattcctgttcaatgccactcggaatggagtctaaagccatctctgatgcacagataaccgccagtagctactttacgaacatgtttgctacgtggtcaccctctaaggcaaggcttcatttgcaaggccggtctaatgcctggagacctcaggtgaacaacccgaaagaatggctccaggtggactttcagaagaccatgaaagtaacaggtgtcactactcagggagttaagtccttggatactagcatgtatgtgaaggagttccttatttcctcatcacaagatggccaccagtggaccctcttctttcagaatggtaaggtcaaagtgtttcagggcaatcaagacagcttcacacccgtggtgaacagtcttgatcctccactcttgacacgataccttcgaatccatccacagtcttgggagcaccagattgcattgcgcatggaagtacttggatgcgaggctcaggacctctac

SEQ ID NO: 1254 - protein, 1457 aa, synthetic construct
  REGION 1..1457: note = Variant of human B-domain deleted Factor VIII
MQIELSTCFFLCLLRFCFSATRRYYLGAVELSWDYMQSDLGELPVDARFPPRVPKSFPFNTSQVYKKTLFVEFTDHLFNIAKPRPPWMGLLGPTIQAEVYDTVVITLKNMASHPVSLHAVGVSYWKASEGAEYDDQTSQREKEDDKVFPGGSHTYVWQVLKENGPMASDPPCLTYSYLSHVDLVKDLNSGLIGALLVCREGSLAKEKTQTLHKFILLFAVFDEGKSWHSETKNSLMQDRDAASARAWPKMHTVNGYVNRTLPGLIGCHRKSVYWHVIGMGTTPEVHSIFLEGHTFLVRNHRQASLGISPITFLTAQTLLMDLGQFLLFCHIPSHQHDGMEAYVKVDSCPEEPQLRMKNNEEAEDYDDDLTDSEMDVVRFDDDNSPSIIQARSGAKKHPKTWVHYIAAEEEDWDYAPLVLAPDDRSYKSQYLNNGPQRIGRKYKKVRFMAYTDETFKTREAIQHESGILGPLLYGEVGDTLLIIFKNQASRPYNIYPHGITDVRPLYSRRLPKGVKHLKDFPILPGEIFKYKWTVTVEDGPTKSDPRCLTRYYSSFVNMERDLASGLIGPLLICYKESVDQRGNQIMSDKRNVILFSVFDENRSWYLTENIQRFLPNPAGVQDEDPEFQASNIMHSINGYVFDSLQLSVCLHEVAYWYILSIGAQTDFLSVFFSGYTFKHKMVYEDTLTLFPFSGETVFMSMENPGLWILGCHNSDFRNRGMTALLKVSSCDWNTGDYYEDSYEDISAYFDSKNNAIEPRSFSQNPPVLKRHQREGTRTTLQSDQEEIDYDDTISVEMKKEDFDIYDEDENQSPRSFQKKTRHYFIAAVERLWDYGMSSSPHVLRNRAQSGSVPQFKKVVFQEFTDGSFTQPLYRGELNEHLGLLGPYIRAEVEDNIMVTFRNQASRPYSFYSSLISYEEDQRQGAEPRKNFVKPNETKTYFWKVQHHMAPTKDEFDCKAWAYFSDVDLEKDVHSGLIGPLLVCHTNTLNPAHGRQVTVQEFALFFTIFDETKSWYFTENMERNCRAPCNIQMEDPTFKENYRFHAINGYIMDTLPGLVMAQDQRIRWYLLSMGSNENIHSIHFSGHVFTVRKKEEYKMALYNLYPGVFETVEMLPSKAGIWRVECLIGEHLHAGMSTLFLVYSNKCQNPLGMASGHIRDFQITASGQYGQWAPKLARLHYSGSINAWSTKEPFSWIKVDLLAPMIIHGIKTQGARQKFSSLYISQFIIMYSLDGKKWQTYRGNSTGTDMVFFGNVDSSGIKHNIFNPPIIARYIRLHPTHYSIRSTLRMELMGCDLNSCSMPLGMESKAISDAQITASSYFTNMFATWSPSKARLHLQGRSNAWRPQVNNPKEWLQVDFQKTMKVTGVTTQGVKSLDTSMYVKEFLISSSQDGHQWTLFFQNGKVKVFQGNQDSFTPVVNSLDPPLLTRYLRIHPQSWEHQIALRMEVLGCEAQDLY

SEQ ID NO: 1255 - DNA, 4371 bp, synthetic construct
  misc_feature 1..4371: note = Variant of human B-domain deleted Factor VIII
  source 1..4371: mol_type = other DNA
atgcagattgaactgtctacctgcttcttcctctgtttgctgaggttctgctttagcgccactagacggtactaccttggcgctgtggagctgtcctgggactatatgcagagtgatttgggagagcttcccgtcgacgcacgatttcctcctcgcgttccaaagtcatttccctttaacacaagccaggtgtacaagaagacgctcttcgtcgaattcaccgatcacctgttcaatatcgccaaacccagaccaccatggatgggtcttttggggcctaccatacaagcggaggtgtatgacacagttgttatcactctcaagaacatggcttctcatccggtaagtcttcacgcagtgggcgtgtcctactggaaagcttcagaaggagccgagtatgatgatcagacatcccagagggagaaagaagacgacaaggtatttccaggtgggtctcatacctatgtgtggcaagtgctcaaagagaatggccctatggcaagcgatccgccgtgtttgacttacagctacctttcacacgttgacctcgtcaaggacctcaactccgggttgattggagccttgttggtatgcagggaaggatctcttgccaaagagaagacacagaccctgcacaagtttatccttctctttgctgtgttcgatgagggcaaaagttggcatagcgaaacgaagaattccctcatgcaggatcgcgacgcagccagcgccagagcttggcccaagatgcacactgtgaacggatatgtcaataggacgcttcctggcttgattgggtgtcatcggaaaagtgtctactggcacgtgatcggaatggggacaacaccagaggtccactccatatttctcgaaggccataccttccttgttcgaaaccacagacaggcatccttggggatctctcccattacctttctcactgcccaaacgctccttatggacttgggtcagttccttctcttttgccatatcccgtcacaccagcatgatggtatggaagcttatgtgaaagtcgacagttgtcctgaggagccacagttgcgcatgaagaataatgaagaagccgaggattacgacgacgatctcaccgattctgagatggacgtggtgaggtttgatgacgacaactctccctccatcattcaagctcggagcggggcgaagaaacaccccaagacttgggtccactatatagcggcggaagaggaggattgggattacgctcctcttgtattggcaccagatgaccgctcatacaaaagccagtacctcaacaacggaccgcagagaattggccggaagtataagaaagtgcgatttatggcctatacagacgaaacctttaagacaagggaggccatccagcatgagagtgggattttgggacctcttctttacggcgaagttggtgataccctcctcatcatcttcaagaatcaagcttctcgcccctataacatttacccacacgggatcactgacgttaggcctttgtatagcagaagacttcccaaaggcgtgaagcatctcaaagacttccccattttgccaggcgagatctttaagtacaaatggaccgtcacagtcgaagatggaccgactaaatcagaccctcgatgccttacgcggtactattcctccttcgtgaatatggagagagatttggcaagcggactcataggaccactcctcatctgttacaaggaatctgtagaccagaggggtaaccagattatgagtgataaacgcaatgtgatcctttttagcgtcttcgacgagaaccggtcctggtacttgaccgagaatatacaaaggttccttcccaacggcgcaggcgttcagctggaagaccctgagtttcaggccagcaatattatgcactcaatcaacggctatgtgtttgatagtctccagctttctgtttgcctccatgaagtagcctattggtacatcttgtcaattggtgctcaaacagacttcctctccgtcttcttctccggctacacctttaagcacaagatggtgtatgaggacactctcacactctttccattttctggagaaaccgtgttcatgagcatggagaatccaggcctttggatcttgggttgccacaacagtgattttcgcaatcggggaatgactgctctcctcaaagtcagcagctgtgattggaacacaggcgactattacgaagattcttacgaggacataagtgcctactttgactccaagaataacgccattgagcccagatcattctcccagaatcctcccgtgcttaaaaggcatcagcgcgaaggtaccagaactactcttcagtctgatcaagaggagattgactatgacgacaccattagcgtggaaatgaagaaggaggatttcgatatctatgacgaagatgagaaccagtctccgcggagctttcagaagaagacgcgacactacttcattgcagcagtcgaaaggctttgggactacggtatgtcatcatcccctcatgtgttgcgcaatagagctcagagtggaagtgttccacagttcaagaaagtcgtctttcaagagtttacagatggcagcttcacacagcctctctatcggggcgagcttaacgaacatttgggactccttggtccctatatccgagccgaagtggaggacaacattatggttacctttaggaatcaagcctctcgcccctacagcttctactcctccctcatcagttatgaggaggatcagagacaaggcgctgaaccacggaagaactttgtgaaaccgaatgagacgaagacctacttctggaaagtacagcaccacatggcccccacaaaagacgaattcgattgcaaagcatgggcgtatttttcagacgttgacttggagaaagatgtacattcaggacttattggtcctttgttggtgtgtcacactaacactctcaatccagcccatggcaggcaggtgacagtccaggaattcgctcttttctttaccatctttgatgagaccaagtcctggtacttcacggaaaacatggagcgcaattgcagagccccctgtaacatacagatggaggaccctacctttaaggaaaattatcggttccacgcaatcaacggatacattatggatacactccctggccttgtgatggctcaggaccaacgaatcaggtggtacctcctcagcatgggttctaatgagaacatacactccattcacttttcaggacatgtgttcactgtccggaagaaagaagagtataagatggccctctacaatttgtatccaggcgtgtttgagaccgttgaaatgcttccctctaaagctggcatctggagagtagagtgcttgatcggagaacatcttcacgcaggtatgagcaccttgttcctcgtgtacagcaacaaatgtcagaatccacttggcatggccagtggacacattcgcgactttcagatcacagcatctggccagtatggacaatgggccccaaagttggctcgcctccattactccggtagcataaatgcgtggtccactaaagaacctttcagctggattaaggtcgatcttcttgcccccatgatcatccacggcattaagacacagggagcgaggcagaaattctcctccctctacatctcacagttcattattatgtatagtttggacggcaagaagtggcaaacttatagaggtaacagtactggaacagacatggtgttcttcggcaacgttgatagctctggcatcaaacacaacatctttaatcctcccataatagctcggtacatcagattgcatccgacccactacagcattaggagtacactccgaatggagcttatgggttgcgacttgaattcctgttcaatgccactcggaatggagtctaaagccatctctgatgcacagataaccgccagtagctactttacgaacatgtttgctacgtggtcaccctctaaggcaaggcttcatttgcaaggccggtctaatgcctggagacctcaggtgaacaacccgaaagaatggctccaggtggactttcagaagaccatgaaagtaacaggtgtcactactcagggagttaagtccttggatactagcatgtatgtgaaggagttccttatttcctcatcacaagatggccaccagtggaccctcttctttcagaatggtaaggtcaaagtgtttcagggcaatcaagacagcttcacacccgtggtgaacagtcttgatcctccactcttgacacgataccttcgaatccatccacagtcttgggagcaccagattgcattgcgcatggaagtacttggatgcgaggctcaggacctctac

SEQ ID NO: 1256 - protein, 1457 aa, synthetic construct
  REGION 1..1457: note = Variant of human B-domain deleted Factor VIII
MQIELSTCFFLCLLRFCFSATRRYYLGAVELSWDYMQSDLGELPVDARFPPRVPKSFPFNTSQVYKKTLFVEFTDHLFNIAKPRPPWMGLLGPTIQAEVYDTVVITLKNMASHPVSLHAVGVSYWKASEGAEYDDQTSQREKEDDKVFPGGSHTYVWQVLKENGPMASDPPCLTYSYLSHVDLVKDLNSGLIGALLVCREGSLAKEKTQTLHKFILLFAVFDEGKSWHSETKNSLMQDRDAASARAWPKMHTVNGYVNRTLPGLIGCHRKSVYWHVIGMGTTPEVHSIFLEGHTFLVRNHRQASLGISPITFLTAQTLLMDLGQFLLFCHIPSHQHDGMEAYVKVDSCPEEPQLRMKNNEEAEDYDDDLTDSEMDVVRFDDDNSPSIIQARSGAKKHPKTWVHYIAAEEEDWDYAPLVLAPDDRSYKSQYLNNGPQRIGRKYKKVRFMAYTDETFKTREAIQHESGILGPLLYGEVGDTLLIIFKNQASRPYNIYPHGITDVRPLYSRRLPKGVKHLKDFPILPGEIFKYKWTVTVEDGPTKSDPRCLTRYYSSFVNMERDLASGLIGPLLICYKESVDQRGNQIMSDKRNVILFSVFDENRSWYLTENIQRFLPNGAGVQLEDPEFQASNIMHSINGYVFDSLQLSVCLHEVAYWYILSIGAQTDFLSVFFSGYTFKHKMVYEDTLTLFPFSGETVFMSMENPGLWILGCHNSDFRNRGMTALLKVSSCDWNTGDYYEDSYEDISAYFDSKNNAIEPRSFSQNPPVLKRHQREGTRTTLQSDQEEIDYDDTISVEMKKEDFDIYDEDENQSPRSFQKKTRHYFIAAVERLWDYGMSSSPHVLRNRAQSGSVPQFKKVVFQEFTDGSFTQPLYRGELNEHLGLLGPYIRAEVEDNIMVTFRNQASRPYSFYSSLISYEEDQRQGAEPRKNFVKPNETKTYFWKVQHHMAPTKDEFDCKAWAYFSDVDLEKDVHSGLIGPLLVCHTNTLNPAHGRQVTVQEFALFFTIFDETKSWYFTENMERNCRAPCNIQMEDPTFKENYRFHAINGYIMDTLPGLVMAQDQRIRWYLLSMGSNENIHSIHFSGHVFTVRKKEEYKMALYNLYPGVFETVEMLPSKAGIWRVECLIGEHLHAGMSTLFLVYSNKCQNPLGMASGHIRDFQITASGQYGQWAPKLARLHYSGSINAWSTKEPFSWIKVDLLAPMIIHGIKTQGARQKFSSLYISQFIIMYSLDGKKWQTYRGNSTGTDMVFFGNVDSSGIKHNIFNPPIIARYIRLHPTHYSIRSTLRMELMGCDLNSCSMPLGMESKAISDAQITASSYFTNMFATWSPSKARLHLQGRSNAWRPQVNNPKEWLQVDFQKTMKVTGVTTQGVKSLDTSMYVKEFLISSSQDGHQWTLFFQNGKVKVFQGNQDSFTPVVNSLDPPLLTRYLRIHPQSWEHQIALRMEVLGCEAQDLY

SEQ ID NO: 1257 - DNA, 4371 bp, synthetic construct
  misc_feature 1..4371: note = Variant of human B-domain deleted Factor VIII
  source 1..4371: mol_type = other DNA
atgcagattgaactgtctacctgcttcttcctctgtttgctgaggttctgctttagcgccactagacggtactaccttggcgctgtggagctgtcctgggactatatgcagagtgatttgggagagcttcccgtcgacgcacgatttcctcctcgcgttccaaagtcatttccctttaacacaagccaggtgtacaagaagacgctcttcgtcgaattcaccgatcacctgttcaatatcgccaaacccagaccaccatggatgggtcttttggggcctaccatacaagcggaggtgtatgacacagttgttatcactctcaagaacatggcttctcatccggtaagtcttcacgcagtgggcgtgtcctactggaaagcttcagaaggagccgagtatgatgatcagacatcccagagggagaaagaagacgacaaggtatttccaggtgggtctcatacctatgtgtggcaagtgctcaaagagaatggccctatggcaagcgatccgccgtgtttgacttacagctacctttcacacgttgacctcgtcaaggacctcaactccgggttgattggagccttgttggtatgcagggaaggatctcttgccaaagagaagacacagaccctgcacaagtttatccttctctttgctgtgttcgatgagggcaaaagttggcatagcgaaacgaagaattccctcatgcaggatcgcgacgcagccagcgccagagcttggcccaagatgcacactgtgaacggatatgtcaataggacgcttcctggcttgattgggtgtcatcggaaaagtgtctactggcacgtgatcggaatggggacaacaccagaggtccactccatatttctcgaaggccataccttccttgttcgaaaccacagacaggcatccttggggatctctcccattacctttctcactgcccaaacgctccttatggacttgggtcagttccttctcttttgccatatcccgtcacaccagcatgatggtatggaagcttatgtgaaagtcgacagttgtcctgaggagccacagttgcgcatgaagaataatgaagaagccgaggattacgacgacgatctcaccgattctgagatggacgtggtgaggtttgatgacgacaactctccctccatcattcaagctcggagcggggcgaagaaacaccccaagacttgggtccactatatagcggcggaagaggaggattgggattacgctcctcttgtattggcaccagatgaccgctcatacaaaagccagtacctcaacaacggaccgcagagaattggccggaagtataagaaagtgcgatttatggcctatacagacgaaacctttaagacaagggaggccatccagcatgagagtgggattttgggacctcttctttacggcgaagttggtgataccctcctcatcatcttcaagaatcaagcttctcgcccctataacatttacccacacgggatcactgacgttaggcctttgtatagcagaagacttcccaaaggcgtgaagcatctcaaagacttccccattttgccaggcgagatctttaagtacaaatggaccgtcacagtcgaagatggaccgactaaatcagaccctcgatgccttacgcggtactattcctccttcgtgaatctggagagagatttggcaagcggactcataggaccactcctcatctgttacaaggaatctgtagaccagaggggtaaccagattatgagtgataaacgcaatgtgatcctttttagcgtcttcgacgagaaccggtcctggtacttgaccgagaatatacaaaggttccttcccaacccggcaggcgttcagctggaagaccctgagtttcaggccagcaatattatgcactcaatcaacggctatgtgtttgatagtctccagctttctgtttgcctccatgaagtagcctattggtacatcttgtcaattggtgctcaaacagacttcctctccgtcttcttctccggctacacctttaagcacaagatggtgtatgaggacactctcacactctttccattttctggagaaaccgtgttcatgagcatggagaatccaggcctttggatcttgggttgccacaacagtgattttcgcaatcggggaatgactgctctcctcaaagtcagcagctgtgattggaacacaggcgactattacgaagattcttacgaggacataagtgcctactttgactccaagaataacgccattgagcccagatcattctcccagaatcctcccgtgcttaaaaggcatcagcgcgaaggtaccagaactactcttcagtctgatcaagaggagattgactatgacgacaccattagcgtggaaatgaagaaggaggatttcgatatctatgacgaagatgagaaccagtctccgcggagctttcagaagaagacgcgacactacttcattgcagcagtcgaaaggctttgggactacggtatgtcatcatcccctcatgtgttgcgcaatagagctcagagtggaagtgttccacagttcaagaaagtcgtctttcaagagtttacagatggcagcttcacacagcctctctatcggggcgagcttaacgaacatttgggactccttggtccctatatccgagccgaagtggaggacaacattatggttacctttaggaatcaagcctctcgcccctacagcttctactcctccctcatcagttatgaggaggatcagagacaaggcgctgaaccacggaagaactttgtgaaaccgaatgagacgaagacctacttctggaaagtacagcaccacatggcccccacaaaagacgaattcgattgcaaagcatgggcgtatttttcagacgttgacttggagaaagatgtacattcaggacttattggtcctttgttggtgtgtcacactaacactctcaatccagcccatggcaggcaggtgacagtccaggaattcgctcttttctttaccatctttgatgagaccaagtcctggtacttcacggaaaacatggagcgcaattgcagagccccctgtaacatacagatggaggaccctacctttaaggaaaattatcggttccacgcaatcaacggatacattatggatacactccctggccttgtgatggctcaggaccaacgaatcaggtggtacctcctcagcatgggttctaatgagaacatacactccattcacttttcaggacatgtgttcactgtccggaagaaagaagagtataagatggccctctacaatttgtatccaggcgtgtttgagaccgttgaaatgcttccctctaaagctggcatctggagagtagagtgcttgatcggagaacatcttcacgcaggtatgagcaccttgttcctcgtgtacagcaacaaatgtcagaatccacttggcatggccagtggacacattcgcgactttcagatcacagcatctggccagtatggacaatgggccccaaagttggctcgcctccattactccggtagcataaatgcgtggtccactaaagaacctttcagctggattaaggtcgatcttcttgcccccatgatcatccacggcattaagacacagggagcgaggcagaaattctcctccctctacatctcacagttcattattatgtatagtttggacggcaagaagtggcaaacttatagaggtaacagtactggaacagacatggtgttcttcggcaacgttgatagctctggcatcaaacacaacatctttaatcctcccataatagctcggtacatcagattgcatccgacccactacagcattaggagtacactccgaatggagcttatgggttgcgacttgaattcctgttcaatgccactcggaatggagtctaaagccatctctgatgcacagataaccgccagtagctactttacgaacatgtttgctacgtggtcaccctctaaggcaaggcttcatttgcaaggccggtctaatgcctggagacctcaggtgaacaacccgaaagaatggctccaggtggactttcagaagaccatgaaagtaacaggtgtcactactcagggagttaagtccttggatactagcatgtatgtgaaggagttccttatttcctcatcacaagatggccaccagtggaccctcttctttcagaatggtaaggtcaaagtgtttcagggcaatcaagacagcttcacacccgtggtgaacagtcttgatcctccactcttgacacgataccttcgaatccatccacagtcttgggagcaccagattgcattgcgcatggaagtacttggatgcgaggctcaggacctctac

SEQ ID NO: 1258 - protein, 1457 aa, synthetic construct
  REGION 1..1457: note = Variant of human B-domain deleted Factor VIII
MQIELSTCFFLCLLRFCFSATRRYYLGAVELSWDYMQSDLGELPVDARFPPRVPKSFPFNTSQVYKKTLFVEFTDHLFNIAKPRPPWMGLLGPTIQAEVYDTVVITLKNMASHPVSLHAVGVSYWKASEGAEYDDQTSQREKEDDKVFPGGSHTYVWQVLKENGPMASDPPCLTYSYLSHVDLVKDLNSGLIGALLVCREGSLAKEKTQTLHKFILLFAVFDEGKSWHSETKNSLMQDRDAASARAWPKMHTVNGYVNRTLPGLIGCHRKSVYWHVIGMGTTPEVHSIFLEGHTFLVRNHRQASLGISPITFLTAQTLLMDLGQFLLFCHIPSHQHDGMEAYVKVDSCPEEPQLRMKNNEEAEDYDDDLTDSEMDVVRFDDDNSPSIIQARSGAKKHPKTWVHYIAAEEEDWDYAPLVLAPDDRSYKSQYLNNGPQRIGRKYKKVRFMAYTDETFKTREAIQHESGILGPLLYGEVGDTLLIIFKNQASRPYNIYPHGITDVRPLYSRRLPKGVKHLKDFPILPGEIFKYKWTVTVEDGPTKSDPRCLTRYYSSFVNLERDLASGLIGPLLICYKESVDQRGNQIMSDKRNVILFSVFDENRSWYLTENIQRFLPNPAGVQLEDPEFQASNIMHSINGYVFDSLQLSVCLHEVAYWYILSIGAQTDFLSVFFSGYTFKHKMVYEDTLTLFPFSGETVFMSMENPGLWILGCHNSDFRNRGMTALLKVSSCDWNTGDYYEDSYEDISAYFDSKNNAIEPRSFSQNPPVLKRHQREGTRTTLQSDQEEIDYDDTISVEMKKEDFDIYDEDENQSPRSFQKKTRHYFIAAVERLWDYGMSSSPHVLRNRAQSGSVPQFKKVVFQEFTDGSFTQPLYRGELNEHLGLLGPYIRAEVEDNIMVTFRNQASRPYSFYSSLISYEEDQRQGAEPRKNFVKPNETKTYFWKVQHHMAPTKDEFDCKAWAYFSDVDLEKDVHSGLIGPLLVCHTNTLNPAHGRQVTVQEFALFFTIFDETKSWYFTENMERNCRAPCNIQMEDPTFKENYRFHAINGYIMDTLPGLVMAQDQRIRWYLLSMGSNENIHSIHFSGHVFTVRKKEEYKMALYNLYPGVFETVEMLPSKAGIWRVECLIGEHLHAGMSTLFLVYSNKCQNPLGMASGHIRDFQITASGQYGQWAPKLARLHYSGSINAWSTKEPFSWIKVDLLAPMIIHGIKTQGARQKFSSLYISQFIIMYSLDGKKWQTYRGNSTGTDMVFFGNVDSSGIKHNIFNPPIIARYIRLHPTHYSIRSTLRMELMGCDLNSCSMPLGMESKAISDAQITASSYFTNMFATWSPSKARLHLQGRSNAWRPQVNNPKEWLQVDFQKTMKVTGVTTQGVKSLDTSMYVKEFLISSSQDGHQWTLFFQNGKVKVFQGNQDSFTPVVNSLDPPLLTRYLRIHPQSWEHQIALRMEVLGCEAQDLY

SEQ ID NO: 1259 - DNA, 4371 bp, synthetic construct
  misc_feature 1..4371: note = Variant of human B-domain deleted Factor VIII
  source 1..4371: mol_type = other DNA
atgcagattgaactgtctacctgcttcttcctctgtttgctgaggttctgctttagcgccactagacggtactaccttggcgctgtggagctgtcctgggactatatgcagagtgatttgggagagcttcccgtcgacgcacgatttcctcctcgcgttccaaagtcatttccctttaacacaagccaggtgtacaagaagacgctcttcgtcgaattcaccgatcacctgttcaatatcgccaaacccagaccaccatggatgggtcttttggggcctaccatacaagcggaggtgtatgacacagttgttatcactctcaagaacatggcttctcatccggtaagtcttcacgcagtgggcgtgtcctactggaaagcttcagaaggagccgagtatgatgatcagacatcccagagggagaaagaagacgacaaggtatttccaggtgggtctcatacctatgtgtggcaagtgctcaaagagaatggccctatggcaagcgatccgccgtgtttgacttacagctacctttcacacgttgacctcgtcaaggacctcaactccgggttgattggagccttgttggtatgcagggaaggatctcttgccaaagagaagacacagaccctgcacaagtttatccttctctttgctgtgttcgatgagggcaaaagttggcatagcgaaacgaagaattccctcatgcaggatcgcgacgcagccagcgccagagcttggcccaagatgcacactgtgaacggatatgtcaataggacgcttcctggcttgattgggtgtcatcggaaaagtgtctactggcacgtgatcggaatggggacaacaccagaggtccactccatatttctcgaaggccataccttccttgttcgaaaccacagacaggcatccttggggatctctcccattacctttctcactgcccaaacgctccttatggacttgggtcagttccttctcttttgccatatcccgtcacaccagcatgatggtatggaagcttatgtgaaagtcgacagttgtcctgaggagccacagttgcgcatgaagaataatgaagaagccgaggattacgacgacgatctcaccgattctgagatggacgtggtgaggtttgatgacgacaactctccctccatcattcaagctcggagcggggcgaagaaacaccccaagacttgggtccactatatagcggcggaagaggaggattgggattacgctcctcttgtattggcaccagatgaccgctcatacaaaagccagtacctcaacaacggaccgcagagaattggccggaagtataagaaagtgcgatttatggcctatacagacgaaacctttaagacaagggaggccatccagcatgagagtgggattttgggacctcttctttacggcgaagttggtgataccctcctcatcatcttcaagaatcaagcttctcgcccctataacatttacccacacgggatcactgacgttaggcctttgtatagcagaagacttcccaaaggcgtgaagcatctcaaagacttccccattttgccaggcgagatctttaagtacaaatggaccgtcacaaaggaagatggaccgactaaatcagaccctcgatgccttacgcggtactattcctccttcgtgaatatggagagagatttggcaagcggactcataggaccactcctcatctgttacaaggaatctgtagaccagaggggtaaccagattatgagtgataaacgcaatgtgatcctttttagcgtcttcgacgagaaccggtcctggtacttgaccgagaatatacaaaggttccttcccaacccggcaggcgttcagctggaagaccctgagtttcaggccagcaatattatgcactcaatcaacggctatgtgtttgatagtctccagctttctgtttgcctccatgaagtagcctattggtacatcttgtcaattggtgctcaaacagacttcctctccgtcttcttctccggctacacctttaagcacaagatggtgtatgaggacactctcacactctttccattttctggagaaaccgtgttcatgagcatggagaatccaggcctttggatcttgggttgccacaacagtgattttcgcaatcggggaatgactgctctcctcaaagtcagcagctgtgattggaacacaggcgactattacgaagattcttacgaggacataagtgcctactttgactccaagaataacgccattgagcccagatcattctcccagaatcctcccgtgcttaaaaggcatcagcgcgaaggtaccagaactactcttcagtctgatcaagaggagattgactatgacgacaccattagcgtggaaatgaagaaggaggatttcgatatctatgacgaagatgagaaccagtctccgcggagctttcagaagaagacgcgacactacttcattgcagcagtcgaaaggctttgggactacggtatgtcatcatcccctcatgtgttgcgcaatagagctcagagtggaagtgttccacagttcaagaaagtcgtctttcaagagtttacagatggcagcttcacacagcctctctatcggggcgagcttaacgaacatttgggactccttggtccctatatccgagccgaagtggaggacaacattatggttacctttaggaatcaagcctctcgcccctacagcttctactcctccctcatcagttatgaggaggatcagagacaaggcgctgaaccacggaagaactttgtgaaaccgaatgagacgaagacctacttctggaaagtacagcaccacatggcccccacaaaagacgaattcgattgcaaagcatgggcgtatttttcagacgttgacttggagaaagatgtacattcaggacttattggtcctttgttggtgtgtcacactaacactctcaatccagcccatggcaggcaggtgacagtccaggaattcgctcttttctttaccatctttgatgagaccaagtcctggtacttcacggaaaacatggagcgcaattgcagagccccctgtaacatacagatggaggaccctacctttaaggaaaattatcggttccacgcaatcaacggatacattatggatacactccctggccttgtgatggctcaggaccaacgaatcaggtggtacctcctcagcatgggttctaatgagaacatacactccattcacttttcaggacatgtgttcactgtccggaagaaagaagagtataagatggccctctacaatttgtatccaggcgtgtttgagaccgttgaaatgcttccctctaaagctggcatctggagagtagagtgcttgatcggagaacatcttcacgcaggtatgagcaccttgttcctcgtgtacagcaacaaatgtcagaatccacttggcatggccagtggacacattcgcgactttcagatcacagcatctggccagtatggacaatgggccccaaagttggctcgcctccattactccggtagcataaatgcgtggtccactaaagaacctttcagctggattaaggtcgatcttcttgcccccatgatcatccacggcattaagacacagggagcgaggcagaaattctcctccctctacatctcacagttcattattatgtatagtttggacggcaagaagtggcaaacttatagaggtaacagtactggaacagacatggtgttcttcggcaacgttgatagctctggcatcaaacacaacatctttaatcctcccataatagctcggtacatcagattgcatccgacccactacagcattaggagtacactccgaatggagcttatgggttgcgacttgaattcctgttcaatgccactcggaatggagtctaaagccatctctgatgcacagataaccgccagtagctactttacgaacatgtttgctacgtggtcaccctctaaggcaaggcttcatttgcaaggccggtctaatgcctggagacctcaggtgaacaacccgaaagaatggctccaggtggactttcagaagaccatgaaagtaacaggtgtcactactcagggagttaagtccttggatactagcatgtatgtgaaggagttccttatttcctcatcacaagatggccaccagtggaccctcttctttcagaatggtaaggtcaaagtgtttcagggcaatcaagacagcttcacacccgtggtgaacagtcttgatcctccactcttgacacgataccttcgaatccatccacagtcttgggagcaccagattgcattgcgcatggaagtacttggatgcgaggctcaggacctctac

SEQ ID NO: 1260 - protein, 1457 aa, synthetic construct
  REGION 1..1457: note = Variant of human B-domain deleted Factor VIII
MQIELSTCFFLCLLRFCFSATRRYYLGAVELSWDYMQSDLGELPVDARFPPRVPKSFPFNTSQVYKKTLFVEFTDHLFNIAKPRPPWMGLLGPTIQAEVYDTVVITLKNMASHPVSLHAVGVSYWKASEGAEYDDQTSQREKEDDKVFPGGSHTYVWQVLKENGPMASDPPCLTYSYLSHVDLVKDLNSGLIGALLVCREGSLAKEKTQTLHKFILLFAVFDEGKSWHSETKNSLMQDRDAASARAWPKMHTVNGYVNRTLPGLIGCHRKSVYWHVIGMGTTPEVHSIFLEGHTFLVRNHRQASLGISPITFLTAQTLLMDLGQFLLFCHIPSHQHDGMEAYVKVDSCPEEPQLRMKNNEEAEDYDDDLTDSEMDVVRFDDDNSPSIIQARSGAKKHPKTWVHYIAAEEEDWDYAPLVLAPDDRSYKSQYLNNGPQRIGRKYKKVRFMAYTDETFKTREAIQHESGILGPLLYGEVGDTLLIIFKNQASRPYNIYPHGITDVRPLYSRRLPKGVKHLKDFPILPGEIFKYKWTVTKEDGPTKSDPRCLTRYYSSFVNMERDLASGLIGPLLICYKESVDQRGNQIMSDKRNVILFSVFDENRSWYLTENIQRFLPNPAGVQLEDPEFQASNIMHSINGYVFDSLQLSVCLHEVAYWYILSIGAQTDFLSVFFSGYTFKHKMVYEDTLTLFPFSGETVFMSMENPGLWILGCHNSDFRNRGMTALLKVSSCDWNTGDYYEDSYEDISAYFDSKNNAIEPRSFSQNPPVLKRHQREGTRTTLQSDQEEIDYDDTISVEMKKEDFDIYDEDENQSPRSFQKKTRHYFIAAVERLWDYGMSSSPHVLRNRAQSGSVPQFKKVVFQEFTDGSFTQPLYRGELNEHLGLLGPYIRAEVEDNIMVTFRNQASRPYSFYSSLISYEEDQRQGAEPRKNFVKPNETKTYFWKVQHHMAPTKDEFDCKAWAYFSDVDLEKDVHSGLIGPLLVCHTNTLNPAHGRQVTVQEFALFFTIFDETKSWYFTENMERNCRAPCNIQMEDPTFKENYRFHAINGYIMDTLPGLVMAQDQRIRWYLLSMGSNENIHSIHFSGHVFTVRKKEEYKMALYNLYPGVFETVEMLPSKAGIWRVECLIGEHLHAGMSTLFLVYSNKCQNPLGMASGHIRDFQITASGQYGQWAPKLARLHYSGSINAWSTKEPFSWIKVDLLAPMIIHGIKTQGARQKFSSLYISQFIIMYSLDGKKWQTYRGNSTGTDMVFFGNVDSSGIKHNIFNPPIIARYIRLHPTHYSIRSTLRMELMGCDLNSCSMPLGMESKAISDAQITASSYFTNMFATWSPSKARLHLQGRSNAWRPQVNNPKEWLQVDFQKTMKVTGVTTQGVKSLDTSMYVKEFLISSSQDGHQWTLFFQNGKVKVFQGNQDSFTPVVNSLDPPLLTRYLRIHPQSWEHQIALRMEVLGCEAQDLY

SEQ ID NO: 1261 - DNA, 4371 bp, synthetic construct
  misc_feature 1..4371: note = Variant of human B-domain deleted Factor VIII
  source 1..4371: mol_type = other DNA
atgcagattgaactgtctacctgcttcttcctctgtttgctgaggttctgctttagcgccactagacggtactaccttggcgctgtggagctgtcctgggactatatgcagagtgatttgggagagcttcccgtcgacgcacgatttcctcctcgcgttccaaagtcatttccctttaacacaagccaggtgtacaagaagacgctcttcgtcgaattcaccgatcacctgttcaatatcgccaaacccagaccaccatggatgggtcttttggggcctaccatacaagcggaggtgtatgacacagttgttatcactctcaagaacatggcttctcatccggtaagtcttcacgcagtgggcgtgtcctactggaaagcttcagaaggagccgagtatgatgatcagacatcccagagggagaaagaagacgacaaggtatttccaggtgggtctcatacctatgtgtggcaagtgctcaaagagaatggccctatggcaagcgatccgccgtgtttgacttacagctacctttcacacgttgacctcgtcaaggacctcaactccgggttgattggagccttgttggtatgcagggaaggatctcttgccaaagagaagacacagaccctccacaagtttatccttctctttgctgtgttcgatgagggcaaaagttggcatagcgaaacgaagaattccctcatgcaggatcgcgacgcagccagcgccagagcttggcccaagatgcacactgtgaacggatatgtcaataggacgcttcctggcttgattgggtgtcatcggaaaagtgtctactggcacgtgatcggaatggggacaacaccagaggtccactccatatttctcgaaggccataccttccttgttcgaaaccacagacaggcatccttggggatctctcccattacctttctcactgcccaaacgctccttatggacttgggtcagttccttctcttttgccatatcccgtcacaccagcatgatggtatggaagcttatgtgaaagtcgacagttgtcctgaggagccacagttgcgcatgaagaataatgaagaagccgaggattacgacgacgatctcaccgattctgagatggacgtggtgaggtttgatgacgacaactctccctccatcattcaagctcggagcggggcgaagaaacaccccaagacttgggtccactatatagcggcggaagaggaggattgggattacgctcctcttgtattggcaccagatgaccgctcatacaaaagccagtacctcaacaacggaccgcagagaattggccggaagtataagaaagtgcgatttatggcctatacagacgaaacctttaagacaagggaggccatccagcatgagagtgggattttgggacctcttctttacggcgaagttggtgataccctcctcatcatcttcaagaatcaagcttctcgcccctataacatttacccacacgggatcactgacgttaggcctttgtatagcagaagacttcccaaaggcgtgaagcatctcaaagacttccccattttgccaggcgagatctttaagtacaaatggaccgtcacagtggaagatggaccgactaaatcagaccctcgatgccttacgcggtactattcctccttcgtgaatatggagagagatttggcaagcggactcataggaccactcctcatctgttacaaggaatctgtagaccagaggggtaaccagattatgagtgataaacgcaatgtgatcctttttagcgtcttcgacgagaaccggtcctggtacttgaccgagaatatacaaaggttccttcccaaccccgcaggcgttcagttggaagaccctgagtttcaggccagcaatattatgcactcaatcaacggctatgtgtttgatagtctccagctttctgtttgcctccatgaagtagcctattggtacatcttgtcaattggtgctcaaacagacttcctctccgtcttcttctccggctacacctttaagcacaagggcgtgtatgaggacactctcacactctttccattttctggagaaaccgtgttcatgagcatggagaatccaggcctttggatcttgggttgccacaacagtgattttcgcaatcggggaatgactgctctcctcaaagtcagcagctgtgattggaacacaggcgactattacgaagattcttacgaggacataagtgcctactttgactccaagaataacgccattgagcccagatcattctcccagaatcctcccgtgcttaaaaggcatcagcgcgaaggtaccagaactactcttcagtctgatcaagaggagattgactatgacgacaccattagcgtggaaatgaagaaggaggatttcgatatctatgacgaagatgagaaccagtctccgcggagctttcagaagaagacgcgacactacttcattgcagcagtcgaaaggctttgggactacggtatgtcatcatcgcctcatgtgttgcgcaatagagctcagagtggaagtgttccacagttcaagaaagtcgtctttcaagagtttacagatggcagcttcacacagcctctctatcggggcgagcttaacgaacatttgggactccttggtccctatatccgagccgaagtggaggacaacattatggttacctttaggaatcaagcctctcgcccctacagcttctactcctccctcatcagttatgaggaggatcagagacaaggcgctgaaccacggaagaactttgtgaaaccgaatgagacgaagacctacttctggaaagtacagcaccacatggcccccacaaaagacgaattcgattgcaaagcatgggcgtatttttcagacgttgacttggagaaagatgtacattcaggacttattggtcctttgttggtgtgtcacactaacactctcaatccagcccatggcaggcaggtgacagtccaggaattcgctcttttctttaccatctttgatgagaccaagtcctggtacttcacggaaaacatggagcgcaattgcagagccccctgtaacatacagatggaggaccctacctttaaggaaaattatcggttccacgcaatcaacggatacattatggatacactccctggccttgtgatggctcaggaccaacgaatcaggtggtacctcctcagcatgggttctaatgagaacatacactccattcacttttcaggacatgtgttcactgtccggaagaaagaagagtataagatggccctctacaatttgtatccaggcgtgtttgagaccgttgaaatgcttccctctaaagctggcatctggagagtagagtgcttgatcggagaacatcttcacgcaggtatgagcaccttgttcctcgtgtacagcaacaaatgtcagaatccacttggcatggccagtggacacattcgcgactttcagatcacagcatctggccagtatggacaatgggccccaaagttggctcgcctccattactccggtagcataaatgcgtggtccactaaagaacctttcagctggattaaggtcgatcttcttgcccccatgatcatccacggcattaagacacagggagcgaggcagaaattctcctccctctacatctcacagttcattattatgtatagtttggacggcaagaagtggcaaacttatagaggtaacagtactggaacagacatggtgttcttcggcaacgttgatagctctggcatcaaacacaacatctttaatcctcccataatagctcggtacatcagattgcatccgacccactacagcattaggagtacactccgaatggagcttatgggttgcgacttgaattcctgttcaatgccactcggaatggagtctaaagccatctctgatgcacagataaccgccagtagctactttacgaacatgtttgctacgtggtcaccctctaaggcaaggcttcatttgcaaggccggtctaatgcctggagacctcaggtgaacaacccgaaagaatggctccaggtggactttcagaagaccatgaaagtaacaggtgtcactactcagggagttaagtccttggatactagcatgtatgtgaaggagttccttatttcctcatcacaagatggccaccagtggaccctcttctttcagaatggtaaggtcaaagtgtttcagggcaatcaagacagcttcacacccgtggtgaacagtcttgatcctccactcttgacacgataccttcgaatccatccacagtcttgggagcaccagattgcattgcgcatggaagtacttggatgcgaggctcaggacctctac

SEQ ID NO: 1262 - protein, 1457 aa, synthetic construct
  REGION 1..1457: note = Variant of human B-domain deleted Factor VIII
MQIELSTCFFLCLLRFCFSATRRYYLGAVELSWDYMQSDLGELPVDARFPPRVPKSFPFNTSQVYKKTLFVEFTDHLFNIAKPRPPWMGLLGPTIQAEVYDTVVITLKNMASHPVSLHAVGVSYWKASEGAEYDDQTSQREKEDDKVFPGGSHTYVWQVLKENGPMASDPPCLTYSYLSHVDLVKDLNSGLIGALLVCREGSLAKEKTQTLHKFILLFAVFDEGKSWHSETKNSLMQDRDAASARAWPKMHTVNGYVNRTLPGLIGCHRKSVYWHVIGMGTTPEVHSIFLEGHTFLVRNHRQASLGISPITFLTAQTLLMDLGQFLLFCHIPSHQHDGMEAYVKVDSCPEEPQLRMKNNEEAEDYDDDLTDSEMDVVRFDDDNSPSIIQARSGAKKHPKTWVHYIAAEEEDWDYAPLVLAPDDRSYKSQYLNNGPQRIGRKYKKVRFMAYTDETFKTREAIQHESGILGPLLYGEVGDTLLIIFKNQASRPYNIYPHGITDVRPLYSRRLPKGVKHLKDFPILPGEIFKYKWTVTVEDGPTKSDPRCLTRYYSSFVNMERDLASGLIGPLLICYKESVDQRGNQIMSDKRNVILFSVFDENRSWYLTENIQRFLPNPAGVQLEDPEFQASNIMHSINGYVFDSLQLSVCLHEVAYWYILSIGAQTDFLSVFFSGYTFKHKGVYEDTLTLFPFSGETVFMSMENPGLWILGCHNSDFRNRGMTALLKVSSCDWNTGDYYEDSYEDISAYFDSKNNAIEPRSFSQNPPVLKRHQREGTRTTLQSDQEEIDYDDTISVEMKKEDFDIYDEDENQSPRSFQKKTRHYFIAAVERLWDYGMSSSPHVLRNRAQSGSVPQFKKVVFQEFTDGSFTQPLYRGELNEHLGLLGPYIRAEVEDNIMVTFRNQASRPYSFYSSLISYEEDQRQGAEPRKNFVKPNETKTYFWKVQHHMAPTKDEFDCKAWAYFSDVDLEKDVHSGLIGPLLVCHTNTLNPAHGRQVTVQEFALFFTIFDETKSWYFTENMERNCRAPCNIQMEDPTFKENYRFHAINGYIMDTLPGLVMAQDQRIRWYLLSMGSNENIHSIHFSGHVFTVRKKEEYKMALYNLYPGVFETVEMLPSKAGIWRVECLIGEHLHAGMSTLFLVYSNKCQNPLGMASGHIRDFQITASGQYGQWAPKLARLHYSGSINAWSTKEPFSWIKVDLLAPMIIHGIKTQGARQKFSSLYISQFIIMYSLDGKKWQTYRGNSTGTDMVFFGNVDSSGIKHNIFNPPIIARYIRLHPTHYSIRSTLRMELMGCDLNSCSMPLGMESKAISDAQITASSYFTNMFATWSPSKARLHLQGRSNAWRPQVNNPKEWLQVDFQKTMKVTGVTTQGVKSLDTSMYVKEFLISSSQDGHQWTLFFQNGKVKVFQGNQDSFTPVVNSLDPPLLTRYLRIHPQSWEHQIALRMEVLGCEAQDLY

SEQ ID NO: 1263 - DNA, 4371 bp, synthetic construct
  misc_feature 1..4371: note = Variant of human B-domain deleted Factor VIII
  source 1..4371: mol_type = other DNA
atgcagattgaactgtctacctgcttcttcctctgtttgctgaggttctgctttagcgccactagacggtactaccttggcgctgtggagctgtcctgggactatatgcagagtgatttgggagagcttcccgtcgacgcacgatttcctcctcgcgttccaaagtcatttccctttaacacaagccaggtgtacaagaagacgctcttcgtcgaattcaccgatcacctgttcaatatcgccaaacccagaccaccatggatgggtcttttggggcctaccatacaagcggaggtgtatgacacagttgttatcactctcaagaacatggcttctcatccggtaagtcttcacgcagtgggcgtgtcctactggaaagcttcagaaggagccgagtatgatgatcagacatcccagagggagaaagaagacgacaaggtatttccaggtgggtctcatacctatgtgtggcaagtgctcaaagagaatggccctatggcaagcgatccgccgtgtttgacttacagctacctttcacacgttgacctcgtcaaggacctcaactccgggttgattggagccttgttggtatgcagggaaggatctcttgccaaagagaagacacagacccaacacaagtttatccttctctttgctgtgttcgatgagggcaaaagttggcatagcgaaacgaagaattccctcatgcaggatcgcgacgcagccagcgccagagcttggcccaagatgcacactgtgaacggatatgtcaataggacgcttcctggcttgattgggtgtcatcggaaaagtgtctactggcacgtgatcggaatggggacaacaccagaggtccactccatatttctcgaaggccataccttccttgttcgaaaccacagacaggcatccttggggatctctcccattaccttcctcactgcccaaacgctccttatggacttgggtcagttccttctcttttgccatatcccgtcacaccagcatgatggtatggaagcttatgtgaaagtcgacagttgtcctgaggagccacagttgcgcatgaagaataatgaagaagccgaggattacgacgacgatctcaccgattctgagatggacgtggtgaggtttgatgacgacaactctccctccatcattcaagctcggagcggggcgaagaaacaccccaagacttgggtccactatatagcggcggaagaggaggattgggattacgctcctcttgtattggcaccagatgaccgctcatacaaaagccagtacctcaacaacggaccgcagagaattggccggaagtataagaaagtgcgatttatggcctatacagacgaaacctttaagacaagggaggccatccagcatgagagtgggattttgggacctcttctttacggcgaagttggtgataccctcctcatcatcttcaagaatcaagcttctcgcccctataacatttacccacacgggatcactgacgttaggcctttgtatagcagaagacttcccaaaggcgtgaagcatctcaaagacttccccattttgccaggcgagatctttaagtacaaatggaccgtcacagtggaagatggaccgactaaatcagaccctcgatgccttacgcggtactattcctccttcgtgaatatggagagagatttggcaagcggactcataggaccactcctcatctgttacaaggaatctgtagaccagaggggtaaccagattatgagtgataaacgcaatgtgatcctttttagcgtcttcgacgagaaccggtcctggtacttgaccgagaatatacaaaggttccttcccaaccctgcaggggttcagttggaagaccctgagtttcaggccagcaatattatgcactcaatcaacggctatgtgtttgatagtctccagctttctgtttgcctccatgaagtagcctattggtacatcttgtcaattggtgctcaaacagacttcctctccgtcttcttctccggctacacctttaagcacaagatggtgtatgaggacactctcacactctttccattttctggagaaaccgtgttcatgagcatggagaatccaggcctttggatcttgggttgccacaacagtgattttcgcaatcggggaatgactgctctcctcaaagtcagcagctgtgattggaacacaggcgactattacgaagattcttacgaggacataagtgcctactttgactccaagaataacgccattgagcccagatcattctcccagaatcctcccgtgcttaaaaggcatcagcgcgaaggtaccagaactactcttcagtctgatcaagaggagattgactatgacgacaccattagcgtggaaatgaagaaggaggatttcgatatctatgacgaagatgagaaccagtctccgcggagctttcagaagaagacgcgacactacttcattgcagcagtcgaaaggctttgggactacggtatgtcatcatcgcctcatgtgttgcgcaatagagctcagagtggaagtgttccacagttcaagaaagtcgtctttcaagagtttacagatggcagcttcacacagcctctctatcggggcgagcttaacgaacatttgggactccttggtccctatatccgagccgaagtggaggacaacattatggttacctttaggaatcaagcctctcgcccctacagcttctactcctccctcatcagttatgaggaggatcagagacaaggcgctgaaccacggaagaactttgtgaaaccgaatgagacgaagacctacttctggaaagtacagcaccacatggcccccacaaaagacgaattcgattgcaaagcatgggcgtatttttcagacgttgacttggagaaagatgtacattcaggacttattggtcctttgttggtgtgtcacactaacactctcaatccagcccatggcaggcaggtgacagtccaggaattcgctcttttctttaccatctttgatgagaccaagtcctggtacttcacggaaaacatggagcgcaattgcagagccccctgtaacatacagatggaggaccctacctttaaggaaaattatcggttccacgcaatcaacggatacattatggatacactccctggccttgtgatggctcaggaccaacgaatcaggtggtacctcctcagcatgggttctaatgagaacatacactccattcacttttcaggacatgtgttcactgtccggaagaaagaagagtataagatggccctctacaatttgtatccaggcgtgtttgagaccgttgaaatgcttccctctaaagctggcatctggagagtagagtgcttgatcggagaacatcttcacgcaggtatgagcaccttgttcctcgtgtacagcaacaaatgtcagaatccacttggcatggccagtggacacattcgcgactttcagatcacagcatctggccagtatggacaatgggccccaaagttggctcgcctccattactccggtagcataaatgcgtggtccactaaagaacctttcagctggattaaggtcgatcttcttgcccccatgatcatccacggcattaagacacagggagcgaggcagaaattctcctccctctacatctcacagttcattattatgtatagtttggacggcaagaagtggcaaacttatagaggtaacagtactggaacagacatggtgttcttcggcaacgttgatagctctggcatcaaacacaacatctttaatcctcccataatagctcggtacatcagattgcatccgacccactacagcattaggagtacactccgaatggagcttatgggttgcgacttgaattcctgttcaatgccactcggaatggagtctaaagccatctctgatgcacagataaccgccagtagctactttacgaacatgtttgctacgtggtcaccctctaaggcaaggcttcatttgcaaggccggtctaatgcctggagacctcaggtgaacaacccgaaagaatggctccaggtggactttcagaagaccatgaaagtaacaggtgtcactactcagggagttaagtccttggatactagcatgtatgtgaaggagttccttatttcctcatcacaagatggccaccagtggaccctcttctttcagaatggtaaggtcaaagtgtttcagggcaatcaagacagcttcacacccgtggtgaacagtcttgatcctccactcttgacacgataccttcgaatccatccacagtcttgggagcaccagattgcattgcgcatggaagtacttggatgcgaggctcaggacctctac

SEQ ID NO: 1264 - protein, 1457 aa, synthetic construct
  REGION 1..1457: note = Variant of human B-domain deleted Factor VIII
MQIELSTCFFLCLLRFCFSATRRYYLGAVELSWDYMQSDLGELPVDARFPPRVPKSFPFNTSQVYKKTLFVEFTDHLFNIAKPRPPWMGLLGPTIQAEVYDTVVITLKNMASHPVSLHAVGVSYWKASEGAEYDDQTSQREKEDDKVFPGGSHTYVWQVLKENGPMASDPPCLTYSYLSHVDLVKDLNSGLIGALLVCREGSLAKEKTQTQHKFILLFAVFDEGKSWHSETKNSLMQDRDAASARAWPKMHTVNGYVNRTLPGLIGCHRKSVYWHVIGMGTTPEVHSIFLEGHTFLVRNHRQASLGISPITFLTAQTLLMDLGQFLLFCHIPSHQHDGMEAYVKVDSCPEEPQLRMKNNEEAEDYDDDLTDSEMDVVRFDDDNSPSIIQARSGAKKHPKTWVHYIAAEEEDWDYAPLVLAPDDRSYKSQYLNNGPQRIGRKYKKVRFMAYTDETFKTREAIQHESGILGPLLYGEVGDTLLIIFKNQASRPYNIYPHGITDVRPLYSRRLPKGVKHLKDFPILPGEIFKYKWTVTVEDGPTKSDPRCLTRYYSSFVNMERDLASGLIGPLLICYKESVDQRGNQIMSDKRNVILFSVFDENRSWYLTENIQRFLPNPAGVQLEDPEFQASNIMHSINGYVFDSLQLSVCLHEVAYWYILSIGAQTDFLSVFFSGYTFKHKMVYEDTLTLFPFSGETVFMSMENPGLWILGCHNSDFRNRGMTALLKVSSCDWNTGDYYEDSYEDISAYFDSKNNAIEPRSFSQNPPVLKRHQREGTRTTLQSDQEEIDYDDTISVEMKKEDFDIYDEDENQSPRSFQKKTRHYFIAAVERLWDYGMSSSPHVLRNRAQSGSVPQFKKVVFQEFTDGSFTQPLYRGELNEHLGLLGPYIRAEVEDNIMVTFRNQASRPYSFYSSLISYEEDQRQGAEPRKNFVKPNETKTYFWKVQHHMAPTKDEFDCKAWAYFSDVDLEKDVHSGLIGPLLVCHTNTLNPAHGRQVTVQEFALFFTIFDETKSWYFTENMERNCRAPCNIQMEDPTFKENYRFHAINGYIMDTLPGLVMAQDQRIRWYLLSMGSNENIHSIHFSGHVFTVRKKEEYKMALYNLYPGVFETVEMLPSKAGIWRVECLIGEHLHAGMSTLFLVYSNKCQNPLGMASGHIRDFQITASGQYGQWAPKLARLHYSGSINAWSTKEPFSWIKVDLLAPMIIHGIKTQGARQKFSSLYISQFIIMYSLDGKKWQTYRGNSTGTDMVFFGNVDSSGIKHNIFNPPIIARYIRLHPTHYSIRSTLRMELMGCDLNSCSMPLGMESKAISDAQITASSYFTNMFATWSPSKARLHLQGRSNAWRPQVNNPKEWLQVDFQKTMKVTGVTTQGVKSLDTSMYVKEFLISSSQDGHQWTLFFQNGKVKVFQGNQDSFTPVVNSLDPPLLTRYLRIHPQSWEHQIALRMEVLGCEAQDLY

SEQ ID NO: 1265 - DNA, 4371 bp, synthetic construct
  misc_feature 1..4371: note = Variant of human B-domain deleted Factor VIII
  source 1..4371: mol_type = other DNA
atgcagattgaactgtctacctgcttcttcctctgtttgctgaggttctgctttagcgccactagacggtactaccttggcgctgtggagctgtcctgggactatatgcagagtgatttgggagagcttcccgtcgacgcacgatttcctcctcgcgttccaaagtcatttccctttaacacaagccaggtgtacaagaagacgctcttcgtcgaattcaccgatcacctgttcaatatcgccaaacccagaccaccatggatgggtcttttggggcctaccatacaagcggaggtgtatgacacagttgttatcactctcaagaacatggcttctcatccggtaagtcttcacgcagtgggcgtgtcctactggaaagcttcagaaggagccgagtatgatgatcagacatcccagagggagaaagaagacgacaaggtatttccaggtgggtctcatacctatgtgtggcaagtgctcaaagagaatggccctatggcaagcgatccgccgtgtttgacttacagctacctttcacacgttgacctcgtcaaggacctcaactccgggttgattggagccttgttggtatgcagggaaggatctcttgccaaagagaagacacagaccctgcacaagtttatccttctctttgctgtgttcgatgagggcaaaagttggcatagcgaaacgaagaattccctcatgcaggatcgcgacgcagccagcgccagagcttggcccaagatgcacactgtgaacggatatgtcaataggacgcttcctggcttgattgggtgtcatcggaaaagtgtctactggcacgtgatcggaatggggacaacaccagaggtccactccatatttctcgaaggccataccttccttgttcgaaaccacagacaggcatccttggggatctctcccattacctttctcactgcccaaacgctccttcgtgacttgggtcagttccttctcttttgccatatcccgtcacaccagcatgatggtatggaagcttatgtgaaagtcgacagttgtcctgaggagccacagttgcgcatgaagaataatgaagaagccgaggattacgacgacgatctcaccgattctgagatggacgtggtgaggtttgatgacgacaactctccctccatcattcaagctcggagcggggcgaagaaacaccccaagacttgggtccactatatagcggcggaagaggaggattgggattacgctcctcttgtattggcaccagatgaccgctcatacaaaagccagtacctcaacaacggaccgcagagaattggccggaagtataagaaagtgcgatttatggcctatacagacgaaacctttaagacaagggaggccatccagcatgagagtgggattttgggacctcttctttacggcgaagttggtgataccctcctcatcatcttcaagaatcaagcttctcgcccctataacatttacccacacgggatcactgacgttaggcctttgtatagcagaagacttcccaaaggcgtgaagcatctcaaagacttccccattttgccaggcgagatctttaagtacaaatggaccgtcacagtggaagatggaccgactaaatcagaccctcgatgccttacgcggtactattcctccttcgtgaatatggagagagatttggcaagcggactcataggaccactcctcatctgttacaaggaatctgtagaccagaggggtaaccagattatgagtgataaacgcaatgtgatcctttttagcgtcttcgacgagaaccggtcctggtacttgaccgagaatatacaaaggttccttcccaaccccgcaggcgttcagttggaagaccctgagtttcaggccagcaatattatgcactcaatcaacggctatgtgtttgatagtctccagctttctgtttgcctccatgaagtagcctattggtacatcttgtcaattggtgctcaaacagacttcctctccgtcttcttctccggctacacctttaagcacaagatggtgtatgaggacactctcacactctttccattttctggagaaaccgtgttcatgagcatggagaatccaggcctttggatcttgggttgccacaacagtgattttcgcaatcggggaatgactgctctcctcaaagtcagcagctgtgattggaacacaggcgactattacgaagattcttacgaggacataagtgcctactttgactccaagaataacgccattgagcccagatcattctcccagaatcctcccgtgcttaaaaggcatcagcgcgaaggtaccagaactactcttcagtctgatcaagaggagattgactatgacgacaccattagcgtggaaatgaagaaggaggatttcgatatctatgacgaagatgagaaccagtctccgcggagctttcagaagaagacgcgacactacttcattgcagcagtcgaaaggctttgggactacggtatgtcatcatcgcctcatgtgttgcgcaatagagctcagagtggaagtgttccacagttcaagaaagtcgtctttcaagagtttacagatggcagcttcacacagcctctctatcggggcgagcttaacgaacatttgggactccttggtccctatatccgagccgaagtggaggacaacattatggttacctttaggaatcaagcctctcgcccctacagcttctactcctccctcatcagttatgaggaggatcagagacaaggcgctgaaccacggaagaactttgtgaaaccgaatgagacgaagacctacttctggaaagtacagcaccacatggcccccacaaaagacgaattcgattgcaaagcatgggcgtatttttcagacgttgacttggagaaagatgtacattcaggacttattggtcctttgttggtgtgtcacactaacactctcaatccagcccatggcaggcaggtgacagtccaggaattcgctcttttctttaccatctttgatgagaccaagtcctggtacttcacggaaaacatggagcgcaattgcagagccccctgtaacatacagatggaggaccctacctttaaggaaaattatcggttccacgcaatcaacggatacattatggatacactccctggccttgtgatggctcaggaccaacgaatcaggtggtacctcctcagcatgggttctaatgagaacatacactccattcacttttcaggacatgtgttcactgtccggaagaaagaagagtataagatggccctctacaatttgtatccaggcgtgtttgagaccgttgaaatgcttccctctaaagctggcatctggagagtagagtgcttgatcggagaacatcttcacgcaggtatgagcaccttgttcctcgtgtacagcaacaaatgtcagaatccacttggcatggccagtggacacattcgcgactttcagatcacagcatctggccagtatggacaatgggccccaaagttggctcgcctccattactccggtagcataaatgcgtggtccactaaagaacctttcagctggattaaggtcgatcttcttgcccccatgatcatccacggcattaagacacagggagcgaggcagaaattctcctccctctacatctcacagttcattattatgtatagtttggacggcaagaagtggcaaacttatagaggtaacagtactggaacagacatggtgttcttcggcaacgttgatagctctggcatcaaacacaacatctttaatcctcccataatagctcggtacatcagattgcatccgacccactacagcattaggagtacactccgaatggagcttatgggttgcgacttgaattcctgttcaatgccactcggaatggagtctaaagccatctctgatgcacagataaccgccagtagctactttacgaacatgtttgctacgtggtcaccctctaaggcaaggcttcatttgcaaggccggtctaatgcctggagacctcaggtgaacaacccgaaagaatggctccaggtggactttcagaagaccatgaaagtaacaggtgtcactactcagggagttaagtccttggatactagcatgtatgtgaaggagttccttatttcctcatcacaagatggccaccagtggaccctcttctttcagaatggtaaggtcaaagtgtttcagggcaatcaagacagcttcacacccgtggtgaacagtcttgatcctccactcttgacacgataccttcgaatccatccacagtcttgggagcaccagattgcattgcgcatggaagtacttggatgcgaggctcaggacctctac

SEQ ID NO: 1266 - protein, 1457 aa, synthetic construct
  REGION 1..1457: note = Variant of human B-domain deleted Factor VIII
MQIELSTCFFLCLLRFCFSATRRYYLGAVELSWDYMQSDLGELPVDARFPPRVPKSFPFNTSQVYKKTLFVEFTDHLFNIAKPRPPWMGLLGPTIQAEVYDTVVITLKNMASHPVSLHAVGVSYWKASEGAEYDDQTSQREKEDDKVFPGGSHTYVWQVLKENGPMASDPPCLTYSYLSHVDLVKDLNSGLIGALLVCREGSLAKEKTQTLHKFILLFAVFDEGKSWHSETKNSLMQDRDAASARAWPKMHTVNGYVNRTLPGLIGCHRKSVYWHVIGMGTTPEVHSIFLEGHTFLVRNHRQASLGISPITFLTAQTLLRDLGQFLLFCHIPSHQHDGMEAYVKVDSCPEEPQLRMKNNEEAEDYDDDLTDSEMDVVRFDDDNSPSIIQARSGAKKHPKTWVHYIAAEEEDWDYAPLVLAPDDRSYKSQYLNNGPQRIGRKYKKVRFMAYTDETFKTREAIQHESGILGPLLYGEVGDTLLIIFKNQASRPYNIYPHGITDVRPLYSRRLPKGVKHLKDFPILPGEIFKYKWTVTVEDGPTKSDPRCLTRYYSSFVNMERDLASGLIGPLLICYKESVDQRGNQIMSDKRNVILFSVFDENRSWYLTENIQRFLPNPAGVQLEDPEFQASNIMHSINGYVFDSLQLSVCLHEVAYWYILSIGAQTDFLSVFFSGYTFKHKMVYEDTLTLFPFSGETVFMSMENPGLWILGCHNSDFRNRGMTALLKVSSCDWNTGDYYEDSYEDISAYFDSKNNAIEPRSFSQNPPVLKRHQREGTRTTLQSDQEEIDYDDTISVEMKKEDFDIYDEDENQSPRSFQKKTRHYFIAAVERLWDYGMSSSPHVLRNRAQSGSVPQFKKVVFQEFTDGSFTQPLYRGELNEHLGLLGPYIRAEVEDNIMVTFRNQASRPYSFYSSLISYEEDQRQGAEPRKNFVKPNETKTYFWKVQHHMAPTKDEFDCKAWAYFSDVDLEKDVHSGLIGPLLVCHTNTLNPAHGRQVTVQEFALFFTIFDETKSWYFTENMERNCRAPCNIQMEDPTFKENYRFHAINGYIMDTLPGLVMAQDQRIRWYLLSMGSNENIHSIHFSGHVFTVRKKEEYKMALYNLYPGVFETVEMLPSKAGIWRVECLIGEHLHAGMSTLFLVYSNKCQNPLGMASGHIRDFQITASGQYGQWAPKLARLHYSGSINAWSTKEPFSWIKVDLLAPMIIHGIKTQGARQKFSSLYISQFIIMYSLDGKKWQTYRGNSTGTDMVFFGNVDSSGIKHNIFNPPIIARYIRLHPTHYSIRSTLRMELMGCDLNSCSMPLGMESKAISDAQITASSYFTNMFATWSPSKARLHLQGRSNAWRPQVNNPKEWLQVDFQKTMKVTGVTTQGVKSLDTSMYVKEFLISSSQDGHQWTLFFQNGKVKVFQGNQDSFTPVVNSLDPPLLTRYLRIHPQSWEHQIALRMEVLGCEAQDLY

SEQ ID NO: 1267 - DNA, 4371 bp, synthetic construct
  misc_feature 1..4371: note = Variant of human B-domain deleted Factor VIII
  source 1..4371: mol_type = other DNA
atgcagattgaactgtctacctgcttcttcctctgtttgctgaggttctgctttagcgccactagacggtactaccttggcgctgtggagctgtcctgggactatatgcagagtgatttgggagagcttcccgtcgacgcacgatttcctcctcgcgttccaaagtcatttccctttaacacaagccaggtgtacaagaagacgctcttcgtcgaattcaccgatcacctgttcaatatcgccaaacccagaccaccatggatgggtcttttggggcctaccatacaagcggaggtgtatgacacagttgttatcactctcaagaacatggcttctcatccggtaagtcttcacgcagtgggcgtgtcctactggaaagcttcagaaggagccgagtatgatgatcagacatcccagagggagaaagaagacgacaaggtatttccaggtgggtctcatacctatgtgtggcaagtgctcaaagagaatggccctatggcaagcgatccgccgtgtttgacttacagctacctttcacacgttgacctcgtcaaggacctcaactccgggttgattggagccttgttggtatgcagggaaggatctcttgccaaagagaagacacagaccctgcacaagtttatccttctctttgctgtgttcgatgagggcaaaagttggcatagcgaaacgaagaattccctcatgcaggatcgcgacgcagccagcgccagagcttggcccaagatgcacactgtgaacggatatgtcaataggacgcttcctggcttgattgggtgtcatcggaaaagtgtctactggcacgtgatcggaatggggacaacaccagaggtccactccatatttctcgaaggccataccttccttgttcgaaaccacagacaggcatccttggggatctctcccattaccttcctcactgcccaaacgctccttatggacttgggtcagttccttctcttttgccatatcccgtcacaccagcatgatggtatggaagcttatgtgaaagtcgacagttgtcctgaggagccacagttgcgcatgaagaataatgaagaagccgaggattacgacgacgatctcaccgattctgagatggacgtggtgaggtttgatgacgacaactctccctccatcattcaagctcggagcggggcgaagaaacaccccaagacttgggtccactatatagcggcggaagaggaggattgggattacgctcctcttgtattggcaccagatgaccgctcatacaaaagccagtacctcaacaacggaccgcagagaattggccggaagtataagaaagtgcgatttatggcctatacagacgaaacctttaagacaagggaggccatccagcatgagagtgggattttgggacctcttctttacggcgaagttggtgataccctcctcatcatcttcaagaatcaagcttctcgcccctataacatttacccacacgggatcactgacgttaggcctttgtatagcagaagacttcccaaaggcgtgaagcatctcaaagacttccccattttgccaggcgagatctttaagtacaaatggaccgttacagtggaagatggaccgactaaatcagaccctcgatgccttacgcggtactattcctccttcgtgaattgggagagagatttggcaagcggactcataggaccactcctcatctgttacaaggaatctgtagaccagaggggtaaccagattatgagtgataaacgcaatgtgatcctttttagcgtcttcgacgagaaccggtcctggtacttgaccgagaatatacagaggttccttcccaaccccgcaggcgttcagttggaagaccctgagtttcaggccagcaatattatgcactcaatcaacggctatgtgtttgatagtctccagctttctgtttgcctccatgaagtagcctattggtacatcttgtcaattggtgctcaaacagacttcctctccgtcttcttctccggctacacctttaagcacaagatggtgtatgaggacactctcacactctttccattttctggagaaaccgtgttcatgagcatggagaatccaggcctttggatcttgggttgccacaacagtgattttcgcaatcggggaatgactgctctcctcaaagtcagcagctgtgattggaacacaggcgactattacgaagattcttacgaggacataagtgcctactttgactccaagaataacgccattgagcccagatcattctcccagaatcctcccgtgcttaaaaggcatcagcgcgaaggtaccagaactactcttcagtctgatcaagaggagattgactatgacgacaccattagcgtggaaatgaagaaggaggatttcgatatctatgacgaagatgagaaccagtctccgcggagctttcagaagaagacgcgacactacttcattgcagcagtcgaaaggctttgggactacggtatgtcatcatcgcctcatgtgttgcgcaatagagctcagagtggaagtgttccacagttcaagaaagtcgtctttcaagagtttacagatggcagcttcacacagcctctctatcggggcgagcttaacgaacatttgggactccttggtccctatatccgagccgaagtggaggacaacattatggttacctttaggaatcaagcctctcgcccctacagcttctactcctccctcatcagttatgaggaggatcagagacaaggcgctgaaccacggaagaactttgtgaaaccgaatgagacgaagacctacttctggaaagtacagcaccacatggcccccacaaaagacgaattcgattgcaaagcatgggcgtatttttcagacgttgacttggagaaagatgtacattcaggacttattggtcctttgttggtgtgtcacactaacactctcaatccagcccatggcaggcaggtgacagtccaggaattcgctcttttctttaccatctttgatgagaccaagtcctggtacttcacggaaaacatggagcgcaattgcagagccccctgtaacatacagatggaggaccctacctttaaggaaaattatcggttccacgcaatcaacggatacattatggatacactccctggccttgtgatggctcaggaccaacgaatcaggtggtacctcctcagcatgggttctaatgagaacatacactccattcacttttcaggacatgtgttcactgtccggaagaaagaagagtataagatggccctctacaatttgtatccaggcgtgtttgagaccgttgaaatgcttccctctaaagctggcatctggagagtagagtgcttgatcggagaacatcttcacgcaggtatgagcaccttgttcctcgtgtacagcaacaaatgtcagaatccacttggcatggccagtggacacattcgcgactttcagatcacagcatctggccagtatggacaatgggccccaaagttggctcgcctccattactccggtagcataaatgcgtggtccactaaagaacctttcagctggattaaggtcgatcttcttgcccccatgatcatccacggcattaagacacagggagcgaggcagaaattctcctccctctacatctcacagttcattattatgtatagtttggacggcaagaagtggcaaacttatagaggtaacagtactggaacagacatggtgttcttcggcaacgttgatagctctggcatcaaacacaacatctttaatcctcccataatagctcggtacatcagattgcatccgacccactacagcattaggagtacactccgaatggagcttatgggttgcgacttgaattcctgttcaatgccactcggaatggagtctaaagccatctctgatgcacagataaccgccagtagctactttacgaacatgtttgctacgtggtcaccctctaaggcaaggcttcatttgcaaggccggtctaatgcctggagacctcaggtgaacaacccgaaagaatggctccaggtggactttcagaagaccatgaaagtaacaggtgtcactactcagggagttaagtccttggatactagcatgtatgtgaaggagttccttatttcctcatcacaagatggccaccagtggaccctcttctttcagaatggtaaggtcaaagtgtttcagggcaatcaagacagcttcacacccgtggtgaacagtcttgatcctccactcttgacacgataccttcgaatccatccacagtcttgggagcaccagattgcattgcgcatggaagtacttggatgcgaggctcaggacctctac

SEQ ID NO: 1268 - protein, 1457 aa, synthetic construct
  REGION 1..1457: note = Variant of human B-domain deleted Factor VIII
MQIELSTCFFLCLLRFCFSATRRYYLGAVELSWDYMQSDLGELPVDARFPPRVPKSFPFNTSQVYKKTLFVEFTDHLFNIAKPRPPWMGLLGPTIQAEVYDTVVITLKNMASHPVSLHAVGVSYWKASEGAEYDDQTSQREKEDDKVFPGGSHTYVWQVLKENGPMASDPPCLTYSYLSHVDLVKDLNSGLIGALLVCREGSLAKEKTQTLHKFILLFAVFDEGKSWHSETKNSLMQDRDAASARAWPKMHTVNGYVNRTLPGLIGCHRKSVYWHVIGMGTTPEVHSIFLEGHTFLVRNHRQASLGISPITFLTAQTLLMDLGQFLLFCHIPSHQHDGMEAYVKVDSCPEEPQLRMKNNEEAEDYDDDLTDSEMDVVRFDDDNSPSIIQARSGAKKHPKTWVHYIAAEEEDWDYAPLVLAPDDRSYKSQYLNNGPQRIGRKYKKVRFMAYTDETFKTREAIQHESGILGPLLYGEVGDTLLIIFKNQASRPYNIYPHGITDVRPLYSRRLPKGVKHLKDFPILPGEIFKYKWTVTVEDGPTKSDPRCLTRYYSSFVNWERDLASGLIGPLLICYKESVDQRGNQIMSDKRNVILFSVFDENRSWYLTENIQRFLPNPAGVQLEDPEFQASNIMHSINGYVFDSLQLSVCLHEVAYWYILSIGAQTDFLSVFFSGYTFKHKMVYEDTLTLFPFSGETVFMSMENPGLWILGCHNSDFRNRGMTALLKVSSCDWNTGDYYEDSYEDISAYFDSKNNAIEPRSFSQNPPVLKRHQREGTRTTLQSDQEEIDYDDTISVEMKKEDFDIYDEDENQSPRSFQKKTRHYFIAAVERLWDYGMSSSPHVLRNRAQSGSVPQFKKVVFQEFTDGSFTQPLYRGELNEHLGLLGPYIRAEVEDNIMVTFRNQASRPYSFYSSLISYEEDQRQGAEPRKNFVKPNETKTYFWKVQHHMAPTKDEFDCKAWAYFSDVDLEKDVHSGLIGPLLVCHTNTLNPAHGRQVTVQEFALFFTIFDETKSWYFTENMERNCRAPCNIQMEDPTFKENYRFHAINGYIMDTLPGLVMAQDQRIRWYLLSMGSNENIHSIHFSGHVFTVRKKEEYKMALYNLYPGVFETVEMLPSKAGIWRVECLIGEHLHAGMSTLFLVYSNKCQNPLGMASGHIRDFQITASGQYGQWAPKLARLHYSGSINAWSTKEPFSWIKVDLLAPMIIHGIKTQGARQKFSSLYISQFIIMYSLDGKKWQTYRGNSTGTDMVFFGNVDSSGIKHNIFNPPIIARYIRLHPTHYSIRSTLRMELMGCDLNSCSMPLGMESKAISDAQITASSYFTNMFATWSPSKARLHLQGRSNAWRPQVNNPKEWLQVDFQKTMKVTGVTTQGVKSLDTSMYVKEFLISSSQDGHQWTLFFQNGKVKVFQGNQDSFTPVVNSLDPPLLTRYLRIHPQSWEHQIALRMEVLGCEAQDLY

SEQ ID NO: 1269 - DNA, 4371 bp, synthetic construct
  misc_feature 1..4371: note = Variant of human B-domain deleted Factor VIII
  source 1..4371: mol_type = other DNA
atgcagattgaactgtctacctgcttcttcctctgtttgctgaggttctgctttagcgccactagacggtactaccttggcgctgtggagctgtcctgggactatatgcagagtgatttgggagagcttcccgtcgacgcacgatttcctcctcgcgttccaaagtcatttccctttaacacaagccaggtgtacaagaagacgctcttcgtcgaattcaccgatcacctgttcaatatcgccaaacccagaccaccatggatgggtcttttggggcctaccatacaagcggaggtgtatgacacagttgttatcactctcaagaacatggcttctcatccggtaagtcttcacgcagtgggcgtgtcctactggaaagcttcagaaggagccgagtatgatgatcagacatcccagagggagaaagaagacgacaaggtatttccaggtgggtctcatacctatgtgtggcaagtgctcaaagagaatggccctatggcaagcgatccgccgtgtttgacttacagctacctttcacacgttgacctcgtcaaggacctcaactccgggttgattggagccttgttggtatgcagggaaggatctcttgccaaagagaagacacagaccctgcacaagtttatccttctctttgctgtgttcgatgagggcaaaagttggcatagcgaaacgaagaattccctcatgcaggatcgcgacgcagccagcgccagagcttggcccaagatgcacactgtgaacggatatgtcaataggacgcttcctggcttgattgggtgtcatcggaaaagtgtctactggcacgtgatcggaatggggacaacaccagaggtccactccatatttctcgaaggccataccttccttgttcgaaaccacagacaggcatccttggggatctctcccattacctttctcactgcccaaacgctccttatggacttgggtcagttccttctcttttgccatatcccgtcacaccagcatgatggtatggaagcttatgtgaaagtcgacagttgtcctgaggagccacagttgcgcatgaagaataatgaagaagccgaggattacgacgacgatctcaccgattctgagatggacgtggtgaggtttgatgacgacaactctccctccatcattcaagctcggagcggggcgaagaaacaccccaagacttgggtccactatatagcggcggaagaggaggattgggattacgctcctcttgtattggcaccagatgaccgctcatacaaaagccagtacctcaacaacggaccgcagagaattggccggaagtataagaaagtgcgatttatggcctatacagacgaaacctttaagacaagggaggccatccagcatgagagtgggattttgggacctcttctttacggcgaagttggtgataccctcctcatcatcttcaagaatcaagcttctcgcccctataacatttacccacacgggatcactgacgttaggcctttgtatagcagaagacttcccaaaggcgtgaagcatctcaaagacttccccattttgccaggcgagatctttaagtacaaatggaccgtcacagtggaagatggaccgactaaatcagaccctcgatgccttacgcggtactattcctccttcgtgaatatggagagagatttggcaagcggactcataggaccactcctcatctgttacaaggaatctgtagaccagaggggtaaccagattatgagtgataaacgcaatgtgatcctttttagcgtcttcgacgagaaccggtcctggtacttgaccgagaatatacaaaggttccttcccaaccccgcaggcgttcagttggaagaccctgagtttcaggccagcaatattatgcactcaatcaacggctatgtgtttgatagtctccagctttctgtttgcctccatgaagtagcctattggtacatcttgtcaattggtgctcaaacagacttcctctccgtcttcttctccggctacacctttaagcacaagatggtgtatgaggacactctcacactctttccattttctggagaaaccgtgttcatgagcatggagaatccaggcctttggatcttgggttgccacaacagtgattttcgcaatcggggaatgactgctctcctcaaagtcagcagctgtgattggaacacaggcgactattacgaagattcttacgaggacataagtgcctactttgactccaagaataacgccattgagcccagatcattctcccagaatcctcccgtgcttaaaaggcatcagcgcgaaggtaccagaactactcttcagtctgatcaagaggagattgactatgacgacaccattagcgtggaaatgaagaaggaggatttcgatatctatgacgaagatgagaaccagtctccgcggagctttcagaagaagacgcgacactacttcattgcagcagtcgaaaggctttgggactacggtatgtcatcaaaacctcatgtgttgcgcaatagagctcagagtggaagtgttccacagttcaagaaagtcgtctttcaagagtttacagatggcagcttcacacagcctctctatcggggcgagcttaacgaacatttgggactccttggtccctatatccgagccgaagtggaggacaacattatggttacctttaggaatcaagcctctcgcccctacagcttctactcctccctcatcagttatgaggaggatcagagacaaggcgctgaaccacggaagaactttgtgaaaccgaatgagacgaagacctacttctggaaagtacagcaccacatggcccccacaaaagacgaattcgattgcaaagcatgggcgtatttttcagacgttgacttggagaaagatgtacattcaggacttattggtcctttgttggtgtgtcacactaacactctcaatccagcccatggcaggcaggtgacagtccaggaattcgctcttttctttaccatctttgatgagaccaagtcctggtacttcacggaaaacatggagcgcaattgcagagccccctgtaacatacagatggaggaccctacctttaaggaaaattatcggttccacgcaatcaacggatacattatggatacactccctggccttgtgatggctcaggaccaacgaatcaggtggtacctcctcagcatgggttctaatgagaacatacactccattcacttttcaggacatgtgttcactgtccggaagaaagaagagtataagatggccctctacaatttgtatccaggcgtgtttgagaccgttgaaatgcttccctctaaagctggcatctggagagtagagtgcttgatcggagaacatcttcacgcaggtatgagcaccttgttcctcgtgtacagcaacaaatgtcagaatccacttggcatggccagtggacacattcgcgactttcagatcacagcatctggccagtatggacaatgggccccaaagttggctcgcctccattactccggtagcataaatgcgtggtccactaaagaacctttcagctggattaaggtcgatcttcttgcccccatgatcatccacggcattaagacacagggagcgaggcagaaattctcctccctctacatctcacagttcattattatgtatagtttggacggcaagaagtggcaaacttatagaggtaacagtactggaacagacatggtgttcttcggcaacgttgatagctctggcatcaaacacaacatctttaatcctcccataatagctcggtacatcagattgcatccgacccactacagcattaggagtacactccgaatggagcttatgggttgcgacttgaattcctgttcaatgccactcggaatggagtctaaagccatctctgatgcacagataaccgccagtagctactttacgaacatgtttgctacgtggtcaccctctaaggcaaggcttcatttgcaaggccggtctaatgcctggagacctcaggtgaacaacccgaaagaatggctccaggtggactttcagaagaccatgaaagtaacaggtgtcactactcagggagttaagtccttggatactagcatgtatgtgaaggagttccttatttcctcatcacaagatggccaccagtggaccctcttctttcagaatggtaaggtcaaagtgtttcagggcaatcaagacagcttcacacccgtggtgaacagtcttgatcctccactcttgacacgataccttcgaatccatccacagtcttgggagcaccagattgcattgcgcatggaagtacttggatgcgaggctcaggacctctac

SEQ ID NO: 1270 - protein, 1457 aa, synthetic construct
  REGION 1..1457: note = Variant of human B-domain deleted Factor VIII
MQIELSTCFFLCLLRFCFSATRRYYLGAVELSWDYMQSDLGELPVDARFPPRVPKSFPFNTSQVYKKTLFVEFTDHLFNIAKPRPPWMGLLGPTIQAEVYDTVVITLKNMASHPVSLHAVGVSYWKASEGAEYDDQTSQREKEDDKVFPGGSHTYVWQVLKENGPMASDPPCLTYSYLSHVDLVKDLNSGLIGALLVCREGSLAKEKTQTLHKFILLFAVFDEGKSWHSETKNSLMQDRDAASARAWPKMHTVNGYVNRTLPGLIGCHRKSVYWHVIGMGTTPEVHSIFLEGHTFLVRNHRQASLGISPITFLTAQTLLMDLGQFLLFCHIPSHQHDGMEAYVKVDSCPEEPQLRMKNNEEAEDYDDDLTDSEMDVVRFDDDNSPSIIQARSGAKKHPKTWVHYIAAEEEDWDYAPLVLAPDDRSYKSQYLNNGPQRIGRKYKKVRFMAYTDETFKTREAIQHESGILGPLLYGEVGDTLLIIFKNQASRPYNIYPHGITDVRPLYSRRLPKGVKHLKDFPILPGEIFKYKWTVTVEDGPTKSDPRCLTRYYSSFVNMERDLASGLIGPLLICYKESVDQRGNQIMSDKRNVILFSVFDENRSWYLTENIQRFLPNPAGVQLEDPEFQASNIMHSINGYVFDSLQLSVCLHEVAYWYILSIGAQTDFLSVFFSGYTFKHKMVYEDTLTLFPFSGETVFMSMENPGLWILGCHNSDFRNRGMTALLKVSSCDWNTGDYYEDSYEDISAYFDSKNNAIEPRSFSQNPPVLKRHQREGTRTTLQSDQEEIDYDDTISVEMKKEDFDIYDEDENQSPRSFQKKTRHYFIAAVERLWDYGMSSKPHVLRNRAQSGSVPQFKKVVFQEFTDGSFTQPLYRGELNEHLGLLGPYIRAEVEDNIMVTFRNQASRPYSFYSSLISYEEDQRQGAEPRKNFVKPNETKTYFWKVQHHMAPTKDEFDCKAWAYFSDVDLEKDVHSGLIGPLLVCHTNTLNPAHGRQVTVQEFALFFTIFDETKSWYFTENMERNCRAPCNIQMEDPTFKENYRFHAINGYIMDTLPGLVMAQDQRIRWYLLSMGSNENIHSIHFSGHVFTVRKKEEYKMALYNLYPGVFETVEMLPSKAGIWRVECLIGEHLHAGMSTLFLVYSNKCQNPLGMASGHIRDFQITASGQYGQWAPKLARLHYSGSINAWSTKEPFSWIKVDLLAPMIIHGIKTQGARQKFSSLYISQFIIMYSLDGKKWQTYRGNSTGTDMVFFGNVDSSGIKHNIFNPPIIARYIRLHPTHYSIRSTLRMELMGCDLNSCSMPLGMESKAISDAQITASSYFTNMFATWSPSKARLHLQGRSNAWRPQVNNPKEWLQVDFQKTMKVTGVTTQGVKSLDTSMYVKEFLISSSQDGHQWTLFFQNGKVKVFQGNQDSFTPVVNSLDPPLLTRYLRIHPQSWEHQIALRMEVLGCEAQDLY

SEQ ID NO: 1271 - DNA, 4371 bp, synthetic construct
  misc_feature 1..4371: note = Variant of human B-domain deleted Factor VIII
  source 1..4371: mol_type = other DNA
atgcagattgaactgtctacctgcttcttcctctgtttgctgaggttctgctttagcgccactagacggtactaccttggcgctgtggagctgtcctgggactatatgcagagtgatttgggagagcttcccgtcgacgcacgatttcctcctcgcgttccaaagtcatttccctttaacacaagccaggtgtacaagaagacgctcttcgtcgaattcaccgatcacctgttcaatatcgccaaacccagaccaccatggatgggtcttttggggcctaccatacaagcggaggtgtatgacacagttgttatcactctcaagaacatggcttctcatccggtaagtcttcacgcagtgggcgtgtcctactggaaagcttcagaaggagccgagtatgatgatcagacatcccagagggagaaagaagacgacaaggtatttccaggtgggtctcatacctatgtgtggcaagtgctcaaagagaatggccctatggcaagcgatccgccgtgtttgacttacagctacctttcacacgttgacctcgtcaaggacctcaactccgggttgattggagccttgttggtatgcagggaaggatctcttgccaaagagaagacacagaccaaacacaagtttatccttctctttgctgtgttcgatgagggcaaaagttggcatagcgaaacgaagaattccctcatgcaggatcgcgacgcagccagcgccagagcttggcccaagatgcacactgtgaacggatatgtcaataggacgcttcctggcttgattgggtgtcatcggaaaagtgtctactggcacgtgatcggaatggggacaacaccagaggtccactccatatttctcgaaggccataccttccttgttcgaaaccacagacaggcatccttggggatctctcccattaccttcctcactgcccaaacgctccttatggacttgggtcagttccttctcttttgccatatcccgtcacaccagcatgatggtatggaagcttatgtgaaagtcgacagttgtcctgaggagccacagttgcgcatgaagaataatgaagaagccgaggattacgacgacgatctcaccgattctgagatggacgtggtgaggtttgatgacgacaactctccctccatcattcaagctcggagcggggcgaagaaacaccccaagacttgggtccactatatagcggcggaagaggaggattgggattacgctcctcttgtattggcaccagatgaccgctcatacaaaagccagtacctcaacaacggaccgcagagaattggccggaagtataagaaagtgcgatttatggcctatacagacgaaacctttaagacaagggaggccatccagcatgagagtgggattttgggacctcttctttacggcgaagttggtgataccctcctcatcatcttcaagaatcaagcttctcgcccctataacatttacccacacgggatcactgacgttaggcctttgtatagcagaagacttcccaaaggcgtgaagcatctcaaagacttccccattttgccaggcgagatctttaagtacaaatggaccgttacagtggaagatggaccgactaaatcagaccctcgatgccttacgcggtactattcctccttcgtgaatatggagagagatttggcaagcggactcataggaccactcctcatctgttacaaggaatctgtagaccagaggggtaaccagattatgagtgataaacgcaatgtgatcctttttagcgtcttcgacgagaaccggtcctggtacttgaccgagaatatacagaggttccttcccaaccccgcaggcgttcagttggaagaccctgagtttcaggccagcaatattatgcactcaatcaacggctatgtgtttgatagtctccagctttctgtttgcctccatgaagtagcctattggtacatcttgtcaattggtgctcaaacagacttcctctccgtcttcttctccggctacacctttaagcacaagatggtgtatgaggacactctcacactctttccattttctggagaaaccgtgttcatgagcatggagaatccaggcctttggatcttgggttgccacaacagtgattttcgcaatcggggaatgactgctctcctcaaagtcagcagctgtgattggaacacaggcgactattacgaagattcttacgaggacataagtgcctactttgactccaagaataacgccattgagcccagatcattctcccagaatcctcccgtgcttaaaaggcatcagcgcgaaggtaccagaactactcttcagtctgatcaagaggagattgactatgacgacaccattagcgtggaaatgaagaaggaggatttcgatatctatgacgaagatgagaaccagtctccgcggagctttcagaagaagacgcgacactacttcattgcagcagtcgaaaggctttgggactacggtatgtcatcatcgcctcatgtgttgcgcaatagagctcagagtggaagtgttccacagttcaagaaagtcgtctttcaagagtttacagatggcagcttcacacagcctctctatcggggcgagcttaacgaacatttgggactccttggtccctatatccgagccgaagtggaggacaacattatggttacctttaggaatcaagcctctcgcccctacagcttctactcctccctcatcagttatgaggaggatcagagacaaggcgctgaaccacggaagaactttgtgaaaccgaatgagacgaagacctacttctggaaagtacagcaccacatggcccccacaaaagacgaattcgattgcaaagcatgggcgtatttttcagacgttgacttggagaaagatgtacattcaggacttattggtcctttgttggtgtgtcacactaacactctcaatccagcccatggcaggcaggtgacagtccaggaattcgctcttttctttaccatctttgatgagaccaagtcctggtacttcacggaaaacatggagcgcaattgcagagccccctgtaacatacagatggaggaccctacctttaaggaaaattatcggttccacgcaatcaacggatacattatggatacactccctggccttgtgatggctcaggaccaacgaatcaggtggtacctcctcagcatgggttctaatgagaacatacactccattcacttttcaggacatgtgttcactgtccggaagaaagaagagtataagatggccctctacaatttgtatccaggcgtgtttgagaccgttgaaatgcttccctctaaagctggcatctggagagtagagtgcttgatcggagaacatcttcacgcaggtatgagcaccttgttcctcgtgtacagcaacaaatgtcagaatccacttggcatggccagtggacacattcgcgactttcagatcacagcatctggccagtatggacaatgggccccaaagttggctcgcctccattactccggtagcataaatgcgtggtccactaaagaacctttcagctggattaaggtcgatcttcttgcccccatgatcatccacggcattaagacacagggagcgaggcagaaattctcctccctctacatctcacagttcattattatgtatagtttggacggcaagaagtggcaaacttatagaggtaacagtactggaacagacatggtgttcttcggcaacgttgatagctctggcatcaaacacaacatctttaatcctcccataatagctcggtacatcagattgcatccgacccactacagcattaggagtacactccgaatggagcttatgggttgcgacttgaattcctgttcaatgccactcggaatggagtctaaagccatctctgatgcacagataaccgccagtagctactttacgaacatgtttgctacgtggtcaccctctaaggcaaggcttcatttgcaaggccggtctaatgcctggagacctcaggtgaacaacccgaaagaatggctccaggtggactttcagaagaccatgaaagtaacaggtgtcactactcagggagttaagtccttggatactagcatgtatgtgaaggagttccttatttcctcatcacaagatggccaccagtggaccctcttctttcagaatggtaaggtcaaagtgtttcagggcaatcaagacagcttcacacccgtggtgaacagtcttgatcctccactcttgacacgataccttcgaatccatccacagtcttgggagcaccagattgcattgcgcatggaagtacttggatgcgaggctcaggacctctac

SEQ ID NO: 1272 - protein, 1457 aa, synthetic construct
  REGION 1..1457: note = Variant of human B-domain deleted Factor VIII
MQIELSTCFFLCLLRFCFSATRRYYLGAVELSWDYMQSDLGELPVDARFPPRVPKSFPFNTSQVYKKTLFVEFTDHLFNIAKPRPPWMGLLGPTIQAEVYDTVVITLKNMASHPVSLHAVGVSYWKASEGAEYDDQTSQREKEDDKVFPGGSHTYVWQVLKENGPMASDPPCLTYSYLSHVDLVKDLNSGLIGALLVCREGSLAKEKTQTKHKFILLFAVFDEGKSWHSETKNSLMQDRDAASARAWPKMHTVNGYVNRTLPGLIGCHRKSVYWHVIGMGTTPEVHSIFLEGHTFLVRNHRQASLGISPITFLTAQTLLMDLGQFLLFCHIPSHQHDGMEAYVKVDSCPEEPQLRMKNNEEAEDYDDDLTDSEMDVVRFDDDNSPSIIQARSGAKKHPKTWVHYIAAEEEDWDYAPLVLAPDDRSYKSQYLNNGPQRIGRKYKKVRFMAYTDETFKTREAIQHESGILGPLLYGEVGDTLLIIFKNQASRPYNIYPHGITDVRPLYSRRLPKGVKHLKDFPILPGEIFKYKWTVTVEDGPTKSDPRCLTRYYSSFVNMERDLASGLIGPLLICYKESVDQRGNQIMSDKRNVILFSVFDENRSWYLTENIQRFLPNPAGVQLEDPEFQASNIMHSINGYVFDSLQLSVCLHEVAYWYILSIGAQTDFLSVFFSGYTFKHKMVYEDTLTLFPFSGETVFMSMENPGLWILGCHNSDFRNRGMTALLKVSSCDWNTGDYYEDSYEDISAYFDSKNNAIEPRSFSQNPPVLKRHQREGTRTTLQSDQEEIDYDDTISVEMKKEDFDIYDEDENQSPRSFQKKTRHYFIAAVERLWDYGMSSSPHVLRNRAQSGSVPQFKKVVFQEFTDGSFTQPLYRGELNEHLGLLGPYIRAEVEDNIMVTFRNQASRPYSFYSSLISYEEDQRQGAEPRKNFVKPNETKTYFWKVQHHMAPTKDEFDCKAWAYFSDVDLEKDVHSGLIGPLLVCHTNTLNPAHGRQVTVQEFALFFTIFDETKSWYFTENMERNCRAPCNIQMEDPTFKENYRFHAINGYIMDTLPGLVMAQDQRIRWYLLSMGSNENIHSIHFSGHVFTVRKKEEYKMALYNLYPGVFETVEMLPSKAGIWRVECLIGEHLHAGMSTLFLVYSNKCQNPLGMASGHIRDFQITASGQYGQWAPKLARLHYSGSINAWSTKEPFSWIKVDLLAPMIIHGIKTQGARQKFSSLYISQFIIMYSLDGKKWQTYRGNSTGTDMVFFGNVDSSGIKHNIFNPPIIARYIRLHPTHYSIRSTLRMELMGCDLNSCSMPLGMESKAISDAQITASSYFTNMFATWSPSKARLHLQGRSNAWRPQVNNPKEWLQVDFQKTMKVTGVTTQGVKSLDTSMYVKEFLISSSQDGHQWTLFFQNGKVKVFQGNQDSFTPVVNSLDPPLLTRYLRIHPQSWEHQIALRMEVLGCEAQDLY

SEQ ID NO: 1273 - DNA, 4371 bp, synthetic construct
  misc_feature 1..4371: note = Variant of human B-domain deleted Factor VIII
  source 1..4371: mol_type = other DNA
atgcagattgaactgtctacctgcttcttcctctgtttgctgaggttctgctttagcgccactagacggtactaccttggcgctgtggagctgtcctgggactatatgcagagtgatttgggagagcttcccgtcgacgcacgatttcctcctcgcgttccaaagtcatttccctttaacacaagccaggtgtacaagaagacgctcttcgtcgaattcaccgatcacctgttcaatatcgccaaacccagaccaccatggatgggtcttttggggcctaccatacaagcggaggtgtatgacacagttgttatcactctcaagaacatggcttctcatccggtaagtcttcacgcagtgggcgtgtcctactggaaagcttcagaaggagccgagtatgatgatcagacatcccagagggagaaagaagacgacaaggtatttccaggtgggtctcatacctatgtgtggcaagtgctcaaagagaatggccctatggcaagcgatccgccgtgtttgacttacagctacctttcacacgttgacctcgtcaaggacctcaactccgggttgattggagccttgttggtatgcagggaaggatctcttgccaaagagaagacacagaccctgcacaagtttatccttctctttgctgtgttcgatgagggcaaaagttggcatagcgaaacgaagaattccctcatgcaggatcgcgacgcagccagcgccagagcttggcccaagatgcacactgtgaacggatatgtcaataggacgcttcctggcttgattgggtgtcatcggaaaagtgtctactggcacgtgatcggaatggggacaacaccagaggtccactccatatttctcgaaggccataccttccttgttcgaaaccacagacaggcatccttggggatctctcccattacctttctcactgcccaaacgctccttatggacttgggtcagttccttctcttttgccatatcccgtcacaccagcatgatggtatggaagcttatgtgaaagtcgacagttgtcctgaggagccacagttgcgcatgaagaataatgaagaagccgaggattacgacgacgatctcaccgattctgagatggacgtggtgaggtttgatgacgacaactctccctccatcattcaagctcggagcggggcgaagaaacaccccaagacttgggtccactatatagcggcggaagaggaggattgggattacgctcctcttgtattggcaccagatgaccgctcatacaaaagccagtacctcaacaacggaccgcagagaattggccggaagtataagaaagtgcgatttatggcctatacagacgaaacctttaagacaagggaggccatccagcatgagagtgggattttgggacctcttctttacggcgaagttggtgataccctcctcatcatcttcaagaatcaagcttctcgcccctataacatttacccacacgggatcactgacgttaggcctttgtatagcagaagacttcccaaaggcgtgaagcatctcaaagacttccccattttgccaggcgagatctttaagtacaaatggaccgtcacagtggaagatggaccgactaaatcagaccctcgatgccttacgcggtactattcctccttcgtgaatatggagagagatttggcaagcggactcataggaccactcctcatctgttacaaggaatctgtagaccagaggggtaaccagattatgagtgataaacgcaatgtgatcctttttagcgtcttcgacgagaaccggtcctggtacttgaccgagaatatacaaaggttccttcccaaccctgcaggggttcagttggaagaccctgagtttcaggccagcaatattatgcactcaatcaacggctatgtgtttgatagtctccagctttctgtttgcctccatgaagtagcctattggtacatcttgtcaattggtgctcaaacagacttcctctccgtcttcttctccggctacacctttaagcacaagatggtgtatgaggacactctcacactctttccattttctggagaaaccgtgttcatgagcatggagaatccaggcctttggatcttgggttgccacaacagtgattttcgcaatcggggaatgactgctctcctcaaagtcagcagctgtgattggaacacaggcgactattacgaagattcttacgaggacataagtgcctactttgactccaagaataacgccattgagcccagatcattctcccagaatcctcccgtgcttaaaaggcatcagcgcgaaggtaccagaactactcttcagtctgatcaagaggagattgactatgacgacaccattagcgtggaatggaagaaggaggatttcgatatctatgacgaagatgagaaccagtctccgcggagctttcagaagaagacgcgacactacttcattgcagcagtcgaaaggctttgggactacggtatgtcatcatcccctcatgtgttgcgcaatagagctcagagtggaagtgttccacagttcaagaaagtcgtctttcaagagtttacagatggcagcttcacacagcctctctatcggggcgagcttaacgaacatttgggactccttggtccctatatccgagccgaagtggaggacaacattatggttacctttaggaatcaagcctctcgcccctacagcttctactcctccctcatcagttatgaggaggatcagagacaaggcgctgaaccacggaagaactttgtgaaaccgaatgagacgaagacctacttctggaaagtacagcaccacatggcccccacaaaagacgaattcgattgcaaagcatgggcgtatttttcagacgttgacttggagaaagatgtacattcaggacttattggtcctttgttggtgtgtcacactaacactctcaatccagcccatggcaggcaggtgacagtccaggaattcgctcttttctttaccatctttgatgagaccaagtcctggtacttcacggaaaacatggagcgcaattgcagagccccctgtaacatacagatggaggaccctacctttaaggaaaattatcggttccacgcaatcaacggatacattatggatacactccctggccttgtgatggctcaggaccaacgaatcaggtggtacctcctcagcatgggttctaatgagaacatacactccattcacttttcaggacatgtgttcactgtccggaagaaagaagagtataagatggccctctacaatttgtatccaggcgtgtttgagaccgttgaaatgcttccctctaaagctggcatctggagagtagagtgcttgatcggagaacatcttcacgcaggtatgagcaccttgttcctcgtgtacagcaacaaatgtcagaatccacttggcatggccagtggacacattcgcgactttcagatcacagcatctggccagtatggacaatgggccccaaagttggctcgcctccattactccggtagcataaatgcgtggtccactaaagaacctttcagctggattaaggtcgatcttcttgcccccatgatcatccacggcattaagacacagggagcgaggcagaaattctcctccctctacatctcacagttcattattatgtatagtttggacggcaagaagtggcaaacttatagaggtaacagtactggaacagacatggtgttcttcggcaacgttgatagctctggcatcaaacacaacatctttaatcctcccataatagctcggtacatcagattgcatccgacccactacagcattaggagtacactccgaatggagcttatgggttgcgacttgaattcctgttcaatgccactcggaatggagtctaaagccatctctgatgcacagataaccgccagtagctactttacgaacatgtttgctacgtggtcaccctctaaggcaaggcttcatttgcaaggccggtctaatgcctggagacctcaggtgaacaacccgaaagaatggctccaggtggactttcagaagaccatgaaagtaacaggtgtcactactcagggagttaagtccttggatactagcatgtatgtgaaggagttccttatttcctcatcacaagatggccaccagtggaccctcttctttcagaatggtaaggtcaaagtgtttcagggcaatcaagacagcttcacacccgtggtgaacagtcttgatcctccactcttgacacgataccttcgaatccatccacagtcttgggagcaccagattgcattgcgcatggaagtacttggatgcgaggctcaggacctctac

SEQ ID NO: 1274 - protein, 1457 aa, synthetic construct
  REGION 1..1457: note = Variant of human B-domain deleted Factor VIII
MQIELSTCFFLCLLRFCFSATRRYYLGAVELSWDYMQSDLGELPVDARFPPRVPKSFPFNTSQVYKKTLFVEFTDHLFNIAKPRPPWMGLLGPTIQAEVYDTVVITLKNMASHPVSLHAVGVSYWKASEGAEYDDQTSQREKEDDKVFPGGSHTYVWQVLKENGPMASDPPCLTYSYLSHVDLVKDLNSGLIGALLVCREGSLAKEKTQTLHKFILLFAVFDEGKSWHSETKNSLMQDRDAASARAWPKMHTVNGYVNRTLPGLIGCHRKSVYWHVIGMGTTPEVHSIFLEGHTFLVRNHRQASLGISPITFLTAQTLLMDLGQFLLFCHIPSHQHDGMEAYVKVDSCPEEPQLRMKNNEEAEDYDDDLTDSEMDVVRFDDDNSPSIIQARSGAKKHPKTWVHYIAAEEEDWDYAPLVLAPDDRSYKSQYLNNGPQRIGRKYKKVRFMAYTDETFKTREAIQHESGILGPLLYGEVGDTLLIIFKNQASRPYNIYPHGITDVRPLYSRRLPKGVKHLKDFPILPGEIFKYKWTVTVEDGPTKSDPRCLTRYYSSFVNMERDLASGLIGPLLICYKESVDQRGNQIMSDKRNVILFSVFDENRSWYLTENIQRFLPNPAGVQLEDPEFQASNIMHSINGYVFDSLQLSVCLHEVAYWYILSIGAQTDFLSVFFSGYTFKHKMVYEDTLTLFPFSGETVFMSMENPGLWILGCHNSDFRNRGMTALLKVSSCDWNTGDYYEDSYEDISAYFDSKNNAIEPRSFSQNPPVLKRHQREGTRTTLQSDQEEIDYDDTISVEWKKEDFDIYDEDENQSPRSFQKKTRHYFIAAVERLWDYGMSSSPHVLRNRAQSGSVPQFKKVVFQEFTDGSFTQPLYRGELNEHLGLLGPYIRAEVEDNIMVTFRNQASRPYSFYSSLISYEEDQRQGAEPRKNFVKPNETKTYFWKVQHHMAPTKDEFDCKAWAYFSDVDLEKDVHSGLIGPLLVCHTNTLNPAHGRQVTVQEFALFFTIFDETKSWYFTENMERNCRAPCNIQMEDPTFKENYRFHAINGYIMDTLPGLVMAQDQRIRWYLLSMGSNENIHSIHFSGHVFTVRKKEEYKMALYNLYPGVFETVEMLPSKAGIWRVECLIGEHLHAGMSTLFLVYSNKCQNPLGMASGHIRDFQITASGQYGQWAPKLARLHYSGSINAWSTKEPFSWIKVDLLAPMIIHGIKTQGARQKFSSLYISQFIIMYSLDGKKWQTYRGNSTGTDMVFFGNVDSSGIKHNIFNPPIIARYIRLHPTHYSIRSTLRMELMGCDLNSCSMPLGMESKAISDAQITASSYFTNMFATWSPSKARLHLQGRSNAWRPQVNNPKEWLQVDFQKTMKVTGVTTQGVKSLDTSMYVKEFLISSSQDGHQWTLFFQNGKVKVFQGNQDSFTPVVNSLDPPLLTRYLRIHPQSWEHQIALRMEVLGCEAQDLY

SEQ ID NO: 1275 - DNA, 4371 bp, synthetic construct
  misc_feature 1..4371: note = Variant of human B-domain deleted Factor VIII
  source 1..4371: mol_type = other DNA
atgcagattgaactgtctacctgcttcttcctctgtttgctgaggttctgctttagcgccactagacggtactaccttggcgctgtggagctgtcctgggactatatgcagagtgatttgggagagcttcccgtcgacgcacgatttcctcctcgcgttccaaagtcatttccctttaacacaagccaggtgtacaagaagacgctcttcgtcgaattcaccgatcacctgttcaatatcgccaaacccagaccaccatggatgggtcttttggggcctaccatacaagcggaggtgtatgacacagttgttatcactctcaagaacatggcttctcatccggtaagtcttcacgcagtgggcgtgtcctactggaaagcttcagaaggagccgagtatgatgatcagacatcccagagggagaaagaagacgacaaggtatttccaggtgggtctcatacctatgtgtggcaagtgctcaaagagaatggccctatggcaagcgatccgccgtgtttgacttacagctacctttcacacgttgacctcgtcaaggacctcaactccgggttgattggagccttgttggtatgcagggaaggatctcttgccaaagagaagacacagaccctccacaagtttatccttctctttgctgtgttcgatgagggcaaaagttggcatagcgaaacgaagaattccctcatgcaggatcgcgacgcagccagcgccagagcttggcccaagatgcacactgtgaacggatatgtcaataggacgcttcctggcttgattgggtgtcatcggaaaagtgtctactggcacgtgatcggaatggggacaacaccagaggtccactccatatttctcgaaggccataccttccttgttcgaaaccacagacaggcatccttggggatctctcccattacctttctcactgcccaaacgctccttatggacttgggtcagttccttctcttttgccatatcccgtcacaccagcatgatggtatggaagcttatgtgaaagtcgacagttgtcctgaggagccacagttgcgcatgaagaataatgaagaagccgaggattacgacgacgatctcaccgattctgagatggacgtggtgaggtttgatgacgacaactctccctccatcattcaagctcggagcggggcgaagaaacaccccaagacttgggtccactatatagcggcggaagaggaggattgggattacgctcctcttgtattggcaccagatgaccgctcatacaaaagccagtacctcaacaacggaccgcagagaattggccggaagtataagaaagtgcgatttatggcctatacagacgaaacctttaagacaagggaggccatccagcatgagagtgggattttgggacctcttctttacggcgaagttggtgataccctcctcatcatcttcaagaatcaagcttctcgcccctataacatttacccacacgggatcactgacgttaggcctttgtatagcagaagacttcccaaaggcgtgaagcatctcaaagacttccccattttgccaggcgagatctttaagtacaaatggcgcgttacagtggaagatggaccgactaaatcagaccctcgatgccttacgcggtactattcctccttcgtgaatatggagagagatttggcaagcggactcataggaccactcctcatctgttacaaggaatctgtagaccagaggggtaaccagattatgagtgataaacgcaatgtgatcctttttagcgtcttcgacgagaaccggtcctggtacttgaccgagaatatacaaaggttccttcccaaccccgcaggcgttcagttggaagaccctgagtttcaggccagcaatattatgcactcaatcaacggctatgtgtttgatagtctccagctttctgtttgcctccatgaagtagcctattggtacatcttgtcaattggtgctcaaacagacttcctctccgtcttcttctccggctacacctttaagcacaagatggtgtatgaggacactctcacactctttccattttctggagaaaccgtgttcatgagcatggagaatccaggcctttggatcttgggttgccacaacagtgattttcgcaatcggggaatgactgctctcctcaaagtcagcagctgtgattggaacacaggcgactattacgaagattcttacgaggacataagtgcctactttgactccaagaataacgccattgagcccagatcattctcccagaatcctcccgtgcttaaaaggcatcagcgcgaaggtaccagaactactcttcagtctgatcaagaggagattgactatgacgacaccattagcgtggaaatgaagaaggaggatttcgatatctatgacgaagatgagaaccagtctccgcggagctttcagaagaagacgcgacactacttcattgcagcagtcgaaaggctttgggactacggtatgtcatcatcgcctcatgtgttgcgcaatagagctcagagtggaagtgttccacagttcaagaaagtcgtctttcaagagtttacagatggcagcttcacacagcctctctatcggggcgagcttaacgaacatttgggactccttggtccctatatccgagccgaagtggaggacaacattatggttacctttaggaatcaagcctctcgcccctacagcttctactcctccctcatcagttatgaggaggatcagagacaaggcgctgaaccacggaagaactttgtgaaaccgaatgagacgaagacctacttctggaaagtacagcaccacatggcccccacaaaagacgaattcgattgcaaagcatgggcgtatttttcagacgttgacttggagaaagatgtacattcaggacttattggtcctttgttggtgtgtcacactaacactctcaatccagcccatggcaggcaggtgacagtccaggaattcgctcttttctttaccatctttgatgagaccaagtcctggtacttcacggaaaacatggagcgcaattgcagagccccctgtaacatacagatggaggaccctacctttaaggaaaattatcggttccacgcaatcaacggatacattatggatacactccctggccttgtgatggctcaggaccaacgaatcaggtggtacctcctcagcatgggttctaatgagaacatacactccattcacttttcaggacatgtgttcactgtccggaagaaagaagagtataagatggccctctacaatttgtatccaggcgtgtttgagaccgttgaaatgcttccctctaaagctggcatctggagagtagagtgcttgatcggagaacatcttcacgcaggtatgagcaccttgttcctcgtgtacagcaacaaatgtcagaatccacttggcatggccagtggacacattcgcgactttcagatcacagcatctggccagtatggacaatgggccccaaagttggctcgcctccattactccggtagcataaatgcgtggtccactaaagaacctttcagctggattaaggtcgatcttcttgcccccatgatcatccacggcattaagacacagggagcgaggcagaaattctcctccctctacatctcacagttcattattatgtatagtttggacggcaagaagtggcaaacttatagaggtaacagtactggaacagacatggtgttcttcggcaacgttgatagctctggcatcaaacacaacatctttaatcctcccataatagctcggtacatcagattgcatccgacccactacagcattaggagtacactccgaatggagcttatgggttgcgacttgaattcctgttcaatgccactcggaatggagtctaaagccatctctgatgcacagataaccgccagtagctactttacgaacatgtttgctacgtggtcaccctctaaggcaaggcttcatttgcaaggccggtctaatgcctggagacctcaggtgaacaacccgaaagaatggctccaggtggactttcagaagaccatgaaagtaacaggtgtcactactcagggagttaagtccttggatactagcatgtatgtgaaggagttccttatttcctcatcacaagatggccaccagtggaccctcttctttcagaatggtaaggtcaaagtgtttcagggcaatcaagacagcttcacacccgtggtgaacagtcttgatcctccactcttgacacgataccttcgaatccatccacagtcttgggagcaccagattgcattgcgcatggaagtacttggatgcgaggctcaggacctctac

SEQ ID NO: 1276 - protein, 1457 aa, synthetic construct
  REGION 1..1457: note = Variant of human B-domain deleted Factor VIII
MQIELSTCFFLCLLRFCFSATRRYYLGAVELSWDYMQSDLGELPVDARFPPRVPKSFPFNTSQVYKKTLFVEFTDHLFNIAKPRPPWMGLLGPTIQAEVYDTVVITLKNMASHPVSLHAVGVSYWKASEGAEYDDQTSQREKEDDKVFPGGSHTYVWQVLKENGPMASDPPCLTYSYLSHVDLVKDLNSGLIGALLVCREGSLAKEKTQTLHKFILLFAVFDEGKSWHSETKNSLMQDRDAASARAWPKMHTVNGYVNRTLPGLIGCHRKSVYWHVIGMGTTPEVHSIFLEGHTFLVRNHRQASLGISPITFLTAQTLLMDLGQFLLFCHIPSHQHDGMEAYVKVDSCPEEPQLRMKNNEEAEDYDDDLTDSEMDVVRFDDDNSPSIIQARSGAKKHPKTWVHYIAAEEEDWDYAPLVLAPDDRSYKSQYLNNGPQRIGRKYKKVRFMAYTDETFKTREAIQHESGILGPLLYGEVGDTLLIIFKNQASRPYNIYPHGITDVRPLYSRRLPKGVKHLKDFPILPGEIFKYKWRVTVEDGPTKSDPRCLTRYYSSFVNMERDLASGLIGPLLICYKESVDQRGNQIMSDKRNVILFSVFDENRSWYLTENIQRFLPNPAGVQLEDPEFQASNIMHSINGYVFDSLQLSVCLHEVAYWYILSIGAQTDFLSVFFSGYTFKHKMVYEDTLTLFPFSGETVFMSMENPGLWILGCHNSDFRNRGMTALLKVSSCDWNTGDYYEDSYEDISAYFDSKNNAIEPRSFSQNPPVLKRHQREGTRTTLQSDQEEIDYDDTISVEMKKEDFDIYDEDENQSPRSFQKKTRHYFIAAVERLWDYGMSSSPHVLRNRAQSGSVPQFKKVVFQEFTDGSFTQPLYRGELNEHLGLLGPYIRAEVEDNIMVTFRNQASRPYSFYSSLISYEEDQRQGAEPRKNFVKPNETKTYFWKVQHHMAPTKDEFDCKAWAYFSDVDLEKDVHSGLIGPLLVCHTNTLNPAHGRQVTVQEFALFFTIFDETKSWYFTENMERNCRAPCNIQMEDPTFKENYRFHAINGYIMDTLPGLVMAQDQRIRWYLLSMGSNENIHSIHFSGHVFTVRKKEEYKMALYNLYPGVFETVEMLPSKAGIWRVECLIGEHLHAGMSTLFLVYSNKCQNPLGMASGHIRDFQITASGQYGQWAPKLARLHYSGSINAWSTKEPFSWIKVDLLAPMIIHGIKTQGARQKFSSLYISQFIIMYSLDGKKWQTYRGNSTGTDMVFFGNVDSSGIKHNIFNPPIIARYIRLHPTHYSIRSTLRMELMGCDLNSCSMPLGMESKAISDAQITASSYFTNMFATWSPSKARLHLQGRSNAWRPQVNNPKEWLQVDFQKTMKVTGVTTQGVKSLDTSMYVKEFLISSSQDGHQWTLFFQNGKVKVFQGNQDSFTPVVNSLDPPLLTRYLRIHPQSWEHQIALRMEVLGCEAQDLY

SEQ ID NO: 1277 - DNA, 4371 bp, synthetic construct
  misc_feature 1..4371: note = Variant of human B-domain deleted Factor VIII
  source 1..4371: mol_type = other DNA
atgcagattgaactgtctacctgcttcttcctctgtttgctgaggttctgctttagcgccactagacggtactaccttggcgctgtggagctgtcctgggactatatgcagagtgatttgggagagcttcccgtcgacgcacgatttcctcctcgcgttccaaagtcatttccctttaacacaagccaggtgtacaagaagacgctcttcgtcgaattcaccgatcacctgttcaatatcgccaaacccagaccaccatggatgggtcttttggggcctaccatacaagcggaggtgtatgacacagttgttatcactctcaagaacatggcttctcatccggtaagtcttcacgcagtgggcgtgtcctactggaaagcttcagaaggagccgagtatgatgatcagacatcccagagggagaaagaagacgacaaggtatttccaggtgggtctcatacctatgtgtggcaagtgctcaaagagaatggccctatggcaagcgatccgccgtgtttgacttacagctacctttcacacgttgacctcgtcaaggacctcaactccgggttgattggagccttgttggtatgcagggaaggatctcttgccaaagagaagacacagaccctccacaagtttatccttctctttgctgtgttcgatgagggcaaaagttggcatagcgaaacgaagaattccctcatgcaggatcgcgacgcagccagcgccagagcttggcccaagatgcacactgtgaacggatatgtcaataggacgcttcctggcttgattgggtgtcatcggaaaagtgtctactggcacgtgatcggaatggggacaacaccagaggtccactccatatttctcgaaggccataccttccttgttcgaaaccacagacaggcatccttggggatctctcccattacctttctcactgcccaaacgctccttatggacttgggtcagttccttctcttttgccatatcccgtcacaccagcatgatggtatggaagcttatgtgaaagtcgacagttgtcctgaggagccacagttgcgcatgaagaataatgaagaagccgaggattacgacgacgatctcaccgattctgagatggacgtggtgaggtttgatgacgacaactctccctccatcattcaagctcggagcggggcgaagaaacaccccaagacttgggtccactatatagcggcggaagaggaggattgggattacgctcctcttgtattggcaccagatgaccgctcatacaaaagccagtacctcaacaacggaccgcagagaattggccggaagtataagaaagtgcgatttatggcctatacagacgaaacctttaagacaagggaggccatccagcatgagagtgggattttgggacctcttctttacggcgaagttggtgataccctcctcatcatcttcaagaatcaagcttctcgcccctataacatttacccacacgggatcactgacgttaggcctttgtatagcagaagacttcccaaaggcgtgaagcatctcaaagacttccccattttgccaggcgagatctttaagtacaaatggaccgtcacagtggaagatggaccgactaaatcagaccctcgatgccttacgcggtactattcctccttcgtgaatatggagagagatttggcaagcggactcataggaccactcctcatctgttacaaggaatctgtagaccagaggggtaaccagattatgagtgataaacgcaatgtgatcctttttagcgtcttcgacgagaaccggtcctggtacttgaccgagaatatacaaaggttccttcccaaccccgcaggcgttcagttggaagaccctgagtttcaggccagcaatattatgcactcaatcaacggctatgtgtttgatagtctccagctttctgtttgcctccatgaagtagcctattggtacatcttgtcaattggtgctcaaacagacttcctctccgtcttcttctccggctacacctttaagcacaagatggtgtatgaggacactctcacactctttccattttctggagaaaccgtgttcatgagcatggagaatccaggcctttggatcttgggttgccacaacagtgattttcgcaatcggggaatgactgctctcctcaaagtcagcagctgtgattggaacacaggcgactattacgaagattcttacgaggacataagtgcctactttgacgcgaagaataacgccattgagcccagatcattctcccagaatcctcccgtgcttaaaaggcatcagcgcgaaggtaccagaactactcttcagtctgatcaagaggagattgactatgacgacaccattagcgtggaaatgaagaaggaggatttcgatatctatgacgaagatgagaaccagtctccgcggagctttcagaagaagacgcgacactacttcattgcagcagtcgaaaggctttgggactacggtatgtcatcatcccctcatgtgttgcgcaatagagctcagagtggaagtgttccacagttcaagaaagtcgtctttcaagagtttacagatggcagcttcacacagcctctctatcggggcgagcttaacgaacatttgggactccttggtccctatatccgagccgaagtggaggacaacattatggttacctttaggaatcaagcctctcgcccctacagcttctactcctccctcatcagttatgaggaggatcagagacaaggcgctgaaccacggaagaactttgtgaaaccgaatgagacgaagacctacttctggaaagtacagcaccacatggcccccacaaaagacgaattcgattgcaaagcatgggcgtatttttcagacgttgacttggagaaagatgtacattcaggacttattggtcctttgttggtgtgtcacactaacactctcaatccagcccatggcaggcaggtgacagtccaggaattcgctcttttctttaccatctttgatgagaccaagtcctggtacttcacggaaaacatggagcgcaattgcagagccccctgtaacatacagatggaggaccctacctttaaggaaaattatcggttccacgcaatcaacggatacattatggatacactccctggccttgtgatggctcaggaccaacgaatcaggtggtacctcctcagcatgggttctaatgagaacatacactccattcacttttcaggacatgtgttcactgtccggaagaaagaagagtataagatggccctctacaatttgtatccaggcgtgtttgagaccgttgaaatgcttccctctaaagctggcatctggagagtagagtgcttgatcggagaacatcttcacgcaggtatgagcaccttgttcctcgtgtacagcaacaaatgtcagaatccacttggcatggccagtggacacattcgcgactttcagatcacagcatctggccagtatggacaatgggccccaaagttggctcgcctccattactccggtagcataaatgcgtggtccactaaagaacctttcagctggattaaggtcgatcttcttgcccccatgatcatccacggcattaagacacagggagcgaggcagaaattctcctccctctacatctcacagttcattattatgtatagtttggacggcaagaagtggcaaacttatagaggtaacagtactggaacagacatggtgttcttcggcaacgttgatagctctggcatcaaacacaacatctttaatcctcccataatagctcggtacatcagattgcatccgacccactacagcattaggagtacactccgaatggagcttatgggttgcgacttgaattcctgttcaatgccactcggaatggagtctaaagccatctctgatgcacagataaccgccagtagctactttacgaacatgtttgctacgtggtcaccctctaaggcaaggcttcatttgcaaggccggtctaatgcctggagacctcaggtgaacaacccgaaagaatggctccaggtggactttcagaagaccatgaaagtaacaggtgtcactactcagggagttaagtccttggatactagcatgtatgtgaaggagttccttatttcctcatcacaagatggccaccagtggaccctcttctttcagaatggtaaggtcaaagtgtttcagggcaatcaagacagcttcacacccgtggtgaacagtcttgatcctccactcttgacacgataccttcgaatccatccacagtcttgggagcaccagattgcattgcgcatggaagtacttggatgcgaggctcaggacctctac

SEQ ID NO: 1278 - protein, 1457 aa, synthetic construct
  REGION 1..1457: note = Variant of human B-domain deleted Factor VIII
MQIELSTCFFLCLLRFCFSATRRYYLGAVELSWDYMQSDLGELPVDARFPPRVPKSFPFNTSQVYKKTLFVEFTDHLFNIAKPRPPWMGLLGPTIQAEVYDTVVITLKNMASHPVSLHAVGVSYWKASEGAEYDDQTSQREKEDDKVFPGGSHTYVWQVLKENGPMASDPPCLTYSYLSHVDLVKDLNSGLIGALLVCREGSLAKEKTQTLHKFILLFAVFDEGKSWHSETKNSLMQDRDAASARAWPKMHTVNGYVNRTLPGLIGCHRKSVYWHVIGMGTTPEVHSIFLEGHTFLVRNHRQASLGISPITFLTAQTLLMDLGQFLLFCHIPSHQHDGMEAYVKVDSCPEEPQLRMKNNEEAEDYDDDLTDSEMDVVRFDDDNSPSIIQARSGAKKHPKTWVHYIAAEEEDWDYAPLVLAPDDRSYKSQYLNNGPQRIGRKYKKVRFMAYTDETFKTREAIQHESGILGPLLYGEVGDTLLIIFKNQASRPYNIYPHGITDVRPLYSRRLPKGVKHLKDFPILPGEIFKYKWTVTVEDGPTKSDPRCLTRYYSSFVNMERDLASGLIGPLLICYKESVDQRGNQIMSDKRNVILFSVFDENRSWYLTENIQRFLPNPAGVQLEDPEFQASNIMHSINGYVFDSLQLSVCLHEVAYWYILSIGAQTDFLSVFFSGYTFKHKMVYEDTLTLFPFSGETVFMSMENPGLWILGCHNSDFRNRGMTALLKVSSCDWNTGDYYEDSYEDISAYFDAKNNAIEPRSFSQNPPVLKRHQREGTRTTLQSDQEEIDYDDTISVEMKKEDFDIYDEDENQSPRSFQKKTRHYFIAAVERLWDYGMSSSPHVLRNRAQSGSVPQFKKVVFQEFTDGSFTQPLYRGELNEHLGLLGPYIRAEVEDNIMVTFRNQASRPYSFYSSLISYEEDQRQGAEPRKNFVKPNETKTYFWKVQHHMAPTKDEFDCKAWAYFSDVDLEKDVHSGLIGPLLVCHTNTLNPAHGRQVTVQEFALFFTIFDETKSWYFTENMERNCRAPCNIQMEDPTFKENYRFHAINGYIMDTLPGLVMAQDQRIRWYLLSMGSNENIHSIHFSGHVFTVRKKEEYKMALYNLYPGVFETVEMLPSKAGIWRVECLIGEHLHAGMSTLFLVYSNKCQNPLGMASGHIRDFQITASGQYGQWAPKLARLHYSGSINAWSTKEPFSWIKVDLLAPMIIHGIKTQGARQKFSSLYISQFIIMYSLDGKKWQTYRGNSTGTDMVFFGNVDSSGIKHNIFNPPIIARYIRLHPTHYSIRSTLRMELMGCDLNSCSMPLGMESKAISDAQITASSYFTNMFATWSPSKARLHLQGRSNAWRPQVNNPKEWLQVDFQKTMKVTGVTTQGVKSLDTSMYVKEFLISSSQDGHQWTLFFQNGKVKVFQGNQDSFTPVVNSLDPPLLTRYLRIHPQSWEHQIALRMEVLGCEAQDLY

SEQ ID NO: 1279 - DNA, 4371 bp, synthetic construct
  misc_feature 1..4371: note = Variant of human B-domain deleted Factor VIII
  source 1..4371: mol_type = other DNA
atgcagattgaactgtctacctgcttcttcctctgtttgctgaggttctgctttagcgccactagacggtactaccttggcgctgtggagctgtcctgggactatatgcagagtgatttgggagagcttcccgtcgacgcacgatttcctcctcgcgttccaaagtcatttccctttaacacaagccaggtgtacaagaagacgctcttcgtcgaattcaccgatcacctgttcaatatcgccaaacccagaccaccatggatgggtcttttggggcctaccatacaagcggaggtgtatgacacagttgttatcactctcaagaacatggcttctcatccggtaagtcttcacgcagtgggcgtgtcctactggaaagcttcagaaggagccgagtatgatgatcagacatcccagagggagaaagaagacgacaaggtatttccaggtgggtctcatacctatgtgtggcaagtgctcaaagagaatggccctatggcaagcgatccgccgtgtttgacttacagctacctttcacacgttgacctcgtcaaggacctcaactccgggttgattggagccttgttggtatgcagggaaggatctcttgccaaagagaagacacagaccctccacaagtttatccttctctttgctgtgttcgatgagggcaaaagttggcatagcgaaacgaagaattccctcatgcaggatcgcgacgcagccagcgccagagcttggcccaagatgcacactgtgaacggatatgtcaataggacgcttcctggcttgattgggtgtcatcggaaaagtgtctactggcacgtgatcggaatggggacaacaccagaggtccactccatatttctcgaaggccataccttccttgttcgaaaccacagacagacgtccttggggatctctcccattacctttctcactgcccaaacgctccttatggacttgggtcagttccttctcttttgccatatcccgtcacaccagcatgatggtatggaagcttatgtgaaagtcgacagttgtcctgaggagccacagttgcgcatgaagaataatgaagaagccgaggattacgacgacgatctcaccgattctgagatggacgtggtgaggtttgatgacgacaactctccctccatcattcaagctcggagcggggcgaagaaacaccccaagacttgggtccactatatagcggcggaagaggaggattgggattacgctcctcttgtattggcaccagatgaccgctcatacaaaagccagtacctcaacaacggaccgcagagaattggccggaagtataagaaagtgcgatttatggcctatacagacgaaacctttaagacaagggaggccatccagcatgagagtgggattttgggacctcttctttacggcgaagttggtgataccctcctcatcatcttcaagaatcaagcttctcgcccctataacatttacccacacgggatcactgacgttaggcctttgtatagcagaagacttcccaaaggcgtgaagcatctcaaagacttccccattttgccaggcgagatctttaagtacaaatggaccgtcacagtggaagatggaccgactaaatcagaccctcgatgccttacgcggtactattcctccttcgtgaatatggagagagatttggcaagcggactcataggaccactcctcatctgttacaaggaatctgtagaccagaggggtaaccagattatgagtgataaacgcaatgtgatcctttttagcgtcttcgacgagaaccggtcctggtacttgaccgagaatatacaaaggttccttcccaaccccgcaggcgttcagttggaagaccctgagtttcaggccagcaatattatgcactcaatcaacggctatgtgtttgatagtctccagctttctgtttgcctccatgaagtagcctattggtacatcttgtcaattggtgctcaaacagacttcctctccgtcttcttctccggctacacctttaagcacaagatggtgtatgaggacactctcacactctttccattttctggagaaaccgtgttcatgagcatggagaatccaggcctttggatcttgggttgccacaacagtgattttcgcaatcggggaatgactgctctcctcaaagtcagcagctgtgattggaacacaggcgactattacgaagattcttacgaggacataagtgcctactttgactccaagaataacgccattgagcccagatcattctcccagaatcctcccgtgcttaaaaggcatcagcgcgaaggtaccagaactactcttcagtctgatcaagaggagattgactatgacgacaccattagcgtggaaatgaagaaggaggatttcgatatctatgacgaagatgagaaccagtctccgcggagctttcagaagaagacgcgacactacttcattgcagcagtcgaaaggctttgggactacggtatgtcatcatcccctcatgtgttgcgcaatagagctcagagtggaagtgttccacagttcaagaaagtcgtctttcaagagtttacagatggcagcttcacacagcctctctatcggggcgagcttaacgaacatttgggactccttggtccctatatccgagccgaagtggaggacaacattatggttacctttaggaatcaagcctctcgcccctacagcttctactcctccctcatcagttatgaggaggatcagagacaaggcgctgaaccacggaagaactttgtgaaaccgaatgagacgaagacctacttctggaaagtacagcaccacatggcccccacaaaagacgaattcgattgcaaagcatgggcgtatttttcagacgttgacttggagaaagatgtacattcaggacttattggtcctttgttggtgtgtcacactaacactctcaatccagcccatggcaggcaggtgacagtccaggaattcgctcttttctttaccatctttgatgagaccaagtcctggtacttcacggaaaacatggagcgcaattgcagagccccctgtaacatacagatggaggaccctacctttaaggaaaattatcggttccacgcaatcaacggatacattatggatacactccctggccttgtgatggctcaggaccaacgaatcaggtggtacctcctcagcatgggttctaatgagaacatacactccattcacttttcaggacatgtgttcactgtccggaagaaagaagagtataagatggccctctacaatttgtatccaggcgtgtttgagaccgttgaaatgcttccctctaaagctggcatctggagagtagagtgcttgatcggagaacatcttcacgcaggtatgagcaccttgttcctcgtgtacagcaacaaatgtcagaatccacttggcatggccagtggacacattcgcgactttcagatcacagcatctggccagtatggacaatgggccccaaagttggctcgcctccattactccggtagcataaatgcgtggtccactaaagaacctttcagctggattaaggtcgatcttcttgcccccatgatcatccacggcattaagacacagggagcgaggcagaaattctcctccctctacatctcacagttcattattatgtatagtttggacggcaagaagtggcaaacttatagaggtaacagtactggaacagacatggtgttcttcggcaacgttgatagctctggcatcaaacacaacatctttaatcctcccataatagctcggtacatcagattgcatccgacccactacagcattaggagtacactccgaatggagcttatgggttgcgacttgaattcctgttcaatgccactcggaatggagtctaaagccatctctgatgcacagataaccgccagtagctactttacgaacatgtttgctacgtggtcaccctctaaggcaaggcttcatttgcaaggccggtctaatgcctggagacctcaggtgaacaacccgaaagaatggctccaggtggactttcagaagaccatgaaagtaacaggtgtcactactcagggagttaagtccttggatactagcatgtatgtgaaggagttccttatttcctcatcacaagatggccaccagtggaccctcttctttcagaatggtaaggtcaaagtgtttcagggcaatcaagacagcttcacacccgtggtgaacagtcttgatcctccactcttgacacgataccttcgaatccatccacagtcttgggagcaccagattgcattgcgcatggaagtacttggatgcgaggctcaggacctctac

SEQ ID NO: 1280 - protein, 1457 aa, synthetic construct
  REGION 1..1457: note = Variant of human B-domain deleted Factor VIII
MQIELSTCFFLCLLRFCFSATRRYYLGAVELSWDYMQSDLGELPVDARFPPRVPKSFPFNTSQVYKKTLFVEFTDHLFNIAKPRPPWMGLLGPTIQAEVYDTVVITLKNMASHPVSLHAVGVSYWKASEGAEYDDQTSQREKEDDKVFPGGSHTYVWQVLKENGPMASDPPCLTYSYLSHVDLVKDLNSGLIGALLVCREGSLAKEKTQTLHKFILLFAVFDEGKSWHSETKNSLMQDRDAASARAWPKMHTVNGYVNRTLPGLIGCHRKSVYWHVIGMGTTPEVHSIFLEGHTFLVRNHRQTSLGISPITFLTAQTLLMDLGQFLLFCHIPSHQHDGMEAYVKVDSCPEEPQLRMKNNEEAEDYDDDLTDSEMDVVRFDDDNSPSIIQARSGAKKHPKTWVHYIAAEEEDWDYAPLVLAPDDRSYKSQYLNNGPQRIGRKYKKVRFMAYTDETFKTREAIQHESGILGPLLYGEVGDTLLIIFKNQASRPYNIYPHGITDVRPLYSRRLPKGVKHLKDFPILPGEIFKYKWTVTVEDGPTKSDPRCLTRYYSSFVNMERDLASGLIGPLLICYKESVDQRGNQIMSDKRNVILFSVFDENRSWYLTENIQRFLPNPAGVQLEDPEFQASNIMHSINGYVFDSLQLSVCLHEVAYWYILSIGAQTDFLSVFFSGYTFKHKMVYEDTLTLFPFSGETVFMSMENPGLWILGCHNSDFRNRGMTALLKVSSCDWNTGDYYEDSYEDISAYFDSKNNAIEPRSFSQNPPVLKRHQREGTRTTLQSDQEEIDYDDTISVEMKKEDFDIYDEDENQSPRSFQKKTRHYFIAAVERLWDYGMSSSPHVLRNRAQSGSVPQFKKVVFQEFTDGSFTQPLYRGELNEHLGLLGPYIRAEVEDNIMVTFRNQASRPYSFYSSLISYEEDQRQGAEPRKNFVKPNETKTYFWKVQHHMAPTKDEFDCKAWAYFSDVDLEKDVHSGLIGPLLVCHTNTLNPAHGRQVTVQEFALFFTIFDETKSWYFTENMERNCRAPCNIQMEDPTFKENYRFHAINGYIMDTLPGLVMAQDQRIRWYLLSMGSNENIHSIHFSGHVFTVRKKEEYKMALYNLYPGVFETVEMLPSKAGIWRVECLIGEHLHAGMSTLFLVYSNKCQNPLGMASGHIRDFQITASGQYGQWAPKLARLHYSGSINAWSTKEPFSWIKVDLLAPMIIHGIKTQGARQKFSSLYISQFIIMYSLDGKKWQTYRGNSTGTDMVFFGNVDSSGIKHNIFNPPIIARYIRLHPTHYSIRSTLRMELMGCDLNSCSMPLGMESKAISDAQITASSYFTNMFATWSPSKARLHLQGRSNAWRPQVNNPKEWLQVDFQKTMKVTGVTTQGVKSLDTSMYVKEFLISSSQDGHQWTLFFQNGKVKVFQGNQDSFTPVVNSLDPPLLTRYLRIHPQSWEHQIALRMEVLGCEAQDLY

SEQ ID NO: 1281 - DNA, 4371 bp, synthetic construct
  misc_feature 1..4371: note = Variant of human B-domain deleted Factor VIII
  source 1..4371: mol_type = other DNA
atgcagattgaactgtctacctgcttcttcctctgtttgctgaggttctgctttagcgccactagacggtactaccttggcgctgtggagctgtcctgggactatatgcagagtgatttgggagagcttcccgtcgacgcacgatttcctcctcgcgttccaaagtcatttccctttaacacaagccaggtgtacaagaagacgctcttcgtcgaattcaccgatcacctgttcaatatcgccaaacccagaccaccatggatgggtcttttggggcctaccatacaagcggaggtgtatgacacagttgttatcactctcaagaacatggcttctcatccggtaagtcttcacgcagtgggcgtgtcctactggaaagcttcagaaggagccgagtatgatgatcagacatcccagagggagaaagaagacgacaaggtatttccaggtgggtctcatacctatgtgtggcaagtgctcaaagagaatggccctatggcaagcgatccgccgtgtttgacttacagctacctttcacacgttgacctcgtcaaggacctcaactccgggttgattggagccttgttggtatgcagggaaggatctcttgccaaagagaagacacagaccctccacaagtttatccttctctttgctgtgttcgatgagggcaaaagttggcatagcgaaacgaagaattccctcatgcaggatcgcgacgcagccagcgccagagcttggcccaagatgcacactgtgaacggatatgtcaataggacgcttcctggcttgattgggtgtcatcggaaaagtgtctactggcacgtgatcggaatggggacaacaccagaggtccactccatatttctcgaaggccataccttccttgttcgaaaccacagacaggcatccttggggatctctcccattacctttctcactgcccaaacgctccttatggacttgggtcagttccttctcttttgccatatcccgtcacaccagcatgatggtatggaagcttatgtgaaagtcgacagttgtcctgaggagccacagttgcgcatgaagaataatgaagaagccgaggattacgacgacgatctcaccgattctgagatggacgtggtgaggtttgatgacgacaactctccctccatcattcaagctcggagcggggcgaagaaacaccccaagacttgggtccactatatagcggcggaagaggaggattgggattacgctcctcttgtattggcaccagatgaccgctcatacaaaagccagtacctcaacaacggaccgcagagaattggccggaagtataagaaagtgcgatttatggcctatacagacgaaacctttaagacaagggaggccatccagcatgagagtgggattttgggacctcttctttacggcgaagttggtgataccctcctcatcatcttcaagaatcaagcttctcgcccctataacatttacccacacgggatcactgacgttaggcctttgtatagcagaagacttcccaaaggcgtgaagcatctcaaagacttccccattttgccaggcgagatctttaagtacaaatggaccgtcacagtggaagatggaccgactaaatcagaccctcgatgccttacgcggtactattcctccttcgtgaatatggagagagatttggcaagcggactcataggaccactcctcatctgttacaaggaatctgtagaccagaggggtaaccagattatgagtgataaacgcaatgtgatcctttttagcgtcttcgacgagaaccggtcctggtacttgaccgagaatatacaaaggttccttcccaaccccgcaggcgttcagttggaagaccctgagtttcaggccagcaatattatgcactcaatcaacggctatgtgtttgatagtctccagctttctgtttgcctccatgaagtagcctattggtacatcttgtcaattggtgctcaaacagacttcctctccgtcttcttctccggctacacctttaagcacaagatggtgtatgaggacactctcacactctttccattttctggagaaaccgtgttcatgagcatggagaatccaggcctttggatcttgggttgccacaacagtgattttcgcaatcggggaatgactgctctcctcaaagtcagcagctgtgattggaacacaggcgactattacgaagattcttacgaggacataagtgcctactttgactccaagaataacgccattgagcccagatcattctcccagaatcctcccgtgcttaaaaggcatcagcgcgaaggtaccagaactactcttcagtctgatcaagaggagattgactatgacgacaccattagcgtggaaatgaagaaggaggatttcgatatctatgacgaagatgagaaccagtctccgcggagctttcagaagaagacgcgacactacttcattgcagcagtcgaaaggctttgggactacggtatgtcatcatcccctcatgtgttgcgcaatagagctcagagtggaagtgttccacagttcaagaaagtcgtctttcaagagtttacagatggcagcttcacacagcctctctatcggggcgagcttaacgaacatttgggactccttggtccctatatccgagccgaagtggaggacaacattatggttacctttaggaatcaagcctctcgcccctacagcttctactcctccctcatcagttatgaggaggatcagagacaaggcgctgaaccacggaagaactttgtgaaaccgaatgagacgaagacctacttctggaaagtacagcaccacatggcccccgtgaaagacgaattcgattgcaaagcatgggcgtatttttcagacgttgacttggagaaagatgtacattcaggacttattggtcctttgttggtgtgtcacactaacactctcaatccagcccatggcaggcaggtgacagtccaggaattcgctcttttctttaccatctttgatgagaccaagtcctggtacttcacggaaaacatggagcgcaattgcagagccccctgtaacatacagatggaggaccctacctttaaggaaaattatcggttccacgcaatcaacggatacattatggatacactccctggccttgtgatggctcaggaccaacgaatcaggtggtacctcctcagcatgggttctaatgagaacatacactccattcacttttcaggacatgtgttcactgtccggaagaaagaagagtataagatggccctctacaatttgtatccaggcgtgtttgagaccgttgaaatgcttccctctaaagctggcatctggagagtagagtgcttgatcggagaacatcttcacgcaggtatgagcaccttgttcctcgtgtacagcaacaaatgtcagaatccacttggcatggccagtggacacattcgcgactttcagatcacagcatctggccagtatggacaatgggccccaaagttggctcgcctccattactccggtagcataaatgcgtggtccactaaagaacctttcagctggattaaggtcgatcttcttgcccccatgatcatccacggcattaagacacagggagcgaggcagaaattctcctccctctacatctcacagttcattattatgtatagtttggacggcaagaagtggcaaacttatagaggtaacagtactggaacagacatggtgttcttcggcaacgttgatagctctggcatcaaacacaacatctttaatcctcccataatagctcggtacatcagattgcatccgacccactacagcattaggagtacactccgaatggagcttatgggttgcgacttgaattcctgttcaatgccactcggaatggagtctaaagccatctctgatgcacagataaccgccagtagctactttacgaacatgtttgctacgtggtcaccctctaaggcaaggcttcatttgcaaggccggtctaatgcctggagacctcaggtgaacaacccgaaagaatggctccaggtggactttcagaagaccatgaaagtaacaggtgtcactactcagggagttaagtccttggatactagcatgtatgtgaaggagttccttatttcctcatcacaagatggccaccagtggaccctcttctttcagaatggtaaggtcaaagtgtttcagggcaatcaagacagcttcacacccgtggtgaacagtcttgatcctccactcttgacacgataccttcgaatccatccacagtcttgggagcaccagattgcattgcgcatggaagtacttggatgcgaggctcaggacctctac

SEQ ID NO: 1282 - protein, 1457 aa, synthetic construct
  REGION 1..1457: note = Variant of human B-domain deleted Factor VIII
MQIELSTCFFLCLLRFCFSATRRYYLGAVELSWDYMQSDLGELPVDARFPPRVPKSFPFNTSQVYKKTLFVEFTDHLFNIAKPRPPWMGLLGPTIQAEVYDTVVITLKNMASHPVSLHAVGVSYWKASEGAEYDDQTSQREKEDDKVFPGGSHTYVWQVLKENGPMASDPPCLTYSYLSHVDLVKDLNSGLIGALLVCREGSLAKEKTQTLHKFILLFAVFDEGKSWHSETKNSLMQDRDAASARAWPKMHTVNGYVNRTLPGLIGCHRKSVYWHVIGMGTTPEVHSIFLEGHTFLVRNHRQASLGISPITFLTAQTLLMDLGQFLLFCHIPSHQHDGMEAYVKVDSCPEEPQLRMKNNEEAEDYDDDLTDSEMDVVRFDDDNSPSIIQARSGAKKHPKTWVHYIAAEEEDWDYAPLVLAPDDRSYKSQYLNNGPQRIGRKYKKVRFMAYTDETFKTREAIQHESGILGPLLYGEVGDTLLIIFKNQASRPYNIYPHGITDVRPLYSRRLPKGVKHLKDFPILPGEIFKYKWTVTVEDGPTKSDPRCLTRYYSSFVNMERDLASGLIGPLLICYKESVDQRGNQIMSDKRNVILFSVFDENRSWYLTENIQRFLPNPAGVQLEDPEFQASNIMHSINGYVFDSLQLSVCLHEVAYWYILSIGAQTDFLSVFFSGYTFKHKMVYEDTLTLFPFSGETVFMSMENPGLWILGCHNSDFRNRGMTALLKVSSCDWNTGDYYEDSYEDISAYFDSKNNAIEPRSFSQNPPVLKRHQREGTRTTLQSDQEEIDYDDTISVEMKKEDFDIYDEDENQSPRSFQKKTRHYFIAAVERLWDYGMSSSPHVLRNRAQSGSVPQFKKVVFQEFTDGSFTQPLYRGELNEHLGLLGPYIRAEVEDNIMVTFRNQASRPYSFYSSLISYEEDQRQGAEPRKNFVKPNETKTYFWKVQHHMAPVKDEFDCKAWAYFSDVDLEKDVHSGLIGPLLVCHTNTLNPAHGRQVTVQEFALFFTIFDETKSWYFTENMERNCRAPCNIQMEDPTFKENYRFHAINGYIMDTLPGLVMAQDQRIRWYLLSMGSNENIHSIHFSGHVFTVRKKEEYKMALYNLYPGVFETVEMLPSKAGIWRVECLIGEHLHAGMSTLFLVYSNKCQNPLGMASGHIRDFQITASGQYGQWAPKLARLHYSGSINAWSTKEPFSWIKVDLLAPMIIHGIKTQGARQKFSSLYISQFIIMYSLDGKKWQTYRGNSTGTDMVFFGNVDSSGIKHNIFNPPIIARYIRLHPTHYSIRSTLRMELMGCDLNSCSMPLGMESKAISDAQITASSYFTNMFATWSPSKARLHLQGRSNAWRPQVNNPKEWLQVDFQKTMKVTGVTTQGVKSLDTSMYVKEFLISSSQDGHQWTLFFQNGKVKVFQGNQDSFTPVVNSLDPPLLTRYLRIHPQSWEHQIALRMEVLGCEAQDLY

SEQ ID NO: 1283 - DNA, 4371 bp, synthetic construct
  misc_feature 1..4371: note = Variant of human B-domain deleted Factor VIII
  source 1..4371: mol_type = other DNA
atgcagattgaactgtctacctgcttcttcctctgtttgctgaggttctgctttagcgccactagacggtactaccttggcgctgtggagctgtcctgggactatatgcagagtgatttgggagagcttcccgtcgacgcacgatttcctcctcgcgttccaaagtcatttccctttaacacaagccaggtgtacaagaagacgctcttcgtcgaattcaccgatcacctgttcaatatcgccaaacccagaccaccatggatgggtcttttggggcctaccatacaagcggaggtgtatgacacagttgttatcactctcaagaacatggcttctcatccggtaagtcttcacgcagtgggcgtgtcctactggaaagcttcagaaggagccgagtatgatgatcagacatcccagagggagaaagaagacgacaaggtatttccaggtgggtctcatacctatgtgtggcaagtgctcaaagagaatgagcctatggcaagcgatccgccgtgtttgacttacagctacctttcacacgttgacctcgtcaaggacctcaactccgggttgattggagccttgttggtatgcagggaaggatctcttgccaaagagaagacacagaccctccacaagtttatccttctctttgctgtgttcgatgagggcaaaagttggcatagcgaaacgaagaattccctcatgcaggatcgcgacgcagccagcgccagagcttggcccaagatgcacactgtgaacggatatgtcaataggacgcttcctggcttgattgggtgtcatcggaaaagtgtctactggcacgtgatcggaatggggacaacaccagaggtccactccatatttctcgaaggccataccttccttgttcgaaaccacagacaggcatccttggggatctctcccattacctttctcactgcccaaacgctccttatggacttgggtcagttccttctcttttgccatatcccgtcacaccagcatgatggtatggaagcttatgtgaaagtcgacagttgtcctgaggagccacagttgcgcatgaagaataatgaagaagccgaggattacgacgacgatctcaccgattctgagatggacgtggtgaggtttgatgacgacaactctccctccatcattcaagctcggagcggggcgaagaaacaccccaagacttgggtccactatatagcggcggaagaggaggattgggattacgctcctcttgtattggcaccagatgaccgctcatacaaaagccagtacctcaacaacggaccgcagagaattggccggaagtataagaaagtgcgatttatggcctatacagacgaaacctttaagacaagggaggccatccagcatgagagtgggattttgggacctcttctttacggcgaagttggtgataccctcctcatcatcttcaagaatcaagcttctcgcccctataacatttacccacacgggatcactgacgttaggcctttgtatagcagaagacttcccaaaggcgtgaagcatctcaaagacttccccattttgccaggcgagatctttaagtacaaatggaccgtcacagtggaagatggaccgactaaatcagaccctcgatgccttacgcggtactattcctccttcgtgaatatggagagagatttggcaagcggactcataggaccactcctcatctgttacaaggaatctgtagaccagaggggtaaccagattatgagtgataaacgcaatgtgatcctttttagcgtcttcgacgagaaccggtcctggtacttgaccgagaatatacaaaggttccttcccaaccccgcaggcgttcagttggaagaccctgagtttcaggccagcaatattatgcactcaatcaacggctatgtgtttgatagtctccagctttctgtttgcctccatgaagtagcctattggtacatcttgtcaattggtgctcaaacagacttcctctccgtcttcttctccggctacacctttaagcacaagatggtgtatgaggacactctcacactctttccattttctggagaaaccgtgttcatgagcatggagaatccaggcctttggatcttgggttgccacaacagtgattttcgcaatcggggaatgactgctctcctcaaagtcagcagctgtgattggaacacaggcgactattacgaagattcttacgaggacataagtgcctactttgactccaagaataacgccattgagcccagatcattctcccagaatcctcccgtgcttaaaaggcatcagcgcgaaggtaccagaactactcttcagtctgatcaagaggagattgactatgacgacaccattagcgtggaaatgaagaaggaggatttcgatatctatgacgaagatgagaaccagtctccgcggagctttcagaagaagacgcgacactacttcattgcagcagtcgaaaggctttgggactacggtatgtcatcatcccctcatgtgttgcgcaatagagctcagagtggaagtgttccacagttcaagaaagtcgtctttcaagagtttacagatggcagcttcacacagcctctctatcggggcgagcttaacgaacatttgggactccttggtccctatatccgagccgaagtggaggacaacattatggttacctttaggaatcaagcctctcgcccctacagcttctactcctccctcatcagttatgaggaggatcagagacaaggcgctgaaccacggaagaactttgtgaaaccgaatgagacgaagacctacttctggaaagtacagcaccacatggcccccacaaaagacgaattcgattgcaaagcatgggcgtatttttcagacgttgacttggagaaagatgtacattcaggacttattggtcctttgttggtgtgtcacactaacactctcaatccagcccatggcaggcaggtgacagtccaggaattcgctcttttctttaccatctttgatgagaccaagtcctggtacttcacggaaaacatggagcgcaattgcagagccccctgtaacatacagatggaggaccctacctttaaggaaaattatcggttccacgcaatcaacggatacattatggatacactccctggccttgtgatggctcaggaccaacgaatcaggtggtacctcctcagcatgggttctaatgagaacatacactccattcacttttcaggacatgtgttcactgtccggaagaaagaagagtataagatggccctctacaatttgtatccaggcgtgtttgagaccgttgaaatgcttccctctaaagctggcatctggagagtagagtgcttgatcggagaacatcttcacgcaggtatgagcaccttgttcctcgtgtacagcaacaaatgtcagaatccacttggcatggccagtggacacattcgcgactttcagatcacagcatctggccagtatggacaatgggccccaaagttggctcgcctccattactccggtagcataaatgcgtggtccactaaagaacctttcagctggattaaggtcgatcttcttgcccccatgatcatccacggcattaagacacagggagcgaggcagaaattctcctccctctacatctcacagttcattattatgtatagtttggacggcaagaagtggcaaacttatagaggtaacagtactggaacagacatggtgttcttcggcaacgttgatagctctggcatcaaacacaacatctttaatcctcccataatagctcggtacatcagattgcatccgacccactacagcattaggagtacactccgaatggagcttatgggttgcgacttgaattcctgttcaatgccactcggaatggagtctaaagccatctctgatgcacagataaccgccagtagctactttacgaacatgtttgctacgtggtcaccctctaaggcaaggcttcatttgcaaggccggtctaatgcctggagacctcaggtgaacaacccgaaagaatggctccaggtggactttcagaagaccatgaaagtaacaggtgtcactactcagggagttaagtccttggatactagcatgtatgtgaaggagttccttatttcctcatcacaagatggccaccagtggaccctcttctttcagaatggtaaggtcaaagtgtttcagggcaatcaagacagcttcacacccgtggtgaacagtcttgatcctccactcttgacacgataccttcgaatccatccacagtcttgggagcaccagattgcattgcgcatggaagtacttggatgcgaggctcaggacctctac

SEQ ID NO: 1284 - protein, 1457 aa, synthetic construct
  REGION 1..1457: note = Variant of human B-domain deleted Factor VIII
MQIELSTCFFLCLLRFCFSATRRYYLGAVELSWDYMQSDLGELPVDARFPPRVPKSFPFNTSQVYKKTLFVEFTDHLFNIAKPRPPWMGLLGPTIQAEVYDTVVITLKNMASHPVSLHAVGVSYWKASEGAEYDDQTSQREKEDDKVFPGGSHTYVWQVLKENEPMASDPPCLTYSYLSHVDLVKDLNSGLIGALLVCREGSLAKEKTQTLHKFILLFAVFDEGKSWHSETKNSLMQDRDAASARAWPKMHTVNGYVNRTLPGLIGCHRKSVYWHVIGMGTTPEVHSIFLEGHTFLVRNHRQASLGISPITFLTAQTLLMDLGQFLLFCHIPSHQHDGMEAYVKVDSCPEEPQLRMKNNEEAEDYDDDLTDSEMDVVRFDDDNSPSIIQARSGAKKHPKTWVHYIAAEEEDWDYAPLVLAPDDRSYKSQYLNNGPQRIGRKYKKVRFMAYTDETFKTREAIQHESGILGPLLYGEVGDTLLIIFKNQASRPYNIYPHGITDVRPLYSRRLPKGVKHLKDFPILPGEIFKYKWTVTVEDGPTKSDPRCLTRYYSSFVNMERDLASGLIGPLLICYKESVDQRGNQIMSDKRNVILFSVFDENRSWYLTENIQRFLPNPAGVQLEDPEFQASNIMHSINGYVFDSLQLSVCLHEVAYWYILSIGAQTDFLSVFFSGYTFKHKMVYEDTLTLFPFSGETVFMSMENPGLWILGCHNSDFRNRGMTALLKVSSCDWNTGDYYEDSYEDISAYFDSKNNAIEPRSFSQNPPVLKRHQREGTRTTLQSDQEEIDYDDTISVEMKKEDFDIYDEDENQSPRSFQKKTRHYFIAAVERLWDYGMSSSPHVLRNRAQSGSVPQFKKVVFQEFTDGSFTQPLYRGELNEHLGLLGPYIRAEVEDNIMVTFRNQASRPYSFYSSLISYEEDQRQGAEPRKNFVKPNETKTYFWKVQHHMAPTKDEFDCKAWAYFSDVDLEKDVHSGLIGPLLVCHTNTLNPAHGRQVTVQEFALFFTIFDETKSWYFTENMERNCRAPCNIQMEDPTFKENYRFHAINGYIMDTLPGLVMAQDQRIRWYLLSMGSNENIHSIHFSGHVFTVRKKEEYKMALYNLYPGVFETVEMLPSKAGIWRVECLIGEHLHAGMSTLFLVYSNKCQNPLGMASGHIRDFQITASGQYGQWAPKLARLHYSGSINAWSTKEPFSWIKVDLLAPMIIHGIKTQGARQKFSSLYISQFIIMYSLDGKKWQTYRGNSTGTDMVFFGNVDSSGIKHNIFNPPIIARYIRLHPTHYSIRSTLRMELMGCDLNSCSMPLGMESKAISDAQITASSYFTNMFATWSPSKARLHLQGRSNAWRPQVNNPKEWLQVDFQKTMKVTGVTTQGVKSLDTSMYVKEFLISSSQDGHQWTLFFQNGKVKVFQGNQDSFTPVVNSLDPPLLTRYLRIHPQSWEHQIALRMEVLGCEAQDLY

SEQ ID NO: 1285 - DNA, 4371 bp, synthetic construct
  misc_feature 1..4371: note = Variant of human B-domain deleted Factor VIII
  source 1..4371: mol_type = other DNA
atgcagattgaactgtctacctgcttcttcctctgtttgctgaggttctgctttagcgccactagacggtactaccttggcgctgtggagctgtcctgggactatatgcagagtgatttgggagagcttcccgtcgacgcacgatttcctcctcgcgttccaaagtcatttccctttaacacaagccaggtgtacaagaagacgctcttcgtcgaattcaccgatcacctgttcaatatcgccaaacccagaccaccatggatgggtcttttggggcctaccatacaagcggaggtgtatgacacagttgttatcactctcaagaacatggcttctcatccggtaagtcttcacgcagtgggcgtgtcctactggaaagcttcagaaggagccgagtatgatgatcagacatcccagagggagaaagaagacgacaaggtatttccaggtgggtctcatacctatgtgtggcaagtgctcaaagagaatggccctatggcaagcgatccgccgtgtttgacttacagctacctttcacacgttgacctcgtcaaggacctcaactccgggttgattggagccttgttggtatgcagggaaggatctcttgccaaagagaagacacagaccctccacaagtttatccttctctttgctgtgttcgatgagggcaaaagttggcatagcgaaacgaagaattccctcatgcaggatcgcgacgcagccagcgccagagcttggcccaagatgcacactgtgaacggatatgtcaataggacgcttcctggcttgattgggtgtcatcggaaaagtgtctactggcacgtgatcggaatggggacaacaccagaggtccactccatatttctcgaaggccataccttccttgttcgaaaccacagacaggcatccttggggatctctcccattacctttctcactgcccaaacgctccttatggacttgggtcagttccttctcttttgccatatcccgtcacaccagcatgatggtatggaagcttatgtgaaagtcgacagttgtcctgaggagccacagttgcgcatgaagaataatgaagaagccgaggattacgacgacgatctcaccgattctgagatggacgtggtgaggtttgatgacgacaactctccctccatcattcaagctcggagcggggcgaagaaacaccccaagacttgggtccactatatagcggcggaagaggaggattgggattacgctcctcttgtattggcaccagatgaccgctcatacaaaagccagtacctcaacaacggaccgcagagaattggccggaagtataagaaagtgcgatttatggcctatacagacgaaacctttaagacaagggaggccatccagcatgagagtgggattttgggacctcttctttacggcgaagttggtgataccctcctcatcatcttcaagaatcaagcttctcgcccctataacatttacccacacgggatcactgacgttaggcctttgtatagcagaagacttcccaaaggcgtgaagcatctcaaagacttccccattttgccaggcgagatctttaagtacaaatggaccgtcacagtggaagatggaccgactaaatcagaccctcgatgccttacgcggtactattcctccttcgtgaatatggagagagatttggcaagcggactcataggaccactcctcatctgttacaaggaatctgtagaccagaggggtaaccagattatgagtgataaacgcaatgtgatcctttttagcgtcttcgacgagaaccggtcctggtacttgaccgagaatatacaaaggttccttcccaaccccgcaggcgttcagttggaagaccctgagtttcaggccagcaatattatgcactcaatcaacggctatgtgtttgatagtctccagctttctgtttgcctccatgaagtagcctattggtacatcttgtcaattggtgctcaaacagacttcctctccgtcttcttctccggctacacctttaagcacaagatggtgtatgaggacactctcacactctttccattttctggagaaaccgtgttcatgagcatggagaatccaggcctttggatcttgggttgccacaacagtgattttcgcaatcggggaatgactgctctcctcaaagtcagcagctgtgattggaacacaggcgactattacgaagattcttacgaggacataagtgcctactttgactccaagaataacgccattgagcccagatcattctcccagaatcctcccgtgcttaaaaggcatcagcgcgaaggtaccagaactactcttcagtctgatcaagaggagattgactatgacgacaccattagcgtggaaatgaagaaggaggatttcgatatctatgacgaagatgagaaccagtctccgcggagctttcaggggaagacgcgacactacttcattgcagcagtcgaaaggctttgggactacggtatgtcatcatcccctcatgtgttgcgcaatagagctcagagtggaagtgttccacagttcaagaaagtcgtctttcaagagtttacagatggcagcttcacacagcctctctatcggggcgagcttaacgaacatttgggactccttggtccctatatccgagccgaagtggaggacaacattatggttacctttaggaatcaagcctctcgcccctacagcttctactcctccctcatcagttatgaggaggatcagagacaaggcgctgaaccacggaagaactttgtgaaaccgaatgagacgaagacctacttctggaaagtacagcaccacatggcccccacaaaagacgaattcgattgcaaagcatgggcgtatttttcagacgttgacttggagaaagatgtacattcaggacttattggtcctttgttggtgtgtcacactaacactctcaatccagcccatggcaggcaggtgacagtccaggaattcgctcttttctttaccatctttgatgagaccaagtcctggtacttcacggaaaacatggagcgcaattgcagagccccctgtaacatacagatggaggaccctacctttaaggaaaattatcggttccacgcaatcaacggatacattatggatacactccctggccttgtgatggctcaggaccaacgaatcaggtggtacctcctcagcatgggttctaatgagaacatacactccattcacttttcaggacatgtgttcactgtccggaagaaagaagagtataagatggccctctacaatttgtatccaggcgtgtttgagaccgttgaaatgcttccctctaaagctggcatctggagagtagagtgcttgatcggagaacatcttcacgcaggtatgagcaccttgttcctcgtgtacagcaacaaatgtcagaatccacttggcatggccagtggacacattcgcgactttcagatcacagcatctggccagtatggacaatgggccccaaagttggctcgcctccattactccggtagcataaatgcgtggtccactaaagaacctttcagctggattaaggtcgatcttcttgcccccatgatcatccacggcattaagacacagggagcgaggcagaaattctcctccctctacatctcacagttcattattatgtatagtttggacggcaagaagtggcaaacttatagaggtaacagtactggaacagacatggtgttcttcggcaacgttgatagctctggcatcaaacacaacatctttaatcctcccataatagctcggtacatcagattgcatccgacccactacagcattaggagtacactccgaatggagcttatgggttgcgacttgaattcctgttcaatgccactcggaatggagtctaaagccatctctgatgcacagataaccgccagtagctactttacgaacatgtttgctacgtggtcaccctctaaggcaaggcttcatttgcaaggccggtctaatgcctggagacctcaggtgaacaacccgaaagaatggctccaggtggactttcagaagaccatgaaagtaacaggtgtcactactcagggagttaagtccttggatactagcatgtatgtgaaggagttccttatttcctcatcacaagatggccaccagtggaccctcttctttcagaatggtaaggtcaaagtgtttcagggcaatcaagacagcttcacacccgtggtgaacagtcttgatcctccactcttgacacgataccttcgaatccatccacagtcttgggagcaccagattgcattgcgcatggaagtacttggatgcgaggctcaggacctctac

SEQ ID NO: 1286 - protein, 1457 aa, synthetic construct
  REGION 1..1457: note = Variant of human B-domain deleted Factor VIII
MQIELSTCFFLCLLRFCFSATRRYYLGAVELSWDYMQSDLGELPVDARFPPRVPKSFPFNTSQVYKKTLFVEFTDHLFNIAKPRPPWMGLLGPTIQAEVYDTVVITLKNMASHPVSLHAVGVSYWKASEGAEYDDQTSQREKEDDKVFPGGSHTYVWQVLKENGPMASDPPCLTYSYLSHVDLVKDLNSGLIGALLVCREGSLAKEKTQTLHKFILLFAVFDEGKSWHSETKNSLMQDRDAASARAWPKMHTVNGYVNRTLPGLIGCHRKSVYWHVIGMGTTPEVHSIFLEGHTFLVRNHRQASLGISPITFLTAQTLLMDLGQFLLFCHIPSHQHDGMEAYVKVDSCPEEPQLRMKNNEEAEDYDDDLTDSEMDVVRFDDDNSPSIIQARSGAKKHPKTWVHYIAAEEEDWDYAPLVLAPDDRSYKSQYLNNGPQRIGRKYKKVRFMAYTDETFKTREAIQHESGILGPLLYGEVGDTLLIIFKNQASRPYNIYPHGITDVRPLYSRRLPKGVKHLKDFPILPGEIFKYKWTVTVEDGPTKSDPRCLTRYYSSFVNMERDLASGLIGPLLICYKESVDQRGNQIMSDKRNVILFSVFDENRSWYLTENIQRFLPNPAGVQLEDPEFQASNIMHSINGYVFDSLQLSVCLHEVAYWYILSIGAQTDFLSVFFSGYTFKHKMVYEDTLTLFPFSGETVFMSMENPGLWILGCHNSDFRNRGMTALLKVSSCDWNTGDYYEDSYEDISAYFDSKNNAIEPRSFSQNPPVLKRHQREGTRTTLQSDQEEIDYDDTISVEMKKEDFDIYDEDENQSPRSFQGKTRHYFIAAVERLWDYGMSSSPHVLRNRAQSGSVPQFKKVVFQEFTDGSFTQPLYRGELNEHLGLLGPYIRAEVEDNIMVTFRNQASRPYSFYSSLISYEEDQRQGAEPRKNFVKPNETKTYFWKVQHHMAPTKDEFDCKAWAYFSDVDLEKDVHSGLIGPLLVCHTNTLNPAHGRQVTVQEFALFFTIFDETKSWYFTENMERNCRAPCNIQMEDPTFKENYRFHAINGYIMDTLPGLVMAQDQRIRWYLLSMGSNENIHSIHFSGHVFTVRKKEEYKMALYNLYPGVFETVEMLPSKAGIWRVECLIGEHLHAGMSTLFLVYSNKCQNPLGMASGHIRDFQITASGQYGQWAPKLARLHYSGSINAWSTKEPFSWIKVDLLAPMIIHGIKTQGARQKFSSLYISQFIIMYSLDGKKWQTYRGNSTGTDMVFFGNVDSSGIKHNIFNPPIIARYIRLHPTHYSIRSTLRMELMGCDLNSCSMPLGMESKAISDAQITASSYFTNMFATWSPSKARLHLQGRSNAWRPQVNNPKEWLQVDFQKTMKVTGVTTQGVKSLDTSMYVKEFLISSSQDGHQWTLFFQNGKVKVFQGNQDSFTPVVNSLDPPLLTRYLRIHPQSWEHQIALRMEVLGCEAQDLY

SEQ ID NO: 1287 - DNA, 4371 bp, synthetic construct
  misc_feature 1..4371: note = Variant of human B-domain deleted Factor VIII
  source 1..4371: mol_type = other DNA
atgcagattgaactgtctacctgcttcttcctctgtttgctgaggttctgctttagcgccactagacggtactaccttggcgctgtggagctgtcctgggactatatgcagagtgatttgggagagcttcccgtcgacgcacgatttcctcctcgcgttccaaagtcatttccctttaacacaagccaggtgtacaagaagacgctcttcgtcgaattcaccgatcacctgttcaatatcgccaaacccagaccaccatggatgggtcttttggggcctaccatacaagcggaggtgtatgacacagttgttatcactctcaagaacatggcttctcatccggtaagtcttcacgcagtgggcgtgtcctactggaaagcttcagaaggagccgagtatgatgatcagacatcccagagggagaaagaagacgacaaggtatttccaggtgggtctcatacctatgtgtggcaagtgctcaaagagaatggccctatggcaagcgatccgccgtgtttgacttacagctacctttcacacgttgacctcgtcaaggacctcaactccgggttgattggagccttgttggtatgcagggaaggatctcttgccaaagagaagacacagaccctccacaagtttatccttctctttgctgtgttcgatgagggcaaaagttggcatagcgaaacgaagaattccctcatgcaggatcgcgacgcagccagcgccagagcttggcccaagatgcacactgtgaacggatatgtcaataggacgcttcctggcttgattgggtgtcatcggaaaagtgtctactggcacgtgatcggaatggggacaacaccagaggtccactccatatttctcgaaggccataccttccttgttcgaaaccacagacaggcatccttggggatctctcccattacctttctcactgcccaaacgctccttatggacttgggtcagttccttctcttttgccatatcccgtcacaccagcatgatggtatggaagcttatgtgaaagtcgacagttgtcctgaggagccacagttgcgcatgaagaataatgaagaagccgaggattacgacgacgatctcaccgattctgagatggacgtggtgaggtttgatgacgacaactctccctccatcattcaagctcggagcggggcgaagaaacaccccaagacttgggtccactatatagcggcggaagaggaggattgggattacgctcctcttgtattggcaccagatgaccgctcatacaaaagccagtacctcaacaacggaccgcagagaattggccggaagtataagaaagtgcgatttatggcctatacagacgaaacctttaagacaagggaggccatccagcatgagagtgggattttgggacctcttctttacggcgaagttggtgataccctcctcatcatcttcaagaatcaagcttctcgcccctataacatttacccacacgggatcactgacgttaggcctttgtatagcagaagacttcccaaaggcgtgaagcatctcaaagacttccccattttgccaggcgagatctttaagtacaaatggaccgtcacagtggaagatggaccgactaaatcagaccctcgatgccttacgcggtactattcctccttcgtgaatatggagagagatttggcaagcggactcataggaccactcctcatctgttacaaggaatctgtagaccagaggggtaaccagattatgagtgataaacgcaatgtgatcctttttagcgtcttcgacgagaaccggtcctggtacttgaccgagaatatacaaaggttccttcccaaccccgcaggcgttcagttggaagaccctgagtttcaggccagcaatattatgcactcaatcaacggctatgtgtttgatagtctccagctttctgtttgcctccatgaagtagcctattggtacatcttgtcaattggtgctcaaacagacttcctctccgtcttcttctccggctacacctttaagcacaagatggtgtatgaggacactctcacactctttccattttctggagaaaccgtgttcatgagcatggagaatccaggcctttggatcttgggttgccacaacagtgattttcgcaatcggggaatgactgctctcctcaaagtcagcagctgtgattggaacacaggcgactattacgaagattcttacgaggacataagtgcctactttgactccaagaataacgccattgagcccagatcattctcccagaatcctcccgtgcttaaaaggcatcagcgcgaaggtaccagaactactcttcagtctgatcaagaggagattgactatgacgacaccattagcgtggaaatgaagaaggaggatttcgatatctatgacttggatgagaaccagtctccgcggagctttcagaagaagacgcgacactacttcattgcagcagtcgaaaggctttgggactacggtatgtcatcatcccctcatgtgttgcgcaatagagctcagagtggaagtgttccacagttcaagaaagtcgtctttcaagagtttacagatggcagcttcacacagcctctctatcggggcgagcttaacgaacatttgggactccttggtccctatatccgagccgaagtggaggacaacattatggttacctttaggaatcaagcctctcgcccctacagcttctactcctccctcatcagttatgaggaggatcagagacaaggcgctgaaccacggaagaactttgtgaaaccgaatgagacgaagacctacttctggaaagtacagcaccacatggcccccacaaaagacgaattcgattgcaaagcatgggcgtatttttcagacgttgacttggagaaagatgtacattcaggacttattggtcctttgttggtgtgtcacactaacactctcaatccagcccatggcaggcaggtgacagtccaggaattcgctcttttctttaccatctttgatgagaccaagtcctggtacttcacggaaaacatggagcgcaattgcagagccccctgtaacatacagatggaggaccctacctttaaggaaaattatcggttccacgcaatcaacggatacattatggatacactccctggccttgtgatggctcaggaccaacgaatcaggtggtacctcctcagcatgggttctaatgagaacatacactccattcacttttcaggacatgtgttcactgtccggaagaaagaagagtataagatggccctctacaatttgtatccaggcgtgtttgagaccgttgaaatgcttccctctaaagctggcatctggagagtagagtgcttgatcggagaacatcttcacgcaggtatgagcaccttgttcctcgtgtacagcaacaaatgtcagaatccacttggcatggccagtggacacattcgcgactttcagatcacagcatctggccagtatggacaatgggccccaaagttggctcgcctccattactccggtagcataaatgcgtggtccactaaagaacctttcagctggattaaggtcgatcttcttgcccccatgatcatccacggcattaagacacagggagcgaggcagaaattctcctccctctacatctcacagttcattattatgtatagtttggacggcaagaagtggcaaacttatagaggtaacagtactggaacagacatggtgttcttcggcaacgttgatagctctggcatcaaacacaacatctttaatcctcccataatagctcggtacatcagattgcatccgacccactacagcattaggagtacactccgaatggagcttatgggttgcgacttgaattcctgttcaatgccactcggaatggagtctaaagccatctctgatgcacagataaccgccagtagctactttacgaacatgtttgctacgtggtcaccctctaaggcaaggcttcatttgcaaggccggtctaatgcctggagacctcaggtgaacaacccgaaagaatggctccaggtggactttcagaagaccatgaaagtaacaggtgtcactactcagggagttaagtccttggatactagcatgtatgtgaaggagttccttatttcctcatcacaagatggccaccagtggaccctcttctttcagaatggtaaggtcaaagtgtttcagggcaatcaagacagcttcacacccgtggtgaacagtcttgatcctccactcttgacacgataccttcgaatccatccacagtcttgggagcaccagattgcattgcgcatggaagtacttggatgcgaggctcaggacctctac

SEQ ID NO: 1288 - protein, 1457 aa, synthetic construct
  REGION 1..1457: note = Variant of human B-domain deleted Factor VIII
MQIELSTCFFLCLLRFCFSATRRYYLGAVELSWDYMQSDLGELPVDARFPPRVPKSFPFNTSQVYKKTLFVEFTDHLFNIAKPRPPWMGLLGPTIQAEVYDTVVITLKNMASHPVSLHAVGVSYWKASEGAEYDDQTSQREKEDDKVFPGGSHTYVWQVLKENGPMASDPPCLTYSYLSHVDLVKDLNSGLIGALLVCREGSLAKEKTQTLHKFILLFAVFDEGKSWHSETKNSLMQDRDAASARAWPKMHTVNGYVNRTLPGLIGCHRKSVYWHVIGMGTTPEVHSIFLEGHTFLVRNHRQASLGISPITFLTAQTLLMDLGQFLLFCHIPSHQHDGMEAYVKVDSCPEEPQLRMKNNEEAEDYDDDLTDSEMDVVRFDDDNSPSIIQARSGAKKHPKTWVHYIAAEEEDWDYAPLVLAPDDRSYKSQYLNNGPQRIGRKYKKVRFMAYTDETFKTREAIQHESGILGPLLYGEVGDTLLIIFKNQASRPYNIYPHGITDVRPLYSRRLPKGVKHLKDFPILPGEIFKYKWTVTVEDGPTKSDPRCLTRYYSSFVNMERDLASGLIGPLLICYKESVDQRGNQIMSDKRNVILFSVFDENRSWYLTENIQRFLPNPAGVQLEDPEFQASNIMHSINGYVFDSLQLSVCLHEVAYWYILSIGAQTDFLSVFFSGYTFKHKMVYEDTLTLFPFSGETVFMSMENPGLWILGCHNSDFRNRGMTALLKVSSCDWNTGDYYEDSYEDISAYFDSKNNAIEPRSFSQNPPVLKRHQREGTRTTLQSDQEEIDYDDTISVEMKKEDFDIYDLDENQSPRSFQKKTRHYFIAAVERLWDYGMSSSPHVLRNRAQSGSVPQFKKVVFQEFTDGSFTQPLYRGELNEHLGLLGPYIRAEVEDNIMVTFRNQASRPYSFYSSLISYEEDQRQGAEPRKNFVKPNETKTYFWKVQHHMAPTKDEFDCKAWAYFSDVDLEKDVHSGLIGPLLVCHTNTLNPAHGRQVTVQEFALFFTIFDETKSWYFTENMERNCRAPCNIQMEDPTFKENYRFHAINGYIMDTLPGLVMAQDQRIRWYLLSMGSNENIHSIHFSGHVFTVRKKEEYKMALYNLYPGVFETVEMLPSKAGIWRVECLIGEHLHAGMSTLFLVYSNKCQNPLGMASGHIRDFQITASGQYGQWAPKLARLHYSGSINAWSTKEPFSWIKVDLLAPMIIHGIKTQGARQKFSSLYISQFIIMYSLDGKKWQTYRGNSTGTDMVFFGNVDSSGIKHNIFNPPIIARYIRLHPTHYSIRSTLRMELMGCDLNSCSMPLGMESKAISDAQITASSYFTNMFATWSPSKARLHLQGRSNAWRPQVNNPKEWLQVDFQKTMKVTGVTTQGVKSLDTSMYVKEFLISSSQDGHQWTLFFQNGKVKVFQGNQDSFTPVVNSLDPPLLTRYLRIHPQSWEHQIALRMEVLGCEAQDLY

SEQ ID NO: 1289 - DNA, 4371 bp, synthetic construct
  misc_feature 1..4371: note = Variant of human B-domain deleted Factor VIII
  source 1..4371: mol_type = other DNA
atgcagattgaactgtctacctgcttcttcctctgtttgctgaggttctgctttagcgccactagacggtactaccttggcgctgtggagctgtcctgggactatatgcagagtgatttgggagagcttcccgtcgacgcacgatttcctcctcgcgttccaaagtcatttccctttaacacaagccaggtgtacaagaagacgctcttcgtcgaattcaccgatcacctgttcaatatcgccaaacccagaccaccatggatgggtcttttggggcctaccatacaagcggaggtgtatgacacagttgttatcactctcaagaacatggcttctcatccggtaagtcttcacgcagtgggcgtgtcctactggaaagcttcagaaggagccgagtatgatgatcagacatcccagagggagaaagaagacgacaaggtatttccaggtgggtctcatacctatgtgtggcaagtgctcaaagagaatggccctatggcaagcgatccgccgtgtttgacttacagctacctttcacacgttgacctcgtcaaggacctcaactccgggttgattggagccttgttggtatgcagggaaggatctcttgccaaagagaagacacagaccctccacaagtttatccttctctttgctgtgttcgatgagggcaaaagttggcatagcgaaacgaagaattccctcatgcaggatcgcgacgcagccagcgccagagcttggcccaagatgcacactgtgaacggatatgtcaataggacgcttcctggcttgattgggtgtcatcggaaaagtgtctactggcacgtgatcggaatggggacaacaccagaggtccactccatatttctcgaaggccataccttccttgttcgaaaccacagacaggcatccttggggatctctcccattacctttctcactgcccaaacgctccttatggacttgggtcagttccttctcttttgccatatcccgtcacaccagcatgatggtatggaagcttatgtgaaagtcgacagttgtcctgaggagccacagttgcgcatgaagaataatgaagaagccgaggattacgacgacgatctcaccgattctgagatggacgtggtgaggtttgatgacgacaactctccctccatcattcaagctcggagcggggcgaagaaacaccccaagacttgggtccactatatagcggcggaagaggaggattgggattacgctcctcttgtattggcaccagatgaccgctcatacaaaagccagtacctcaacaacggaccgcagagaattggccggaagtataagaaagtgcgatttatggcctatacagacgaaacctttaagacaagggaggccatccagcatgagagtgggattttgggacctcttctttacggcgaagttggtgataccctcctcatcatcttcaagaatcaagcttctcgcccctataacatttacccacacgggatcactgacgttaggcctttgtatagcagaagacttcccaaaggcgtgaagcatctcaaagacttccccattttgccaggcgagatctttaagtacaaatggaccgtcacagtggaagatggaccgactaaatcagaccctcgatgccttacgcggtactattcctccttcgtgaatatggagagagatttggcaagcggactcataggaccactcctcatctgttacaaggaatctgtagaccagaggggtaaccagattatgagtgataaacgcaatgtgatcctttttagcgtcttcgacgagaaccggtcctggtacttgaccgagaatatacaaaggttccttcccaaccccgcaggcgttcagttggaagaccctgagtttcaggccagcaatattatgcactcaatcaacggctatgtgtttgatagtctccagctttctgtttgcctccatgaagtagcctattggtacatcttgtcaattggtgctcaaacagacttcctctccgtcttcttctccggctacacctttaagcacaagatggtgtatgaggacactctcacactctttccattttctggagaaaccgtgttcatgagcatggagaatccaggcctttggatcttgggttgccacaacagtgattttcgcaatcggggaatgactgctctcctcaaagtcagcagctgtgattggaacacaggcgactattacgaagattcttacgaggacataagtgcctactttgactccaagaataacgccattgagcccagatcattctcccagaatcctcccgtgcttaaaaggcatcagcgcgaaggtaccagaactactcttcagtctgatcaagaggagattgactatgacgacaccattagcgtggaaatgaaggcggaggatttcgatatctatgacgaagatgagaaccagtctccgcggagctttcagaagaagacgcgacactacttcattgcagcagtcgaaaggctttgggactacggtatgtcatcatcccctcatgtgttgcgcaatagagctcagagtggaagtgttccacagttcaagaaagtcgtctttcaagagtttacagatggcagcttcacacagcctctctatcggggcgagcttaacgaacatttgggactccttggtccctatatccgagccgaagtggaggacaacattatggttacctttaggaatcaagcctctcgcccctacagcttctactcctccctcatcagttatgaggaggatcagagacaaggcgctgaaccacggaagaactttgtgaaaccgaatgagacgaagacctacttctggaaagtacagcaccacatggcccccacaaaagacgaattcgattgcaaagcatgggcgtatttttcagacgttgacttggagaaagatgtacattcaggacttattggtcctttgttggtgtgtcacactaacactctcaatccagcccatggcaggcaggtgacagtccaggaattcgctcttttctttaccatctttgatgagaccaagtcctggtacttcacggaaaacatggagcgcaattgcagagccccctgtaacatacagatggaggaccctacctttaaggaaaattatcggttccacgcaatcaacggatacattatggatacactccctggccttgtgatggctcaggaccaacgaatcaggtggtacctcctcagcatgggttctaatgagaacatacactccattcacttttcaggacatgtgttcactgtccggaagaaagaagagtataagatggccctctacaatttgtatccaggcgtgtttgagaccgttgaaatgcttccctctaaagctggcatctggagagtagagtgcttgatcggagaacatcttcacgcaggtatgagcaccttgttcctcgtgtacagcaacaaatgtcagaatccacttggcatggccagtggacacattcgcgactttcagatcacagcatctggccagtatggacaatgggccccaaagttggctcgcctccattactccggtagcataaatgcgtggtccactaaagaacctttcagctggattaaggtcgatcttcttgcccccatgatcatccacggcattaagacacagggagcgaggcagaaattctcctccctctacatctcacagttcattattatgtatagtttggacggcaagaagtggcaaacttatagaggtaacagtactggaacagacatggtgttcttcggcaacgttgatagctctggcatcaaacacaacatctttaatcctcccataatagctcggtacatcagattgcatccgacccactacagcattaggagtacactccgaatggagcttatgggttgcgacttgaattcctgttcaatgccactcggaatggagtctaaagccatctctgatgcacagataaccgccagtagctactttacgaacatgtttgctacgtggtcaccctctaaggcaaggcttcatttgcaaggccggtctaatgcctggagacctcaggtgaacaacccgaaagaatggctccaggtggactttcagaagaccatgaaagtaacaggtgtcactactcagggagttaagtccttggatactagcatgtatgtgaaggagttccttatttcctcatcacaagatggccaccagtggaccctcttctttcagaatggtaaggtcaaagtgtttcagggcaatcaagacagcttcacacccgtggtgaacagtcttgatcctccactcttgacacgataccttcgaatccatccacagtcttgggagcaccagattgcattgcgcatggaagtacttggatgcgaggctcaggacctctac

SEQ ID NO: 1290 - protein, 1457 aa, synthetic construct
  REGION 1..1457: note = Variant of human B-domain deleted Factor VIII
MQIELSTCFFLCLLRFCFSATRRYYLGAVELSWDYMQSDLGELPVDARFPPRVPKSFPFNTSQVYKKTLFVEFTDHLFNIAKPRPPWMGLLGPTIQAEVYDTVVITLKNMASHPVSLHAVGVSYWKASEGAEYDDQTSQREKEDDKVFPGGSHTYVWQVLKENGPMASDPPCLTYSYLSHVDLVKDLNSGLIGALLVCREGSLAKEKTQTLHKFILLFAVFDEGKSWHSETKNSLMQDRDAASARAWPKMHTVNGYVNRTLPGLIGCHRKSVYWHVIGMGTTPEVHSIFLEGHTFLVRNHRQASLGISPITFLTAQTLLMDLGQFLLFCHIPSHQHDGMEAYVKVDSCPEEPQLRMKNNEEAEDYDDDLTDSEMDVVRFDDDNSPSIIQARSGAKKHPKTWVHYIAAEEEDWDYAPLVLAPDDRSYKSQYLNNGPQRIGRKYKKVRFMAYTDETFKTREAIQHESGILGPLLYGEVGDTLLIIFKNQASRPYNIYPHGITDVRPLYSRRLPKGVKHLKDFPILPGEIFKYKWTVTVEDGPTKSDPRCLTRYYSSFVNMERDLASGLIGPLLICYKESVDQRGNQIMSDKRNVILFSVFDENRSWYLTENIQRFLPNPAGVQLEDPEFQASNIMHSINGYVFDSLQLSVCLHEVAYWYILSIGAQTDFLSVFFSGYTFKHKMVYEDTLTLFPFSGETVFMSMENPGLWILGCHNSDFRNRGMTALLKVSSCDWNTGDYYEDSYEDISAYFDSKNNAIEPRSFSQNPPVLKRHQREGTRTTLQSDQEEIDYDDTISVEMKAEDFDIYDEDENQSPRSFQKKTRHYFIAAVERLWDYGMSSSPHVLRNRAQSGSVPQFKKVVFQEFTDGSFTQPLYRGELNEHLGLLGPYIRAEVEDNIMVTFRNQASRPYSFYSSLISYEEDQRQGAEPRKNFVKPNETKTYFWKVQHHMAPTKDEFDCKAWAYFSDVDLEKDVHSGLIGPLLVCHTNTLNPAHGRQVTVQEFALFFTIFDETKSWYFTENMERNCRAPCNIQMEDPTFKENYRFHAINGYIMDTLPGLVMAQDQRIRWYLLSMGSNENIHSIHFSGHVFTVRKKEEYKMALYNLYPGVFETVEMLPSKAGIWRVECLIGEHLHAGMSTLFLVYSNKCQNPLGMASGHIRDFQITASGQYGQWAPKLARLHYSGSINAWSTKEPFSWIKVDLLAPMIIHGIKTQGARQKFSSLYISQFIIMYSLDGKKWQTYRGNSTGTDMVFFGNVDSSGIKHNIFNPPIIARYIRLHPTHYSIRSTLRMELMGCDLNSCSMPLGMESKAISDAQITASSYFTNMFATWSPSKARLHLQGRSNAWRPQVNNPKEWLQVDFQKTMKVTGVTTQGVKSLDTSMYVKEFLISSSQDGHQWTLFFQNGKVKVFQGNQDSFTPVVNSLDPPLLTRYLRIHPQSWEHQIALRMEVLGCEAQDLY

SEQ ID NO: 1291 - DNA, 4371 bp, synthetic construct
  misc_feature 1..4371: note = Variant of human B-domain deleted Factor VIII
  source 1..4371: mol_type = other DNA
atgcagattgaactgtctacctgcttcttcctctgtttgctgaggttctgctttagcgccactagacggtactaccttggcgctgtggagctgtcctgggactatatgcagagtgatttgggagagcttcccgtcgacgcacgatttcctcctcgcgttccaaagtcatttccctttaacacaagccaggtgtacaagaagacgctcttcgtcgaattcaccgatcacctgttcaatatcgccaaacccagaccaccatggatgggtcttttggggcctaccatacaagcggaggtgtatgacacagttgttatcactctcaagaacatggcttctcatccggtaagtcttcacgcagtgggcgtgtcctactggaaagcttcagaaggagccgagtatgatgatcagacatcccagagggagaaagaagacgacaaggtatttccaggtgggtctcatacctatgtgtggcaagtgctcaaagagaatggccctatggcaagcgatccgccgtgtttgacttacagctacctttcacacgttgacctcgtcaaggacctcaactccgggttgattggagccttgttggtatgcagggaaggatctcttgccaaagagaagacacagaccctccacaagtttatccttctctttgctgtgttcgatgagggcaaaagttggcatagcgaaacgaagaattccctcatgcaggatcgcgacgcagccagcgccagagcttggcccaagatgcacactgtgaacggatatgtcaataggacgcttcctggcttgattgggtgtcatcggaaaagtgtctactggcacgtgatcggaatggggacaacaccagaggtccactccatatttctcgaaggccataccttccttgttcgaaaccacagacaggcatccttggggatctctcccattacctttctcactgcccaaacgctccttatggacttgggtcagttccttctcttttgccatatcccgtcacaccagcatgatggtatggaagcttatgtgaaagtcgacagttgtcctgaggagccacagttgcgcatgaagaataatgaagaagccgaggattacgacgacgatctcaccgattctgagatggacgtggtgaggtttgatgacgacaactctccctccatcattcaagctcggagcggggcgaagaaacaccccaagacttgggtccactatatagcggcggaagaggaggattgggattacgctcctcttgtattggcaccagatgaccgctcatacaaaagccagtacctcaacaacggaccgcagagaattggccggaagtataagaaagtgcgatttatggcctatacagacgaaacctttaagacaagggaggccatccagcatgagagtgggattttgggacctcttctttacggcgaagttggtgataccctcctcatcatcttcaagaatcaagcttctcgcccctataacatttacccacacgggatcactgacgttaggcctttgtatagcagaagacttcccaaaggcgtgaagcatctcaaagacttccccattttgccaggcgagatctttaagtacaaatggaccgtcacagtggaagatggaccgactaaatcagaccctcgatgccttacgcggtactattcctccttcgtgaatatggagagagatttggcaagcggactcataggaccactcctcatctgttacaaggaatctgtagaccagaggggtaaccagattatgagtgataaacgcaatgtgatcctttttagcgtcttcgacgagaaccggtcctggtacttgaccgagaatatacaaaggttccttcccaaccccgcaggcgttcagttggaagaccctgagtttcaggccagcaatattatgcactcaatcaacggctatgtgtttgatagtctccagctttctgtttgcctccatgaagtagcctattggtacatcttgtcaattggtgctcaaacagacttcctctccgtcttcttctccggctacacctttaagcacaagatggtgtatgaggacactctcacactctttccattttctggagaaaccgtgttcatgagcatggagaatccaggcctttggatcttgggttgccacaacagtgattttcgcaatcggggaatgactgctctcctcaaagtcagcagctgtgattggaacacaagtgactattacgaagattcttacgaggacataagtgcctactttgactccaagaataacgccattgagcccagatcattctcccagaatcctcccgtgcttaaaaggcatcagcgcgaaggtaccagaactactcttcagtctgatcaagaggagattgactatgacgacaccattagcgtggaaatgaagaaggaggatttcgatatctatgacgaagatgagaaccagtctccgcggagctttcagaagaagacgcgacactacttcattgcagcagtcgaaaggctttgggactacggtatgtcatcatcccctcatgtgttgcgcaatagagctcagagtggaagtgttccacagttcaagaaagtcgtctttcaagagtttacagatggcagcttcacacagcctctctatcggggcgagcttaacgaacatttgggactccttggtccctatatccgagccgaagtggaggacaacattatggttacctttaggaatcaagcctctcgcccctacagcttctactcctccctcatcagttatgaggaggatcagagacaaggcgctgaaccacggaagaactttgtgaaaccgaatgagacgaagacctacttctggaaagtacagcaccacatggcccccacaaaagacgaattcgattgcaaagcatgggcgtatttttcagacgttgacttggagaaagatgtacattcaggacttattggtcctttgttggtgtgtcacactaacactctcaatccagcccatggcaggcaggtgacagtccaggaattcgctcttttctttaccatctttgatgagaccaagtcctggtacttcacggaaaacatggagcgcaattgcagagccccctgtaacatacagatggaggaccctacctttaaggaaaattatcggttccacgcaatcaacggatacattatggatacactccctggccttgtgatggctcaggaccaacgaatcaggtggtacctcctcagcatgggttctaatgagaacatacactccattcacttttcaggacatgtgttcactgtccggaagaaagaagagtataagatggccctctacaatttgtatccaggcgtgtttgagaccgttgaaatgcttccctctaaagctggcatctggagagtagagtgcttgatcggagaacatcttcacgcaggtatgagcaccttgttcctcgtgtacagcaacaaatgtcagaatccacttggcatggccagtggacacattcgcgactttcagatcacagcatctggccagtatggacaatgggccccaaagttggctcgcctccattactccggtagcataaatgcgtggtccactaaagaacctttcagctggattaaggtcgatcttcttgcccccatgatcatccacggcattaagacacagggagcgaggcagaaattctcctccctctacatctcacagttcattattatgtatagtttggacggcaagaagtggcaaacttatagaggtaacagtactggaacagacatggtgttcttcggcaacgttgatagctctggcatcaaacacaacatctttaatcctcccataatagctcggtacatcagattgcatccgacccactacagcattaggagtacactccgaatggagcttatgggttgcgacttgaattcctgttcaatgccactcggaatggagtctaaagccatctctgatgcacagataaccgccagtagctactttacgaacatgtttgctacgtggtcaccctctaaggcaaggcttcatttgcaaggccggtctaatgcctggagacctcaggtgaacaacccgaaagaatggctccaggtggactttcagaagaccatgaaagtaacaggtgtcactactcagggagttaagtccttggatactagcatgtatgtgaaggagttccttatttcctcatcacaagatggccaccagtggaccctcttctttcagaatggtaaggtcaaagtgtttcagggcaatcaagacagcttcacacccgtggtgaacagtcttgatcctccactcttgacacgataccttcgaatccatccacagtcttgggagcaccagattgcattgcgcatggaagtacttggatgcgaggctcaggacctctac

SEQ ID NO: 1292 - protein, 1457 aa, synthetic construct
  REGION 1..1457: note = Variant of human B-domain deleted Factor VIII
MQIELSTCFFLCLLRFCFSATRRYYLGAVELSWDYMQSDLGELPVDARFPPRVPKSFPFNTSQVYKKTLFVEFTDHLFNIAKPRPPWMGLLGPTIQAEVYDTVVITLKNMASHPVSLHAVGVSYWKASEGAEYDDQTSQREKEDDKVFPGGSHTYVWQVLKENGPMASDPPCLTYSYLSHVDLVKDLNSGLIGALLVCREGSLAKEKTQTLHKFILLFAVFDEGKSWHSETKNSLMQDRDAASARAWPKMHTVNGYVNRTLPGLIGCHRKSVYWHVIGMGTTPEVHSIFLEGHTFLVRNHRQASLGISPITFLTAQTLLMDLGQFLLFCHIPSHQHDGMEAYVKVDSCPEEPQLRMKNNEEAEDYDDDLTDSEMDVVRFDDDNSPSIIQARSGAKKHPKTWVHYIAAEEEDWDYAPLVLAPDDRSYKSQYLNNGPQRIGRKYKKVRFMAYTDETFKTREAIQHESGILGPLLYGEVGDTLLIIFKNQASRPYNIYPHGITDVRPLYSRRLPKGVKHLKDFPILPGEIFKYKWTVTVEDGPTKSDPRCLTRYYSSFVNMERDLASGLIGPLLICYKESVDQRGNQIMSDKRNVILFSVFDENRSWYLTENIQRFLPNPAGVQLEDPEFQASNIMHSINGYVFDSLQLSVCLHEVAYWYILSIGAQTDFLSVFFSGYTFKHKMVYEDTLTLFPFSGETVFMSMENPGLWILGCHNSDFRNRGMTALLKVSSCDWNTSDYYEDSYEDISAYFDSKNNAIEPRSFSQNPPVLKRHQREGTRTTLQSDQEEIDYDDTISVEMKKEDFDIYDEDENQSPRSFQKKTRHYFIAAVERLWDYGMSSSPHVLRNRAQSGSVPQFKKVVFQEFTDGSFTQPLYRGELNEHLGLLGPYIRAEVEDNIMVTFRNQASRPYSFYSSLISYEEDQRQGAEPRKNFVKPNETKTYFWKVQHHMAPTKDEFDCKAWAYFSDVDLEKDVHSGLIGPLLVCHTNTLNPAHGRQVTVQEFALFFTIFDETKSWYFTENMERNCRAPCNIQMEDPTFKENYRFHAINGYIMDTLPGLVMAQDQRIRWYLLSMGSNENIHSIHFSGHVFTVRKKEEYKMALYNLYPGVFETVEMLPSKAGIWRVECLIGEHLHAGMSTLFLVYSNKCQNPLGMASGHIRDFQITASGQYGQWAPKLARLHYSGSINAWSTKEPFSWIKVDLLAPMIIHGIKTQGARQKFSSLYISQFIIMYSLDGKKWQTYRGNSTGTDMVFFGNVDSSGIKHNIFNPPIIARYIRLHPTHYSIRSTLRMELMGCDLNSCSMPLGMESKAISDAQITASSYFTNMFATWSPSKARLHLQGRSNAWRPQVNNPKEWLQVDFQKTMKVTGVTTQGVKSLDTSMYVKEFLISSSQDGHQWTLFFQNGKVKVFQGNQDSFTPVVNSLDPPLLTRYLRIHPQSWEHQIALRMEVLGCEAQDLY

SEQ ID NO: 1293 - DNA, 4371 bp, synthetic construct
  misc_feature 1..4371: note = Variant of human B-domain deleted Factor VIII
  source 1..4371: mol_type = other DNA
atgcagattgaactgtctacctgcttcttcctctgtttgctgaggttctgctttagcgccactagacggtactaccttggcgctgtggagctgtcctgggactatatgcagagtgatttgggagagcttcccgtcgacgcacgatttcctcctcgcgttccaaagtcatttccctttaacacaagccaggtgtacaagaagacgctcttcgtcgaattcaccgatcacctgttcaatatcgccaaacccagaccaccatggatgggtcttttggggcctaccatacaagcggaggtgtatgacacagttgttatcactctcaagaacatggcttctcatccggtaagtcttcacgcagtgggcgtgtcctactggaaagcttcagaaggagccgagtatgatgatcagacatcccagagggagaaagaagacgacaaggtatttccaggtgggtctcatacctatgtgtggcaagtgctcaaagagaatggccctatggcaagcgatccgccgtgtttgacttacagctacctttcacacgttgacctcgtcaaggacctcaactccgggttgattggagccttgttggtatgcagggaaggatctcttgccaaagagaagacacagaccctccacaagtttatccttctctttgctgtgttcgatgagggcaaaagttggcatagcgaaacgaagaattccctcatgcaggatcgcgacgcagccagcgccagagcttggcccaagatgcacactgtgaacggatatgtcaataggacgcttcctggcttgattgggtgtcatcggaaaagtgtctactggcacgtgatcggaatggggacaacaccagaggtccactccatatttctcgaaggccataccttccttgttcgaaaccacagacaggcatccttggggatctctcccattacctttctcactgcccaaacgctccttatggacttgggtcagttccttctcttttgccatatcccgtcacaccagcatgatggtatggaagcttatgtgaaagtcgacagttgtcctgaggagccacagttgcgcatgaagaataatgaagaagccgaggattacgacgacgatctcaccgattctgagatggacgtggtgaggtttgatgacgacaactctccctccatcattcaagctcggagcggggcgaagaaacaccccaagacttgggtccactatatagcggcggaagaggaggattgggattacgctcctcttgtattggcaccagatgaccgctcatacaaaagccagtacctcaacaacggaccgcagagaattggccggaagtataagaaagtgcgatttatggcctatacagacgaaacctttaagacaagggaggccatccagcatgagagtgggattttgggacctcttctttacggcgaagttggtgataccctcctcatcatcttcaagaatcaagcttctcgcccctataacatttacccacacgggatcactgacgttaggcctttgtatagcagaagacttcccaaaggcgtgaagcatctcaaagacttccccattttgccaggcgagatctttaagtacaaatggaccgtcacagtggaagatggaccgactaaatcagaccctcgatgccttacgcggtactattcctccttcgtgaatatggagagagatttggcaagcggactcataggaccactcctcatctgttacaaggaatctgtagaccagaggggtaaccagattatgagtgataaacgcaatgtgatcctttttagcgtcttcgacgagaaccggtcctggtacttgaccgagaatatacaaaggttccttcccaaccccgcaggcgttcagttggaagaccctgagtttcaggccagcaatattatgcactcaatcaacggctatgtgtttgatagtctccagctttctgtttgcctccatgaagtagcctattggtacatcttgtcaattggtgctcaaacagacttcctctccgtcttcttctccggctacacctttaagcacaagatggtgtatgaggacactctcacactctttccattttctggagaaaccgtgttcatgagcatggagaatccaggcctttggatcttgggttgccacaacagtgattttcgcaatcggggaatgactgctctcctcaaagtcagcagctgtgattggaacacaggcgactattacgaagattcttacgaggacataagtgcctactttgactccaagaataacgccattgagcccagatcattctcccagaatcctcccgtgcttaaaaggcatcagcgcgaaggtaccagaactactcttcagtctgatcaagaggagattgactatgacgacaccattcgggtggaaatgaagaaggaggatttcgatatctatgacgaagatgagaaccagtctccgcggagctttcagaagaagacgcgacactacttcattgcagcagtcgaaaggctttgggactacggtatgtcatcatcccctcatgtgttgcgcaatagagctcagagtggaagtgttccacagttcaagaaagtcgtctttcaagagtttacagatggcagcttcacacagcctctctatcggggcgagcttaacgaacatttgggactccttggtccctatatccgagccgaagtggaggacaacattatggttacctttaggaatcaagcctctcgcccctacagcttctactcctccctcatcagttatgaggaggatcagagacaaggcgctgaaccacggaagaactttgtgaaaccgaatgagacgaagacctacttctggaaagtacagcaccacatggcccccacaaaagacgaattcgattgcaaagcatgggcgtatttttcagacgttgacttggagaaagatgtacattcaggacttattggtcctttgttggtgtgtcacactaacactctcaatccagcccatggcaggcaggtgacagtccaggaattcgctcttttctttaccatctttgatgagaccaagtcctggtacttcacggaaaacatggagcgcaattgcagagccccctgtaacatacagatggaggaccctacctttaaggaaaattatcggttccacgcaatcaacggatacattatggatacactccctggccttgtgatggctcaggaccaacgaatcaggtggtacctcctcagcatgggttctaatgagaacatacactccattcacttttcaggacatgtgttcactgtccggaagaaagaagagtataagatggccctctacaatttgtatccaggcgtgtttgagaccgttgaaatgcttccctctaaagctggcatctggagagtagagtgcttgatcggagaacatcttcacgcaggtatgagcaccttgttcctcgtgtacagcaacaaatgtcagaatccacttggcatggccagtggacacattcgcgactttcagatcacagcatctggccagtatggacaatgggccccaaagttggctcgcctccattactccggtagcataaatgcgtggtccactaaagaacctttcagctggattaaggtcgatcttcttgcccccatgatcatccacggcattaagacacagggagcgaggcagaaattctcctccctctacatctcacagttcattattatgtatagtttggacggcaagaagtggcaaacttatagaggtaacagtactggaacagacatggtgttcttcggcaacgttgatagctctggcatcaaacacaacatctttaatcctcccataatagctcggtacatcagattgcatccgacccactacagcattaggagtacactccgaatggagcttatgggttgcgacttgaattcctgttcaatgccactcggaatggagtctaaagccatctctgatgcacagataaccgccagtagctactttacgaacatgtttgctacgtggtcaccctctaaggcaaggcttcatttgcaaggccggtctaatgcctggagacctcaggtgaacaacccgaaagaatggctccaggtggactttcagaagaccatgaaagtaacaggtgtcactactcagggagttaagtccttggatactagcatgtatgtgaaggagttccttatttcctcatcacaagatggccaccagtggaccctcttctttcagaatggtaaggtcaaagtgtttcagggcaatcaagacagcttcacacccgtggtgaacagtcttgatcctccactcttgacacgataccttcgaatccatccacagtcttgggagcaccagattgcattgcgcatggaagtacttggatgcgaggctcaggacctctac

SEQ ID NO: 1294 - protein, 1457 aa, synthetic construct
  REGION 1..1457: note = Variant of human B-domain deleted Factor VIII
MQIELSTCFFLCLLRFCFSATRRYYLGAVELSWDYMQSDLGELPVDARFPPRVPKSFPFNTSQVYKKTLFVEFTDHLFNIAKPRPPWMGLLGPTIQAEVYDTVVITLKNMASHPVSLHAVGVSYWKASEGAEYDDQTSQREKEDDKVFPGGSHTYVWQVLKENGPMASDPPCLTYSYLSHVDLVKDLNSGLIGALLVCREGSLAKEKTQTLHKFILLFAVFDEGKSWHSETKNSLMQDRDAASARAWPKMHTVNGYVNRTLPGLIGCHRKSVYWHVIGMGTTPEVHSIFLEGHTFLVRNHRQASLGISPITFLTAQTLLMDLGQFLLFCHIPSHQHDGMEAYVKVDSCPEEPQLRMKNNEEAEDYDDDLTDSEMDVVRFDDDNSPSIIQARSGAKKHPKTWVHYIAAEEEDWDYAPLVLAPDDRSYKSQYLNNGPQRIGRKYKKVRFMAYTDETFKTREAIQHESGILGPLLYGEVGDTLLIIFKNQASRPYNIYPHGITDVRPLYSRRLPKGVKHLKDFPILPGEIFKYKWTVTVEDGPTKSDPRCLTRYYSSFVNMERDLASGLIGPLLICYKESVDQRGNQIMSDKRNVILFSVFDENRSWYLTENIQRFLPNPAGVQLEDPEFQASNIMHSINGYVFDSLQLSVCLHEVAYWYILSIGAQTDFLSVFFSGYTFKHKMVYEDTLTLFPFSGETVFMSMENPGLWILGCHNSDFRNRGMTALLKVSSCDWNTGDYYEDSYEDISAYFDSKNNAIEPRSFSQNPPVLKRHQREGTRTTLQSDQEEIDYDDTIRVEMKKEDFDIYDEDENQSPRSFQKKTRHYFIAAVERLWDYGMSSSPHVLRNRAQSGSVPQFKKVVFQEFTDGSFTQPLYRGELNEHLGLLGPYIRAEVEDNIMVTFRNQASRPYSFYSSLISYEEDQRQGAEPRKNFVKPNETKTYFWKVQHHMAPTKDEFDCKAWAYFSDVDLEKDVHSGLIGPLLVCHTNTLNPAHGRQVTVQEFALFFTIFDETKSWYFTENMERNCRAPCNIQMEDPTFKENYRFHAINGYIMDTLPGLVMAQDQRIRWYLLSMGSNENIHSIHFSGHVFTVRKKEEYKMALYNLYPGVFETVEMLPSKAGIWRVECLIGEHLHAGMSTLFLVYSNKCQNPLGMASGHIRDFQITASGQYGQWAPKLARLHYSGSINAWSTKEPFSWIKVDLLAPMIIHGIKTQGARQKFSSLYISQFIIMYSLDGKKWQTYRGNSTGTDMVFFGNVDSSGIKHNIFNPPIIARYIRLHPTHYSIRSTLRMELMGCDLNSCSMPLGMESKAISDAQITASSYFTNMFATWSPSKARLHLQGRSNAWRPQVNNPKEWLQVDFQKTMKVTGVTTQGVKSLDTSMYVKEFLISSSQDGHQWTLFFQNGKVKVFQGNQDSFTPVVNSLDPPLLTRYLRIHPQSWEHQIALRMEVLGCEAQDLY

SEQ ID NO: 1295 - DNA, 4371 bp, synthetic construct
  misc_feature 1..4371: note = Variant of human B-domain deleted Factor VIII
  source 1..4371: mol_type = other DNA
atgcagattgaactgtctacctgcttcttcctctgtttgctgaggttctgctttagcgccactagacggtactaccttggcgctgtggagctgtcctgggactatatgcagagtgatttgggagagcttcccgtcgacgcacgatttcctcctcgcgttccaaagtcatttccctttaacacaagccaggtgtacaagaagacgctcttcgtcgaattcaccgatcacctgttcaatatcgccaaacccagaccaccatggatgggtcttttggggcctaccatacaagcggaggtgtatgacacagttgttatcactctcaagaacatggcttctcatccggtaagtcttcacgcagtgggcgtgtcctactggaaagcttcagaaggagccgagtatgatgatcagacatcccagagggagaaagaagacgacaaggtatttccaggtgggtctcatacctatgtgtggcaagtgctcaaagagaatggccctatggcaagcgatccgccgtgtttgacttacagctacctttcacacgttgacctcgtcaaggacctcaactccgggttgattggagccttgttggtatgcagggaaggatctcttgccaaagagaagacacagaccctccacaagtttatccttctctttgctgtgttcgatgagggcaaaagttggcatagcgaaacgaagaattccctcatgcaggatcgcgacgcagccagcgccagagcttggcccaagatgcacactgtgaacggatatgtcaataggacgcttcctggcttgattgggtgtcatcggaaaagtgtctactggcacgtgatcggaatggggacaacaccagaggtccactccatatttctcgaaggccataccttccttgttcgaaaccacagacaggcatccttggggatctctcccattacctttctcactgcccaaacgctccttatggacttgggtcagttccttctcttttgccatatcccgtcacaccagcatgatggtatggaagcttatgtgaaagtcgacagttgtcctgaggagccacagttgcgcatgaagaataatgaagaagccgaggattacgacgacgatctcaccgattctgagatggacgtggtgaggtttgatgacgacaactctccctccatcattcaagctcggagcggggcgaagaaacaccccaagacttgggtccactatatagcggcggaagaggaggattgggattacgctcctcttgtattggcaccagatgaccgctcatacaaaagccagtacctcaacaacggaccgcagagaattggccggaagtataagaaagtgcgatttatggcctatacagacgaaacctttaagacaagggaggccatccagcatgagagtgggattttgggacctcttctttacggcgaagttggtgataccctcctcatcatcttcaagaatcaagcttctcgcccctataacatttacccacacgggatcactgacgttaggcctttgtatagcagaagacttcccaaaggcgtgaagcatctcaaagacttccccattttgccaggcgagatctttaagtacaaatggaccgtcacagtggaagatggaccgactaaatcagaccctcgatgccttacgcggtactattcctccttcgtgaatatggagagagatttggcaagcggactcataggaccactcctcatctgttacaaggaatctgtagaccagaggggtaaccagattatgagtgataaacgcaatgtgatcctttttagcgtcttcgacgagaaccggtcctggtacttgaccgagaatatacaaaggttccttcccaaccccgcaggcgttcagttggaagaccctgagtttcaggccagcaatattatgcactcaatcaacggctatgtgtttgatagtctccagctttctgtttgcctccatgaagtagcctattggtacatcttgtcaattggtgctcaaacagacttcctctccgtcttcttctccggctacacctttaagcacaagatggtgtatgaggacactctcacactctttccattttctggagaaaccgtgttcatgagcatggagaatccaggcctttggatcttgggttgccacaacagtgattttcgcaatcggggaatgactgctctcctcaaagtcagcagctgtgattggaacacaggcgactattacgaagattcttacgaggacataagtgcctactttgactccaagaataacgccattgagcccagatcattctcccagaatcctcccgtgcttaaaaggcatcagcgcgaaggtaccagaactactcttcagtctgatcaagaggagattgactatgacgacaccattagcgtggaaatgaagaaggaggatttcgatatctatgacgaagatgagaaccagtctccgcggagctttcagaagaagacgcgacactacttcattgcagcagtcgaaaggctttgggactacggtatgtcatcatcccctcatgtgttgcgcaatagagctcagagtggaagtgttccacagttcaagaaagtcgtctttcaagagtttacagatggcagcttcacacagcctctctatcggggcgagcttaacgaacatttgggactccttggtccctatatccgagccgaagtggaggacaacattatggttacctttaggaatcaagcctctcgcccctacagcttctactcctccctcatcagttatgaggaggatcagagacaaggcgctgtgccacggaagaactttgtgaaaccgaatgagacgaagacctacttctggaaagtacagcaccacatggcccccacaaaagacgaattcgattgcaaagcatgggcgtatttttcagacgttgacttggagaaagatgtacattcaggacttattggtcctttgttggtgtgtcacactaacactctcaatccagcccatggcaggcaggtgacagtccaggaattcgctcttttctttaccatctttgatgagaccaagtcctggtacttcacggaaaacatggagcgcaattgcagagccccctgtaacatacagatggaggaccctacctttaaggaaaattatcggttccacgcaatcaacggatacattatggatacactccctggccttgtgatggctcaggaccaacgaatcaggtggtacctcctcagcatgggttctaatgagaacatacactccattcacttttcaggacatgtgttcactgtccggaagaaagaagagtataagatggccctctacaatttgtatccaggcgtgtttgagaccgttgaaatgcttccctctaaagctggcatctggagagtagagtgcttgatcggagaacatcttcacgcaggtatgagcaccttgttcctcgtgtacagcaacaaatgtcagaatccacttggcatggccagtggacacattcgcgactttcagatcacagcatctggccagtatggacaatgggccccaaagttggctcgcctccattactccggtagcataaatgcgtggtccactaaagaacctttcagctggattaaggtcgatcttcttgcccccatgatcatccacggcattaagacacagggagcgaggcagaaattctcctccctctacatctcacagttcattattatgtatagtttggacggcaagaagtggcaaacttatagaggtaacagtactggaacagacatggtgttcttcggcaacgttgatagctctggcatcaaacacaacatctttaatcctcccataatagctcggtacatcagattgcatccgacccactacagcattaggagtacactccgaatggagcttatgggttgcgacttgaattcctgttcaatgccactcggaatggagtctaaagccatctctgatgcacagataaccgccagtagctactttacgaacatgtttgctacgtggtcaccctctaaggcaaggcttcatttgcaaggccggtctaatgcctggagacctcaggtgaacaacccgaaagaatggctccaggtggactttcagaagaccatgaaagtaacaggtgtcactactcagggagttaagtccttggatactagcatgtatgtgaaggagttccttatttcctcatcacaagatggccaccagtggaccctcttctttcagaatggtaaggtcaaagtgtttcagggcaatcaagacagcttcacacccgtggtgaacagtcttgatcctccactcttgacacgataccttcgaatccatccacagtcttgggagcaccagattgcattgcgcatggaagtacttggatgcgaggctcaggacctctac

SEQ ID NO: 1296 - protein, 1457 aa, synthetic construct
  REGION 1..1457: note = Variant of human B-domain deleted Factor VIII
MQIELSTCFFLCLLRFCFSATRRYYLGAVELSWDYMQSDLGELPVDARFPPRVPKSFPFNTSQVYKKTLFVEFTDHLFNIAKPRPPWMGLLGPTIQAEVYDTVVITLKNMASHPVSLHAVGVSYWKASEGAEYDDQTSQREKEDDKVFPGGSHTYVWQVLKENGPMASDPPCLTYSYLSHVDLVKDLNSGLIGALLVCREGSLAKEKTQTLHKFILLFAVFDEGKSWHSETKNSLMQDRDAASARAWPKMHTVNGYVNRTLPGLIGCHRKSVYWHVIGMGTTPEVHSIFLEGHTFLVRNHRQASLGISPITFLTAQTLLMDLGQFLLFCHIPSHQHDGMEAYVKVDSCPEEPQLRMKNNEEAEDYDDDLTDSEMDVVRFDDDNSPSIIQARSGAKKHPKTWVHYIAAEEEDWDYAPLVLAPDDRSYKSQYLNNGPQRIGRKYKKVRFMAYTDETFKTREAIQHESGILGPLLYGEVGDTLLIIFKNQASRPYNIYPHGITDVRPLYSRRLPKGVKHLKDFPILPGEIFKYKWTVTVEDGPTKSDPRCLTRYYSSFVNMERDLASGLIGPLLICYKESVDQRGNQIMSDKRNVILFSVFDENRSWYLTENIQRFLPNPAGVQLEDPEFQASNIMHSINGYVFDSLQLSVCLHEVAYWYILSIGAQTDFLSVFFSGYTFKHKMVYEDTLTLFPFSGETVFMSMENPGLWILGCHNSDFRNRGMTALLKVSSCDWNTGDYYEDSYEDISAYFDSKNNAIEPRSFSQNPPVLKRHQREGTRTTLQSDQEEIDYDDTISVEMKKEDFDIYDEDENQSPRSFQKKTRHYFIAAVERLWDYGMSSSPHVLRNRAQSGSVPQFKKVVFQEFTDGSFTQPLYRGELNEHLGLLGPYIRAEVEDNIMVTFRNQASRPYSFYSSLISYEEDQRQGAVPRKNFVKPNETKTYFWKVQHHMAPTKDEFDCKAWAYFSDVDLEKDVHSGLIGPLLVCHTNTLNPAHGRQVTVQEFALFFTIFDETKSWYFTENMERNCRAPCNIQMEDPTFKENYRFHAINGYIMDTLPGLVMAQDQRIRWYLLSMGSNENIHSIHFSGHVFTVRKKEEYKMALYNLYPGVFETVEMLPSKAGIWRVECLIGEHLHAGMSTLFLVYSNKCQNPLGMASGHIRDFQITASGQYGQWAPKLARLHYSGSINAWSTKEPFSWIKVDLLAPMIIHGIKTQGARQKFSSLYISQFIIMYSLDGKKWQTYRGNSTGTDMVFFGNVDSSGIKHNIFNPPIIARYIRLHPTHYSIRSTLRMELMGCDLNSCSMPLGMESKAISDAQITASSYFTNMFATWSPSKARLHLQGRSNAWRPQVNNPKEWLQVDFQKTMKVTGVTTQGVKSLDTSMYVKEFLISSSQDGHQWTLFFQNGKVKVFQGNQDSFTPVVNSLDPPLLTRYLRIHPQSWEHQIALRMEVLGCEAQDLY

SEQ ID NO: 1297 - DNA, 4371 bp, synthetic construct
  misc_feature 1..4371: note = Variant of human B-domain deleted Factor VIII
  source 1..4371: mol_type = other DNA
atgcagattgaactgtctacctgcttcttcctctgtttgctgaggttctgctttagcgccactagacggtactaccttggcgctgtggagctgtcctgggactatatgcagagtgatttgggagagcttcccgtcgacgcacgatttcctcctcgcgttccaaagtcatttccctttaacacaagccaggtgtacaagaagacgctcttcgtcgaattcaccgatcacctgttcaatatcgccaaacccagaccaccatggatgggtcttttggggcctaccatacaagcggaggtgtatgacacagttgttatcactctcaagaacatggcttctcatccggtaagtcttcacgcagtgggcgtgtcctactggaaagcttcagaaggagccgagtatgatgatcagacatcccagagggagaaagaagacgacaaggtatttccaggtgggtctcatacctatgtgtggcaagtgctcaaagagaatggccctatggcaagcgatccgccgtgtttgacttacagctacctttcacacgttgacctcgtcaaggacctcaactccgggttgattggagccttgttggtatgcagggaaggatctcttgccaaagagaagacacagaccctccacaagtttatccttctctttgctgtgttcgatgagggcaaaagttggcatagcgaaacgaagaattccctcatgcaggatcgcgacgcagccagcgccagagcttggcccaagatgcacactgtgaacggatatgtcaataggacgcttcctggcttgattgggtgtcatcggaaaagtgtctactggcacgtgatcggaatggggacaacaccagaggtccactccatatttctcgaaggccataccttccttgttcgaaaccacagacaggcatccttggggatctctcccattacctttctcactgcccaaacgctccttatggacttgggtcagttccttctcttttgccatatcccgtcacaccagcatgatggtatggaagcttatgtgaaagtcgacagttgtcctgaggagccacagttgcgcatgaagaataatgaagaagccgaggattacgacgacgatctcaccgattctgagatggacgtggtgaggtttgatgacgacaactctccctccatcattcaagctcggagcggggcgaagaaacaccccaagacttgggtccactatatagcggcggaagaggaggattgggattacgctcctcttgtattggcaccagatgaccgctcatacaaaagccagtacctcaacaacggaccgcagagaattggccggaagtataagaaagtgcgatttatggcctatacagacgaaacctttaagacaagggaggccatccagcatgagagtgggattttgggacctcttctttacggcgaagttggtgataccctcctcatcatcttcaagaatcaagcttctcgcccctataacatttacccacacgggatcactgacgttaggcctttgtatagcagaagacttcccaaaggcgtgaagcatctcaaagacttccccattttgccaggcgagatctttaagtacaaatggaccgtcacagtggaagatggaccgactaaatcagaccctcgatgccttacgcggtactattcctccttcgtgaatatggagagagatttggcaagcggactcataggaccactcctcatctgttacaaggaatctgtagaccagaggggtaaccagattatgagtgataaacgcaatgtgatcctttttagcgtcttcgacgagaaccggtcctggtacttgaccgagaatatacaaaggttccttcccaaccccgcaggcgttcagttggaagaccctgagtttcaggccagcaatattatgcactcaatcaacggctatgtgtttgatagtctccagctttctgtttgcctccatgaagtagcctattggtacatcttgtcaattggtgctcaaacagacttcctctccgtcttcttctccggctacacctttaagcacaagatggtgtatgaggacactctcacactctttccattttctggagaaaccgtgttcatgagcatggagaatccaggcctttggatcttgggttgccacaacagtgattttcgcaatcggggaatgactgctctcctcaaagtcagcagctgtgattggaacacaggcgactattacgaagattcttacgaggacataagtgcctactttgactccaagaataaccctattgagcccagatcattctcccagaatcctcccgtgcttaaaaggcatcagcgcgaaggtaccagaactactcttcagtctgatcaagaggagattgactatgacgacaccattagcgtggaaatgaagaaggaggatttcgatatctatgacgaagatgagaaccagtctccgcggagctttcagaagaagacgcgacactacttcattgcagcagtcgaaaggctttgggactacggtatgtcatcatcccctcatgtgttgcgcaatagagctcagagtggaagtgttccacagttcaagaaagtcgtctttcaagagtttacagatggcagcttcacacagcctctctatcggggcgagcttaacgaacatttgggactccttggtccctatatccgagccgaagtggaggacaacattatggttacctttaggaatcaagcctctcgcccctacagcttctactcctccctcatcagttatgaggaggatcagagacaaggcgctgaaccacggaagaactttgtgaaaccgaatgagacgaagacctacttctggaaagtacagcaccacatggcccccacaaaagacgaattcgattgcaaagcatgggcgtatttttcagacgttgacttggagaaagatgtacattcaggacttattggtcctttgttggtgtgtcacactaacactctcaatccagcccatggcaggcaggtgacagtccaggaattcgctcttttctttaccatctttgatgagaccaagtcctggtacttcacggaaaacatggagcgcaattgcagagccccctgtaacatacagatggaggaccctacctttaaggaaaattatcggttccacgcaatcaacggatacattatggatacactccctggccttgtgatggctcaggaccaacgaatcaggtggtacctcctcagcatgggttctaatgagaacatacactccattcacttttcaggacatgtgttcactgtccggaagaaagaagagtataagatggccctctacaatttgtatccaggcgtgtttgagaccgttgaaatgcttccctctaaagctggcatctggagagtagagtgcttgatcggagaacatcttcacgcaggtatgagcaccttgttcctcgtgtacagcaacaaatgtcagaatccacttggcatggccagtggacacattcgcgactttcagatcacagcatctggccagtatggacaatgggccccaaagttggctcgcctccattactccggtagcataaatgcgtggtccactaaagaacctttcagctggattaaggtcgatcttcttgcccccatgatcatccacggcattaagacacagggagcgaggcagaaattctcctccctctacatctcacagttcattattatgtatagtttggacggcaagaagtggcaaacttatagaggtaacagtactggaacagacatggtgttcttcggcaacgttgatagctctggcatcaaacacaacatctttaatcctcccataatagctcggtacatcagattgcatccgacccactacagcattaggagtacactccgaatggagcttatgggttgcgacttgaattcctgttcaatgccactcggaatggagtctaaagccatctctgatgcacagataaccgccagtagctactttacgaacatgtttgctacgtggtcaccctctaaggcaaggcttcatttgcaaggccggtctaatgcctggagacctcaggtgaacaacccgaaagaatggctccaggtggactttcagaagaccatgaaagtaacaggtgtcactactcagggagttaagtccttggatactagcatgtatgtgaaggagttccttatttcctcatcacaagatggccaccagtggaccctcttctttcagaatggtaaggtcaaagtgtttcagggcaatcaagacagcttcacacccgtggtgaacagtcttgatcctccactcttgacacgataccttcgaatccatccacagtcttgggagcaccagattgcattgcgcatggaagtacttggatgcgaggctcaggacctctac

SEQ ID NO: 1298 - protein, 1457 aa, synthetic construct
  REGION 1..1457: note = Variant of human B-domain deleted Factor VIII
MQIELSTCFFLCLLRFCFSATRRYYLGAVELSWDYMQSDLGELPVDARFPPRVPKSFPFNTSQVYKKTLFVEFTDHLFNIAKPRPPWMGLLGPTIQAEVYDTVVITLKNMASHPVSLHAVGVSYWKASEGAEYDDQTSQREKEDDKVFPGGSHTYVWQVLKENGPMASDPPCLTYSYLSHVDLVKDLNSGLIGALLVCREGSLAKEKTQTLHKFILLFAVFDEGKSWHSETKNSLMQDRDAASARAWPKMHTVNGYVNRTLPGLIGCHRKSVYWHVIGMGTTPEVHSIFLEGHTFLVRNHRQASLGISPITFLTAQTLLMDLGQFLLFCHIPSHQHDGMEAYVKVDSCPEEPQLRMKNNEEAEDYDDDLTDSEMDVVRFDDDNSPSIIQARSGAKKHPKTWVHYIAAEEEDWDYAPLVLAPDDRSYKSQYLNNGPQRIGRKYKKVRFMAYTDETFKTREAIQHESGILGPLLYGEVGDTLLIIFKNQASRPYNIYPHGITDVRPLYSRRLPKGVKHLKDFPILPGEIFKYKWTVTVEDGPTKSDPRCLTRYYSSFVNMERDLASGLIGPLLICYKESVDQRGNQIMSDKRNVILFSVFDENRSWYLTENIQRFLPNPAGVQLEDPEFQASNIMHSINGYVFDSLQLSVCLHEVAYWYILSIGAQTDFLSVFFSGYTFKHKMVYEDTLTLFPFSGETVFMSMENPGLWILGCHNSDFRNRGMTALLKVSSCDWNTGDYYEDSYEDISAYFDSKNNPIEPRSFSQNPPVLKRHQREGTRTTLQSDQEEIDYDDTISVEMKKEDFDIYDEDENQSPRSFQKKTRHYFIAAVERLWDYGMSSSPHVLRNRAQSGSVPQFKKVVFQEFTDGSFTQPLYRGELNEHLGLLGPYIRAEVEDNIMVTFRNQASRPYSFYSSLISYEEDQRQGAEPRKNFVKPNETKTYFWKVQHHMAPTKDEFDCKAWAYFSDVDLEKDVHSGLIGPLLVCHTNTLNPAHGRQVTVQEFALFFTIFDETKSWYFTENMERNCRAPCNIQMEDPTFKENYRFHAINGYIMDTLPGLVMAQDQRIRWYLLSMGSNENIHSIHFSGHVFTVRKKEEYKMALYNLYPGVFETVEMLPSKAGIWRVECLIGEHLHAGMSTLFLVYSNKCQNPLGMASGHIRDFQITASGQYGQWAPKLARLHYSGSINAWSTKEPFSWIKVDLLAPMIIHGIKTQGARQKFSSLYISQFIIMYSLDGKKWQTYRGNSTGTDMVFFGNVDSSGIKHNIFNPPIIARYIRLHPTHYSIRSTLRMELMGCDLNSCSMPLGMESKAISDAQITASSYFTNMFATWSPSKARLHLQGRSNAWRPQVNNPKEWLQVDFQKTMKVTGVTTQGVKSLDTSMYVKEFLISSSQDGHQWTLFFQNGKVKVFQGNQDSFTPVVNSLDPPLLTRYLRIHPQSWEHQIALRMEVLGCEAQDLY

SEQ ID NO: 1299 - DNA, 4371 bp, synthetic construct
  misc_feature 1..4371: note = Variant of human B-domain deleted Factor VIII
  source 1..4371: mol_type = other DNA
atgcagattgaactgtctacctgcttcttcctctgtttgctgaggttctgctttagcgccactagacggtactaccttggcgctgtggagctgtcctgggactatatgcagagtgatttgggagagcttcccgtcgacgcacgatttcctcctcgcgttccaaagtcatttccctttaacacaagccaggtgtacaagaagacgctcttcgtcgaattcaccgatcacctgttcaatatcgccaaacccagaccaccatggatgggtcttttggggcctaccatacaagcggaggtgtatgacacagttgttatcactctcaagaacatggcttctcatccggtaagtcttcacgcagtgggcgtgtcctactggaaagcttcagaaggagccgagtatgatgatcagacatcccagagggagaaagaagacgacaaggtatttccaggtgggtctcatacctatgtgtggcaagtgctcaaagagaatggccctatggcaagcgatccgccgtgtttgacttacagctacctttcacacgttgacctcgtcaaggacctcaactccgggttgattggagccttgttggtatgcagggaaggatctcttgccaaagagaagacacagaccctccacaagtttatccttctctttgctgtgttcgatgagggcaaaagttggcatagcgaaacgaagaattccctcatgcaggatcgcgacgcagccagcgccagagcttggcccaagatgcacactgtgaacggatatgtcaataggacgcttcctggcttgattgggtgtcatcggaaaagtgtctactggcacgtgatcggaatggggacaacaccagaggtccactccatatttctcgaaggccataccttccttgttcgaaaccacagacaggcatccttggggatctctcccattacctttctcactgcccaaacgctccttatggacttgggtcagttccttctcttttgccatatcccgtcacaccagcatgatggtatggaagcttatgtgaaagtcgacagttgtcctgaggagccacagttgcgcatgaagaataatgaagaagccgaggattacgacgacgatctcaccgattctgagatggacgtggtgaggtttgatgacgacaactctccctccatcattcaagctcggagcggggcgaagaaacaccccaagacttgggtccactatatagcggcggaagaggaggattgggattacgctcctcttgtattggcaccagatgaccgctcatacaaaagccagtacctcaacaacggaccgcagagaattggccggaagtataagaaagtgcgatttatggcctatacagacgaaacctttaagacaagggaggccatccagcatgagagtgggattttgggacctcttctttacggcgaagttggtgataccctcctcatcatcttcaagaatcaagcttctcgcccctataacatttacccacacgggatcactgacgttaggcctttgtatagcagaagacttcccaaaggcgtgaagcatctcaaagacttccccattttgccaggcgagatctttaagtacaaatggaccgtcacagtggaagatggaccgactaaatcagaccctcgatgccttacgcggtactattcctccttcgtgaatatggagagagatttggcaagcggactcataggaccactcctcatctgttacaaggaatctgtagaccagaggggtaaccagattatgagtgataaacgcaatgtgatcctttttagcgtcttcgacgagaaccggtcctggtacttgaccgagaatatacaaaggttccttcccaaccccgcaggcgttcagttggaagaccctgagtttcaggccagcaatattatgcactcaatcaacggctatgtgtttgatagtctccagctttctgtttgcctccatgaagtagcctattggtacatcttgtcaattggtgctcaaacagacttcctctccgtcttcttctccggctacacctttaagcacaagatggtgtatgaggacactctcacactctttccattttctggagaaaccgtgttcatgagcatggagaatccaggcctttggatcttgggttgccacaacagtgattttcgcaatcggggaatgactgctctcctcaaagtcagcagctgtgattggaacacaggcgactattacgaagattcttacgaggacataagtgcctactttgactccaagaataacgccattgagcccagatcattctcccagaatcctcccgtgcttaaaaggcatcagcgcgaaggtaccagaactactcttcagtctgatcaagaggagattgactatgacgacaccattagcgtggaaatgaagaaggaggatttcgatatctatgacgaagatgagaaccagtctccgcggagctttcagaagaagacgcgacactacttcattgcagcagtcgaaaggctttgggactacggtatgtcatcatcccctcatgtgttgcgcaatagagctcagagtggaagtgttccacagttcaagaaagtcgtctttcaagagtttacagatggcagcttcacacagcctctctatcggggcgagcttaacgaacatttgggactccttggtccctatatccgagccgaagtggaggacaacattatggttacctttaggaatcaagcctctcgcccctacagcttctactcctccctcatcagttatgaggaggattggagacaaggcgctgaaccacggaagaactttgtgaaaccgaatgagacgaagacctacttctggaaagtacagcaccacatggcccccacaaaagacgaattcgattgcaaagcatgggcgtatttttcagacgttgacttggagaaagatgtacattcaggacttattggtcctttgttggtgtgtcacactaacactctcaatccagcccatggcaggcaggtgacagtccaggaattcgctcttttctttaccatctttgatgagaccaagtcctggtacttcacggaaaacatggagcgcaattgcagagccccctgtaacatacagatggaggaccctacctttaaggaaaattatcggttccacgcaatcaacggatacattatggatacactccctggccttgtgatggctcaggaccaacgaatcaggtggtacctcctcagcatgggttctaatgagaacatacactccattcacttttcaggacatgtgttcactgtccggaagaaagaagagtataagatggccctctacaatttgtatccaggcgtgtttgagaccgttgaaatgcttccctctaaagctggcatctggagagtagagtgcttgatcggagaacatcttcacgcaggtatgagcaccttgttcctcgtgtacagcaacaaatgtcagaatccacttggcatggccagtggacacattcgcgactttcagatcacagcatctggccagtatggacaatgggccccaaagttggctcgcctccattactccggtagcataaatgcgtggtccactaaagaacctttcagctggattaaggtcgatcttcttgcccccatgatcatccacggcattaagacacagggagcgaggcagaaattctcctccctctacatctcacagttcattattatgtatagtttggacggcaagaagtggcaaacttatagaggtaacagtactggaacagacatggtgttcttcggcaacgttgatagctctggcatcaaacacaacatctttaatcctcccataatagctcggtacatcagattgcatccgacccactacagcattaggagtacactccgaatggagcttatgggttgcgacttgaattcctgttcaatgccactcggaatggagtctaaagccatctctgatgcacagataaccgccagtagctactttacgaacatgtttgctacgtggtcaccctctaaggcaaggcttcatttgcaaggccggtctaatgcctggagacctcaggtgaacaacccgaaagaatggctccaggtggactttcagaagaccatgaaagtaacaggtgtcactactcagggagttaagtccttggatactagcatgtatgtgaaggagttccttatttcctcatcacaagatggccaccagtggaccctcttctttcagaatggtaaggtcaaagtgtttcagggcaatcaagacagcttcacacccgtggtgaacagtcttgatcctccactcttgacacgataccttcgaatccatccacagtcttgggagcaccagattgcattgcgcatggaagtacttggatgcgaggctcaggacctctac

SEQ ID NO: 1300 - protein, 1457 aa, synthetic construct
  REGION 1..1457: note = Variant of human B-domain deleted Factor VIII
MQIELSTCFFLCLLRFCFSATRRYYLGAVELSWDYMQSDLGELPVDARFPPRVPKSFPFNTSQVYKKTLFVEFTDHLFNIAKPRPPWMGLLGPTIQAEVYDTVVITLKNMASHPVSLHAVGVSYWKASEGAEYDDQTSQREKEDDKVFPGGSHTYVWQVLKENGPMASDPPCLTYSYLSHVDLVKDLNSGLIGALLVCREGSLAKEKTQTLHKFILLFAVFDEGKSWHSETKNSLMQDRDAASARAWPKMHTVNGYVNRTLPGLIGCHRKSVYWHVIGMGTTPEVHSIFLEGHTFLVRNHRQASLGISPITFLTAQTLLMDLGQFLLFCHIPSHQHDGMEAYVKVDSCPEEPQLRMKNNEEAEDYDDDLTDSEMDVVRFDDDNSPSIIQARSGAKKHPKTWVHYIAAEEEDWDYAPLVLAPDDRSYKSQYLNNGPQRIGRKYKKVRFMAYTDETFKTREAIQHESGILGPLLYGEVGDTLLIIFKNQASRPYNIYPHGITDVRPLYSRRLPKGVKHLKDFPILPGEIFKYKWTVTVEDGPTKSDPRCLTRYYSSFVNMERDLASGLIGPLLICYKESVDQRGNQIMSDKRNVILFSVFDENRSWYLTENIQRFLPNPAGVQLEDPEFQASNIMHSINGYVFDSLQLSVCLHEVAYWYILSIGAQTDFLSVFFSGYTFKHKMVYEDTLTLFPFSGETVFMSMENPGLWILGCHNSDFRNRGMTALLKVSSCDWNTGDYYEDSYEDISAYFDSKNNAIEPRSFSQNPPVLKRHQREGTRTTLQSDQEEIDYDDTISVEMKKEDFDIYDEDENQSPRSFQKKTRHYFIAAVERLWDYGMSSSPHVLRNRAQSGSVPQFKKVVFQEFTDGSFTQPLYRGELNEHLGLLGPYIRAEVEDNIMVTFRNQASRPYSFYSSLISYEEDWRQGAEPRKNFVKPNETKTYFWKVQHHMAPTKDEFDCKAWAYFSDVDLEKDVHSGLIGPLLVCHTNTLNPAHGRQVTVQEFALFFTIFDETKSWYFTENMERNCRAPCNIQMEDPTFKENYRFHAINGYIMDTLPGLVMAQDQRIRWYLLSMGSNENIHSIHFSGHVFTVRKKEEYKMALYNLYPGVFETVEMLPSKAGIWRVECLIGEHLHAGMSTLFLVYSNKCQNPLGMASGHIRDFQITASGQYGQWAPKLARLHYSGSINAWSTKEPFSWIKVDLLAPMIIHGIKTQGARQKFSSLYISQFIIMYSLDGKKWQTYRGNSTGTDMVFFGNVDSSGIKHNIFNPPIIARYIRLHPTHYSIRSTLRMELMGCDLNSCSMPLGMESKAISDAQITASSYFTNMFATWSPSKARLHLQGRSNAWRPQVNNPKEWLQVDFQKTMKVTGVTTQGVKSLDTSMYVKEFLISSSQDGHQWTLFFQNGKVKVFQGNQDSFTPVVNSLDPPLLTRYLRIHPQSWEHQIALRMEVLGCEAQDLY

SEQ ID NO: 1301 - DNA, 4371 bp, synthetic construct
  misc_feature 1..4371: note = Variant of human B-domain deleted Factor VIII
  source 1..4371: mol_type = other DNA
atgcagattgaactgtctacctgcttcttcctctgtttgctgaggttctgctttagcgccactagacggtactaccttggcgctgtggagctgtcctgggactatatgcagagtgatttgggagagcttcccgtcgacgcacgatttcctcctcgcgttccaaagtcatttccctttaacacaagccaggtgtacaagaagacgctcttcgtcgaattcaccgatcacctgttcaatatcgccaaacccagaccaccatggatgggtcttttggggcctaccatacaagcggaggtgtatgacacagttgttatcactctcaagaacatggcttctcatccggtaagtcttcacgcagtgggcgtgtcctactggaaagcttcagaaggagccgagtatgatgatcagacatcccagagggagaaagaagacgacaaggtatttccaggtgggtctcatacctatgtgtggcaagtgctcaaagagaatggccctatggcaagcgatccgccgtgtttgacttacagctacctttcacacgttgacctcgtcaaggacctcaactccgggttgattggagccttgttggtatgcagggaaggatctcttgccaaagagaagacacagaccctccacaagtttatccttctctttgctgtgttcgatgagggcaaaagttggcatagcgaaacgaagaattccctcatgcaggatcgcgacgcagccagcgccagagcttggcccaagatgcacactgtgaacggatatgtcaataggacgcttcctggcttgattgggtgtcatcggaaaagtgtctactggcacgtgatcggaatggggacaacaccagaggtccactccatatttctcgaaggccataccttccttgttcgaaaccacagacaggcatccttggggatctctcccattacctttctcactgcccaaacgctccttatggacttgggtcagttccttctcttttgccatatcccgtcacaccagcatgatggtatggaagcttatgtgaaagtcgacagttgtcctgaggagccacagttgcgcatgaagaataatgaagaagccgaggattacgacgacgatctcaccgattctgagatggacgtggtgaggtttgatgacgacaactctccctccatcattcaagctcggagcggggcgaagaaacaccccaagacttgggtccactatatagcggcggaagaggaggattgggattacgctcctcttgtattggcaccagatgaccgctcatacaaaagccagtacctcaacaacggaccgcagagaattggccggaagtataagaaagtgcgatttatggcctatacagacgaaacctttaagacaagggaggccatccagcatgagagtgggattttgggacctcttctttacggcgaagttggtgataccctcctcatcatcttcaagaatcaagcttctcgcccctataacatttacccacacgggatcactgacgttaggcctttgtatagcagaagacttcccaaaggcgtgaagcatctcaaagacttccccattttgccaggcgagatctttaagtacaaatggaccgtcacagtggaagatggaccgactaaatcagaccctcgatgccttacgcggtactattcctccttcgtgaatatggagagagatttggcaagcggactcataggaccactcctcatctgttacaaggaatctgtagaccagaggggtaaccagattatgagtgataaacgcaatgtgatcctttttagcgtcttcgacgagaaccggtcctggtacttgaccgagaatatacaaaggttccttcccaaccccgcaggcgttcagttggaagaccctgagtttcaggccagcaatattatgcactcaatcaacggctatgtgtttgatagtctccagctttctgtttgcctccatgaagtagcctattggtacatcttgtcaattggtgctcaaacagacttcctctccgtcttcttctccggctacacctttaagcacaagatggtgtatgaggacactctcacactctttccattttctggagaaaccgtgttcatgagcatggagaatccaggcctttggatcttgggttgccacaacagtgattttcgcaatcggggaatgactgctctcctcaaagtcagcagctgtgattggaacacaggcgactattacgaagattcttacgaggacataagtgcctactttgactccaagaataacgccattgagcccagatcattctcccagaatcctcccgtgcttaaaaggcatcagcgcgaaggtaccagaactactcttcagtctgatcaagaggagattgactatgacgacaccattagcgtggaaatgaagaaggaggcgttcgatatctatgacgaagatgagaaccagtctccgcggagctttcagaagaagacgcgacactacttcattgcagcagtcgaaaggctttgggactacggtatgtcatcatcccctcatgtgttgcgcaatagagctcagagtggaagtgttccacagttcaagaaagtcgtctttcaagagtttacagatggcagcttcacacagcctctctatcggggcgagcttaacgaacatttgggactccttggtccctatatccgagccgaagtggaggacaacattatggttacctttaggaatcaagcctctcgcccctacagcttctactcctccctcatcagttatgaggaggatcagagacaaggcgctgaaccacggaagaactttgtgaaaccgaatgagacgaagacctacttctggaaagtacagcaccacatggcccccacaaaagacgaattcgattgcaaagcatgggcgtatttttcagacgttgacttggagaaagatgtacattcaggacttattggtcctttgttggtgtgtcacactaacactctcaatccagcccatggcaggcaggtgacagtccaggaattcgctcttttctttaccatctttgatgagaccaagtcctggtacttcacggaaaacatggagcgcaattgcagagccccctgtaacatacagatggaggaccctacctttaaggaaaattatcggttccacgcaatcaacggatacattatggatacactccctggccttgtgatggctcaggaccaacgaatcaggtggtacctcctcagcatgggttctaatgagaacatacactccattcacttttcaggacatgtgttcactgtccggaagaaagaagagtataagatggccctctacaatttgtatccaggcgtgtttgagaccgttgaaatgcttccctctaaagctggcatctggagagtagagtgcttgatcggagaacatcttcacgcaggtatgagcaccttgttcctcgtgtacagcaacaaatgtcagaatccacttggcatggccagtggacacattcgcgactttcagatcacagcatctggccagtatggacaatgggccccaaagttggctcgcctccattactccggtagcataaatgcgtggtccactaaagaacctttcagctggattaaggtcgatcttcttgcccccatgatcatccacggcattaagacacagggagcgaggcagaaattctcctccctctacatctcacagttcattattatgtatagtttggacggcaagaagtggcaaacttatagaggtaacagtactggaacagacatggtgttcttcggcaacgttgatagctctggcatcaaacacaacatctttaatcctcccataatagctcggtacatcagattgcatccgacccactacagcattaggagtacactccgaatggagcttatgggttgcgacttgaattcctgttcaatgccactcggaatggagtctaaagccatctctgatgcacagataaccgccagtagctactttacgaacatgtttgctacgtggtcaccctctaaggcaaggcttcatttgcaaggccggtctaatgcctggagacctcaggtgaacaacccgaaagaatggctccaggtggactttcagaagaccatgaaagtaacaggtgtcactactcagggagttaagtccttggatactagcatgtatgtgaaggagttccttatttcctcatcacaagatggccaccagtggaccctcttctttcagaatggtaaggtcaaagtgtttcagggcaatcaagacagcttcacacccgtggtgaacagtcttgatcctccactcttgacacgataccttcgaatccatccacagtcttgggagcaccagattgcattgcgcatggaagtacttggatgcgaggctcaggacctctac

SEQ ID NO: 1302 - protein, 1457 aa, synthetic construct
  REGION 1..1457: note = Variant of human B-domain deleted Factor VIII
MQIELSTCFFLCLLRFCFSATRRYYLGAVELSWDYMQSDLGELPVDARFPPRVPKSFPFNTSQVYKKTLFVEFTDHLFNIAKPRPPWMGLLGPTIQAEVYDTVVITLKNMASHPVSLHAVGVSYWKASEGAEYDDQTSQREKEDDKVFPGGSHTYVWQVLKENGPMASDPPCLTYSYLSHVDLVKDLNSGLIGALLVCREGSLAKEKTQTLHKFILLFAVFDEGKSWHSETKNSLMQDRDAASARAWPKMHTVNGYVNRTLPGLIGCHRKSVYWHVIGMGTTPEVHSIFLEGHTFLVRNHRQASLGISPITFLTAQTLLMDLGQFLLFCHIPSHQHDGMEAYVKVDSCPEEPQLRMKNNEEAEDYDDDLTDSEMDVVRFDDDNSPSIIQARSGAKKHPKTWVHYIAAEEEDWDYAPLVLAPDDRSYKSQYLNNGPQRIGRKYKKVRFMAYTDETFKTREAIQHESGILGPLLYGEVGDTLLIIFKNQASRPYNIYPHGITDVRPLYSRRLPKGVKHLKDFPILPGEIFKYKWTVTVEDGPTKSDPRCLTRYYSSFVNMERDLASGLIGPLLICYKESVDQRGNQIMSDKRNVILFSVFDENRSWYLTENIQRFLPNPAGVQLEDPEFQASNIMHSINGYVFDSLQLSVCLHEVAYWYILSIGAQTDFLSVFFSGYTFKHKMVYEDTLTLFPFSGETVFMSMENPGLWILGCHNSDFRNRGMTALLKVSSCDWNTGDYYEDSYEDISAYFDSKNNAIEPRSFSQNPPVLKRHQREGTRTTLQSDQEEIDYDDTISVEMKKEAFDIYDEDENQSPRSFQKKTRHYFIAAVERLWDYGMSSSPHVLRNRAQSGSVPQFKKVVFQEFTDGSFTQPLYRGELNEHLGLLGPYIRAEVEDNIMVTFRNQASRPYSFYSSLISYEEDQRQGAEPRKNFVKPNETKTYFWKVQHHMAPTKDEFDCKAWAYFSDVDLEKDVHSGLIGPLLVCHTNTLNPAHGRQVTVQEFALFFTIFDETKSWYFTENMERNCRAPCNIQMEDPTFKENYRFHAINGYIMDTLPGLVMAQDQRIRWYLLSMGSNENIHSIHFSGHVFTVRKKEEYKMALYNLYPGVFETVEMLPSKAGIWRVECLIGEHLHAGMSTLFLVYSNKCQNPLGMASGHIRDFQITASGQYGQWAPKLARLHYSGSINAWSTKEPFSWIKVDLLAPMIIHGIKTQGARQKFSSLYISQFIIMYSLDGKKWQTYRGNSTGTDMVFFGNVDSSGIKHNIFNPPIIARYIRLHPTHYSIRSTLRMELMGCDLNSCSMPLGMESKAISDAQITASSYFTNMFATWSPSKARLHLQGRSNAWRPQVNNPKEWLQVDFQKTMKVTGVTTQGVKSLDTSMYVKEFLISSSQDGHQWTLFFQNGKVKVFQGNQDSFTPVVNSLDPPLLTRYLRIHPQSWEHQIALRMEVLGCEAQDLY

SEQ ID NO: 1303 - DNA, 4371 bp, synthetic construct
  misc_feature 1..4371: note = Variant of human B-domain deleted Factor VIII
  source 1..4371: mol_type = other DNA
atgcagattgaactgtctacctgcttcttcctctgtttgctgaggttctgctttagcgccactagacggtactaccttggcgctgtggagctgtcctgggactatatgcagagtgatttgggagagcttcccgtcgacgcacgatttcctcctcgcgttccaaagtcatttccctttaacacaagccaggtgtacaagaagacgctcttcgtcgaattcaccgatcacctgttcaatatcgccaaacccagaccaccatggatgggtcttttggggcctaccatacaagcggaggtgtatgacacagttgttatcactctcaagaacatggcttctcatccggtaagtcttcacgcagtgggcgtgtcctactggaaagcttcagaaggagccgagtatgatgatcagacatcccagagggagaaagaagacgacaaggtatttccaggtgggtctcatacctatgtgtggcaagtgctcaaagagaatggccctatggcaagcgatccgccgtgtttgacttacagctacctttcacacgttgacctcgtcaaggacctcaactccgggttgattggagccttgttggtatgcagggaaggatctcttgccaaagagaagacacagaccctccacaagtttatccttctctttgctgtgttcgatgagggcaaaagttggcatagcgaaacgaagaattccctcatgcaggatcgcgacgcagccagcgccagagcttggcccaagatgcacactgtgaacggatatgtcaataggacgcttcctggcttgattgggtgtcatcggaaaagtgtctactggcacgtgatcggaatggggacaacaccagaggtccactccatatttctcgaaggccataccttccttgttcgaaaccacagacaggcatccttggggatctctcccattacctttctcactgcccaaacgctccttatggacttgggtcagttccttctcttttgccatatcccgtcacaccagcatgatggtatggaagcttatgtgaaagtcgacagttgtcctgaggagccacagttgcgcatgaagaataatgaagaagccgaggattacgacgacgatctcaccgattctgagatggacgtggtgaggtttgatgacgacaactctccctccatcattcaagctcggagcggggcgaagaaacaccccaagacttgggtccactatatagcggcggaagaggaggattgggattacgctcctcttgtattggcaccagatgaccgctcatacaaaagccagtacctcaacaacggaccgcagagaattggccggaagtataagaaagtgcgatttatggcctatacagacgaaacctttaagacaagggaggccatccagcatgagagtgggattttgggacctcttctttacggcgaagttggtgataccctcctcatcatcttcaagaatcaagcttctcgcccctataacatttacccacacgggatcactgacgttaggcctttgtatagcagaagacttcccaaaggcgtgaagcatctcaaagacttccccattttgccaggcgagatctttaagtacaaatggaccgtcacagtggaagatggaccgactaaatcagaccctcgatgccttacgcggtactattcctccttcgtgaatatggagagagatttggcaagcggactcataggaccactcctcatctgttacaaggaatctgtagaccagaggggtaaccagattatgagtgataaacgcaatgtgatcctttttagcgtcttcgacgagaaccggtcctggtacttgaccgagaatatacaaaggttccttcccaaccccgcaggcgttcagttggaagaccctgagtttcaggccagcaatattatgcactcaatcaacggctatgtgtttgatagtctccagctttctgtttgcctccatgaagtagcctattggtacatcttgtcaattggtgctcaaacagacttcctctccgtcttcttctccggctacacctttaagcacaagatggtgtatgaggacactctcacactctttccattttctggagaaaccgtgttcatgagcatggagaatccaggcctttggatcttgggttgccacaacagtgattttcgcaatcggggaatgactgctctcctcaaagtcagcagctgtgattggaacacaggcgactattacgaagattcttacgaggacataagtgcctactttgactccaagaataacgccattgagcccagatcattctcccagaatcctcccgtgcttaaaaggcatcagcgcgaaggtaccagaactactcttcagtctgatcaagaggagattgactatgacgacaccattagcgtggaaatgaagaaggaggatttcgatatctatgacgaagatgagaaccagtctccgcggagctttcagaagaagacgcgacactacttcattgcagcagtcgaaaggctttgggactacggtatgtcatcatcccctcatgtgttgcgcaatagagctcagagtggaagtgttccacagttcaagaaagtcgtctttcaagagtttacagatggcagcttcacacagcctctctatcggggcgagcttaacgaacatttgggactccttggtccctatatccgagccgaagtggaggacaacattatggttacctttaggaatcaagcctctcgcccctacagcttctactcctccctcatcagttatgaggaggatcagagacaaggcgctgaaccacggaagaactttgtgaaaccgaatgagacgaagacctacttctggaaagtacagcaccacatggcccccacaaaagacgaattcgattgcaaagcatgggcgtatttttcagacgttgacttggagaaagatgtacattcaggacttattggtcctttgttggtgtgtcacactaacactctcaatccagcccatggcaggcaggtgacagtccaggaattcgctcttttctttaccatctttgatgagaccaagtcctggtacttcacggaaaacatggagcgcaattgcagagccccctgtaacatacagatggaggaccctacctttaaggaaaattatcggttccacgcaatcaacggatacattatggatacactccctggccttgtgatggctcaggaccaacgaatcaggtggtacctcctcagcatgggttctaatgagaacatacactccattcacttttcaggacatgtgttcactgtccggaagaaaagtgagtataagatggccctctacaatttgtatccaggcgtgtttgagaccgttgaaatgcttccctctaaagctggcatctggagagtagagtgcttgatcggagaacatcttcacgcaggtatgagcaccttgttcctcgtgtacagcaacaaatgtcagaatccacttggcatggccagtggacacattcgcgactttcagatcacagcatctggccagtatggacaatgggccccaaagttggctcgcctccattactccggtagcataaatgcgtggtccactaaagaacctttcagctggattaaggtcgatcttcttgcccccatgatcatccacggcattaagacacagggagcgaggcagaaattctcctccctctacatctcacagttcattattatgtatagtttggacggcaagaagtggcaaacttatagaggtaacagtactggaacagacatggtgttcttcggcaacgttgatagctctggcatcaaacacaacatctttaatcctcccataatagctcggtacatcagattgcatccgacccactacagcattaggagtacactccgaatggagcttatgggttgcgacttgaattcctgttcaatgccactcggaatggagtctaaagccatctctgatgcacagataaccgccagtagctactttacgaacatgtttgctacgtggtcaccctctaaggcaaggcttcatttgcaaggccggtctaatgcctggagacctcaggtgaacaacccgaaagaatggctccaggtggactttcagaagaccatgaaagtaacaggtgtcactactcagggagttaagtccttggatactagcatgtatgtgaaggagttccttatttcctcatcacaagatggccaccagtggaccctcttctttcagaatggtaaggtcaaagtgtttcagggcaatcaagacagcttcacacccgtggtgaacagtcttgatcctccactcttgacacgataccttcgaatccatccacagtcttgggagcaccagattgcattgcgcatggaagtacttggatgcgaggctcaggacctctac

SEQ ID NO: 1304 - protein, 1457 aa, synthetic construct
  REGION 1..1457: note = Variant of human B-domain deleted Factor VIII
MQIELSTCFFLCLLRFCFSATRRYYLGAVELSWDYMQSDLGELPVDARFPPRVPKSFPFNTSQVYKKTLFVEFTDHLFNIAKPRPPWMGLLGPTIQAEVYDTVVITLKNMASHPVSLHAVGVSYWKASEGAEYDDQTSQREKEDDKVFPGGSHTYVWQVLKENGPMASDPPCLTYSYLSHVDLVKDLNSGLIGALLVCREGSLAKEKTQTLHKFILLFAVFDEGKSWHSETKNSLMQDRDAASARAWPKMHTVNGYVNRTLPGLIGCHRKSVYWHVIGMGTTPEVHSIFLEGHTFLVRNHRQASLGISPITFLTAQTLLMDLGQFLLFCHIPSHQHDGMEAYVKVDSCPEEPQLRMKNNEEAEDYDDDLTDSEMDVVRFDDDNSPSIIQARSGAKKHPKTWVHYIAAEEEDWDYAPLVLAPDDRSYKSQYLNNGPQRIGRKYKKVRFMAYTDETFKTREAIQHESGILGPLLYGEVGDTLLIIFKNQASRPYNIYPHGITDVRPLYSRRLPKGVKHLKDFPILPGEIFKYKWTVTVEDGPTKSDPRCLTRYYSSFVNMERDLASGLIGPLLICYKESVDQRGNQIMSDKRNVILFSVFDENRSWYLTENIQRFLPNPAGVQLEDPEFQASNIMHSINGYVFDSLQLSVCLHEVAYWYILSIGAQTDFLSVFFSGYTFKHKMVYEDTLTLFPFSGETVFMSMENPGLWILGCHNSDFRNRGMTALLKVSSCDWNTGDYYEDSYEDISAYFDSKNNAIEPRSFSQNPPVLKRHQREGTRTTLQSDQEEIDYDDTISVEMKKEDFDIYDEDENQSPRSFQKKTRHYFIAAVERLWDYGMSSSPHVLRNRAQSGSVPQFKKVVFQEFTDGSFTQPLYRGELNEHLGLLGPYIRAEVEDNIMVTFRNQASRPYSFYSSLISYEEDQRQGAEPRKNFVKPNETKTYFWKVQHHMAPTKDEFDCKAWAYFSDVDLEKDVHSGLIGPLLVCHTNTLNPAHGRQVTVQEFALFFTIFDETKSWYFTENMERNCRAPCNIQMEDPTFKENYRFHAINGYIMDTLPGLVMAQDQRIRWYLLSMGSNENIHSIHFSGHVFTVRKKSEYKMALYNLYPGVFETVEMLPSKAGIWRVECLIGEHLHAGMSTLFLVYSNKCQNPLGMASGHIRDFQITASGQYGQWAPKLARLHYSGSINAWSTKEPFSWIKVDLLAPMIIHGIKTQGARQKFSSLYISQFIIMYSLDGKKWQTYRGNSTGTDMVFFGNVDSSGIKHNIFNPPIIARYIRLHPTHYSIRSTLRMELMGCDLNSCSMPLGMESKAISDAQITASSYFTNMFATWSPSKARLHLQGRSNAWRPQVNNPKEWLQVDFQKTMKVTGVTTQGVKSLDTSMYVKEFLISSSQDGHQWTLFFQNGKVKVFQGNQDSFTPVVNSLDPPLLTRYLRIHPQSWEHQIALRMEVLGCEAQDLY

SEQ ID NO: 1305 - DNA, 4371 bp, synthetic construct
  misc_feature 1..4371: note = Variant of human B-domain deleted Factor VIII
  source 1..4371: mol_type = other DNA
atgcagattgaactgtctacctgcttcttcctctgtttgctgaggttctgctttagcgccactagacggtactaccttggcgctgtggagctgtcctgggactatatgcagagtgatttgggagagcttcccgtcgacgcacgatttcctcctcgcgttccaaagtcatttccctttaacacaagccaggtgtacaagaagacgctcttcgtcgaattcaccgatcacctgttcaatatcgccaaacccagaccaccatggatgggtcttttggggcctaccatacaagcggaggtgtatgacacagttgttatcactctcaagaacatggcttctcatccggtaagtcttcacgcagtgggcgtgtcctactggaaagcttcagaaggagccgagtatgatgatcagacatcccagagggagaaagaagacgacaaggtatttccaggtgggtctcatacctatgtgtggcaagtgctcaaagagaatggccctatggcaagcgatccgccgtgtttgacttacagctacctttcacacgttgacctcgtcaaggacctcaactccgggttgattggagccttgttggtatgcagggaaggatctcttgccaaagagaagacacagaccctccacaagtttatccttctctttgctgtgttcgatgagggcaaaagttggcatagcgaaacgaagaattccctcatgcaggatcgcgacgcagccagcgccagagcttggcccaagatgcacactgtgaacggatatgtcaataggacgcttcctggcttgattgggtgtcatcggaaaagtgtctactggcacgtgatcggaatggggacaacaccagaggtccactccatatttctcgaaggccataccttccttgttcgaaaccacagacaggcatccttggggatctctcccattacctttctcactgcccaaacgctccttatggacttgggtcagttccttctcttttgccatatcccgtcacaccagcatgatggtatggaagcttatgtgaaagtcgacagttgtcctgaggagccacagttgcgcatgaagaataatgaagaagccgaggattacgacgacgatctcaccgattctgagatggacgtggtgaggtttgatgacgacaactctccctccatcattcaagctcggagcggggcgaagaaacaccccaagacttgggtccactatatagcggcggaagaggaggattgggattacgctcctcttgtattggcaccagatgaccgctcatacaaaagccagtacctcaacaacggaccgcagagaattggccggaagtataagaaagtgcgatttatggcctatacagacgaaacctttaagacaagggaggccatccagcatgagagtgggattttgggacctcttctttacggcgaagttggtgataccctcctcatcatcttcaagaatcaagcttctcgcccctataacatttacccacacgggatcactgacgttaggcctttgtatagcagaagacttcccaaaggcgtgaagcatctcaaagacttccccattttgccaggcgagatctttaagtacaaatggaccgtcacagtggaagatggaccgactaaatcagaccctcgatgccttacgcggtactattcctccttcgtgaatatggagagagatttggcaagcggactcataggaccactcctcatctgttacaaggaatctgtagaccagaggggtaaccagattatgagtgataaacgcaatgtgatcctttttagcgtcttcgacgagaaccggtcctggtacttgaccgagaatatacaaaggttccttcccaaccccgcaggcgttcagttggaagaccctgagtttcaggccagcaatattatgcactcaatcaacggctatgtgtttgatagtctccagctttctgtttgcctccatgaagtagcctattggtacatcttgtcaattggtgctcaaacagacttcctctccgtcttcttctccggctacacctttaagcacaagatggtgtatgaggacactctcacactctttccattttctggagaaaccgtgttcatgagcatggagaatccaggcctttggatcttgggttgccacaacagtgattttcgcaatcggggaatgactgctctcctcaaagtcagcagctgtgattggaacacaggcgactattacgaagattcttacgaggacataagtgcctactttgactccaagaataacgccattgagcccagatcattctcccagaatcctcccgtgcttaaaaggcatcagcgcgaaggtaccagaactactcttcagtctgatcaagaggagattgactatgacgacaccattagcgtggaaatgaagaaggaggatttcgatatctatgacgaagatgagaaccagtctccgcggagctttcagaagaagacgcgacactacttcattgcagcagtcgaaaggctttgggactacggtatgtcatcatcccctcatgtgttgcgcaatagagctcagagtggaagtgttccacagttcaagaaagtcgtctttcaagagtttacagatggcagcttcacacagcctctctatcggggcgagcttaacgaacatttgggactccttggtccctatatccgagccgaagtggaggacaacattatggttacctttaggaatcaagcctctcgcccctacagcttctactcctccctcatcagttatgaggaggatcagagacaaggcgctgaaccacggaagaactttgtgaaaccgaatgagacgaagacctacttctggaaagtacagcaccacatggcccccacaaaagacgaattcgattgcaaagcatgggcgtatttttcagacgttgacgcggagaaagatgtacattcaggacttattggtcctttgttggtgtgtcacactaacactctcaatccagcccatggcaggcaggtgacagtccaggaattcgctcttttctttaccatctttgatgagaccaagtcctggtacttcacggaaaacatggagcgcaattgcagagccccctgtaacatacagatggaggaccctacctttaaggaaaattatcggttccacgcaatcaacggatacattatggatacactccctggccttgtgatggctcaggaccaacgaatcaggtggtacctcctcagcatgggttctaatgagaacatacactccattcacttttcaggacatgtgttcactgtccggaagaaagaagagtataagatggccctctacaatttgtatccaggcgtgtttgagaccgttgaaatgcttccctctaaagctggcatctggagagtagagtgcttgatcggagaacatcttcacgcaggtatgagcaccttgttcctcgtgtacagcaacaaatgtcagaatccacttggcatggccagtggacacattcgcgactttcagatcacagcatctggccagtatggacaatgggccccaaagttggctcgcctccattactccggtagcataaatgcgtggtccactaaagaacctttcagctggattaaggtcgatcttcttgcccccatgatcatccacggcattaagacacagggagcgaggcagaaattctcctccctctacatctcacagttcattattatgtatagtttggacggcaagaagtggcaaacttatagaggtaacagtactggaacagacatggtgttcttcggcaacgttgatagctctggcatcaaacacaacatctttaatcctcccataatagctcggtacatcagattgcatccgacccactacagcattaggagtacactccgaatggagcttatgggttgcgacttgaattcctgttcaatgccactcggaatggagtctaaagccatctctgatgcacagataaccgccagtagctactttacgaacatgtttgctacgtggtcaccctctaaggcaaggcttcatttgcaaggccggtctaatgcctggagacctcaggtgaacaacccgaaagaatggctccaggtggactttcagaagaccatgaaagtaacaggtgtcactactcagggagttaagtccttggatactagcatgtatgtgaaggagttccttatttcctcatcacaagatggccaccagtggaccctcttctttcagaatggtaaggtcaaagtgtttcagggcaatcaagacagcttcacacccgtggtgaacagtcttgatcctccactcttgacacgataccttcgaatccatccacagtcttgggagcaccagattgcattgcgcatggaagtacttggatgcgaggctcaggacctctac

SEQ ID NO: 1306 - protein, 1457 aa, synthetic construct
  REGION 1..1457: note = Variant of human B-domain deleted Factor VIII
MQIELSTCFFLCLLRFCFSATRRYYLGAVELSWDYMQSDLGELPVDARFPPRVPKSFPFNTSQVYKKTLFVEFTDHLFNIAKPRPPWMGLLGPTIQAEVYDTVVITLKNMASHPVSLHAVGVSYWKASEGAEYDDQTSQREKEDDKVFPGGSHTYVWQVLKENGPMASDPPCLTYSYLSHVDLVKDLNSGLIGALLVCREGSLAKEKTQTLHKFILLFAVFDEGKSWHSETKNSLMQDRDAASARAWPKMHTVNGYVNRTLPGLIGCHRKSVYWHVIGMGTTPEVHSIFLEGHTFLVRNHRQASLGISPITFLTAQTLLMDLGQFLLFCHIPSHQHDGMEAYVKVDSCPEEPQLRMKNNEEAEDYDDDLTDSEMDVVRFDDDNSPSIIQARSGAKKHPKTWVHYIAAEEEDWDYAPLVLAPDDRSYKSQYLNNGPQRIGRKYKKVRFMAYTDETFKTREAIQHESGILGPLLYGEVGDTLLIIFKNQASRPYNIYPHGITDVRPLYSRRLPKGVKHLKDFPILPGEIFKYKWTVTVEDGPTKSDPRCLTRYYSSFVNMERDLASGLIGPLLICYKESVDQRGNQIMSDKRNVILFSVFDENRSWYLTENIQRFLPNPAGVQLEDPEFQASNIMHSINGYVFDSLQLSVCLHEVAYWYILSIGAQTDFLSVFFSGYTFKHKMVYEDTLTLFPFSGETVFMSMENPGLWILGCHNSDFRNRGMTALLKVSSCDWNTGDYYEDSYEDISAYFDSKNNAIEPRSFSQNPPVLKRHQREGTRTTLQSDQEEIDYDDTISVEMKKEDFDIYDEDENQSPRSFQKKTRHYFIAAVERLWDYGMSSSPHVLRNRAQSGSVPQFKKVVFQEFTDGSFTQPLYRGELNEHLGLLGPYIRAEVEDNIMVTFRNQASRPYSFYSSLISYEEDQRQGAEPRKNFVKPNETKTYFWKVQHHMAPTKDEFDCKAWAYFSDVDAEKDVHSGLIGPLLVCHTNTLNPAHGRQVTVQEFALFFTIFDETKSWYFTENMERNCRAPCNIQMEDPTFKENYRFHAINGYIMDTLPGLVMAQDQRIRWYLLSMGSNENIHSIHFSGHVFTVRKKEEYKMALYNLYPGVFETVEMLPSKAGIWRVECLIGEHLHAGMSTLFLVYSNKCQNPLGMASGHIRDFQITASGQYGQWAPKLARLHYSGSINAWSTKEPFSWIKVDLLAPMIIHGIKTQGARQKFSSLYISQFIIMYSLDGKKWQTYRGNSTGTDMVFFGNVDSSGIKHNIFNPPIIARYIRLHPTHYSIRSTLRMELMGCDLNSCSMPLGMESKAISDAQITASSYFTNMFATWSPSKARLHLQGRSNAWRPQVNNPKEWLQVDFQKTMKVTGVTTQGVKSLDTSMYVKEFLISSSQDGHQWTLFFQNGKVKVFQGNQDSFTPVVNSLDPPLLTRYLRIHPQSWEHQIALRMEVLGCEAQDLY

SEQ ID NO: 1307 - DNA, 4371 bp, synthetic construct
  misc_feature 1..4371: note = Variant of human B-domain deleted Factor VIII
  source 1..4371: mol_type = other DNA
atgcagattgaactgtctacctgcttcttcctctgtttgctgaggttctgctttagcgccactagacggtactaccttggcgctgtggagctgtcctgggactatatgcagagtgatttgggagagcttcccgtcgacgcacgatttcctcctcgcgttccaaagtcatttccctttaacacaagccaggtgtacaagaagacgctcttcgtcgaattcaccgatcacctgttcaatatcgccaaacccagaccaccatggatgggtcttttggggcctaccatacaagcggaggtgtatgacacagttgttatcactctcaagaacatggcttctcatccggtaagtcttcacgcagtgggcgtgtcctactggaaagcttcagaaggagccgagtatgatgatcagacatcccagagggagaaagaagacgacaaggtatttccaggtgggtctcatacctatgtgtggcaagtgctcaaagagaatggccctatggcaagcgatccgccgtgtttgacttacagctacctttcacacgttgacctcgtcaaggacctcaactccgggttgattggagccttgttggtatgcagggaaggatctcttgccaaagagaagacacagaccctccacaagtttatccttctctttgctgtgttcgatgagggcaaaagttggcatagcgaaacgaagaattccctcatgcaggatcgcgacgcagccagcgccagagcttggcccaagatgcacactgtgaacggatatgtcaataggacgcttcctggcttgattgggtgtcatcggaaaagtgtctactggcacgtgatcggaatggggacaacaccagaggtccactccatatttctcgaaggccataccttccttgttcgaaaccacagacaggcatccttggggatctctcccattacctttctcactgcccaaacgctccttatggacttgggtcagttccttctcttttgccatatcccgtcacaccagcatgatggtatggaagcttatgtgaaagtcgacagttgtcctgaggagccacagttgcgcatgaagaataatgaagaagccgaggattacgacgacgatctcaccgattctgagatggacgtggtgaggtttgatgacgacaactctccctccatcattcaagctcggagcggggcgaagaaacaccccaagacttgggtccactatatagcggcggaagaggaggattgggattacgctcctcttgtattggcaccagatgaccgctcatacaaaagccagtacctcaacaacggaccgcagagaattggccggaagtataagaaagtgcgatttatggcctatacagacgaaacctttaagacaagggaggccatccagcatgagagtgggattttgggacctcttctttacggcgaagttggtgataccctcctcatcatcttcaagaatcaagcttctcgcccctataacatttacccacacgggatcactgacgttaggcctttgtatagcagaagacttcccaaaggcgtgaagcatctcaaagacttccccattttgccaggcgagatctttaagtacaaatggaccgtcacagtggaagatggaccgactaaatcagaccctcgatgccttacgcggtactattcctccttcgtgaatatggagagagatttggcaagcggactcataggaccactcctcatctgttacaaggaatctgtagaccagaggggtaaccagattatgagtgataaacgcaatgtgatcctttttagcgtcttcgacgagaaccggtcctggtacttgaccgagaatatacaaaggttccttcccaaccccgcaggcgttcagttggaagaccctgagtttcaggccagcaatattatgcactcaatcaacggctatgtgtttgatagtctccagctttctgtttgcctccatgaagtagcctattggtacatcttgtcaattggtgctcaaacagacttcctctccgtcttcttctccggctacacctttaagcacaagatggtgtatgaggacactctcacactctttccattttctggagaaaccgtgttcatgagcatggagaatccaggcctttggatcttgggttgccacaacagtgattttcgcaatcggggaatgactgctctcctcaaagtcagcagctgtgattggaacacaggcgactattacgaagattcttacgaggacataagtgcctactttgactccaagaataacgccattgagcccagatcattctcccagaatcctcccgtgcttaaaaggcatcagcgcgaaggtaccagaactactcttcagtctgatcaagaggagattgactatgacgacaccattagcgtggaaatgaagaaggaggatttcgatatctatgacgaagatgagaaccagtctccgcggagctttcagaagaagacgcgacactacttcattgcagcagtcgaaaggctttgggactacggtatgtcatcatcccctcatgtgttgcgcaatagagctcagagtggaagtgttccacagttcaagaaagtcgtctttcaagagtttacagatggcagcttcacacagcctctctatcggggcgagcttaacgaacatttgggactccttggtccctatatccgagccgaagtggaggacaacattatggttacctttaggaatcaagcctctcgcccctacagcttctactcctccctcatcagttatgaggaggatcagagacaaggcgctgaaccacggcagaactttgtgaaaccgaatgagacgaagacctacttctggaaagtacagcaccacatggcccccacaaaagacgaattcgattgcaaagcatgggcgtatttttcagacgttgacttggagaaagatgtacattcaggacttattggtcctttgttggtgtgtcacactaacactctcaatccagcccatggcaggcaggtgacagtccaggaattcgctcttttctttaccatctttgatgagaccaagtcctggtacttcacggaaaacatggagcgcaattgcagagccccctgtaacatacagatggaggaccctacctttaaggaaaattatcggttccacgcaatcaacggatacattatggatacactccctggccttgtgatggctcaggaccaacgaatcaggtggtacctcctcagcatgggttctaatgagaacatacactccattcacttttcaggacatgtgttcactgtccggaagaaagaagagtataagatggccctctacaatttgtatccaggcgtgtttgagaccgttgaaatgcttccctctaaagctggcatctggagagtagagtgcttgatcggagaacatcttcacgcaggtatgagcaccttgttcctcgtgtacagcaacaaatgtcagaatccacttggcatggccagtggacacattcgcgactttcagatcacagcatctggccagtatggacaatgggccccaaagttggctcgcctccattactccggtagcataaatgcgtggtccactaaagaacctttcagctggattaaggtcgatcttcttgcccccatgatcatccacggcattaagacacagggagcgaggcagaaattctcctccctctacatctcacagttcattattatgtatagtttggacggcaagaagtggcaaacttatagaggtaacagtactggaacagacatggtgttcttcggcaacgttgatagctctggcatcaaacacaacatctttaatcctcccataatagctcggtacatcagattgcatccgacccactacagcattaggagtacactccgaatggagcttatgggttgcgacttgaattcctgttcaatgccactcggaatggagtctaaagccatctctgatgcacagataaccgccagtagctactttacgaacatgtttgctacgtggtcaccctctaaggcaaggcttcatttgcaaggccggtctaatgcctggagacctcaggtgaacaacccgaaagaatggctccaggtggactttcagaagaccatgaaagtaacaggtgtcactactcagggagttaagtccttggatactagcatgtatgtgaaggagttccttatttcctcatcacaagatggccaccagtggaccctcttctttcagaatggtaaggtcaaagtgtttcagggcaatcaagacagcttcacacccgtggtgaacagtcttgatcctccactcttgacacgataccttcgaatccatccacagtcttgggagcaccagattgcattgcgcatggaagtacttggatgcgaggctcaggacctctac

SEQ ID NO: 1308 - protein, 1457 aa, synthetic construct
  REGION 1..1457: note = Variant of human B-domain deleted Factor VIII
MQIELSTCFFLCLLRFCFSATRRYYLGAVELSWDYMQSDLGELPVDARFPPRVPKSFPFNTSQVYKKTLFVEFTDHLFNIAKPRPPWMGLLGPTIQAEVYDTVVITLKNMASHPVSLHAVGVSYWKASEGAEYDDQTSQREKEDDKVFPGGSHTYVWQVLKENGPMASDPPCLTYSYLSHVDLVKDLNSGLIGALLVCREGSLAKEKTQTLHKFILLFAVFDEGKSWHSETKNSLMQDRDAASARAWPKMHTVNGYVNRTLPGLIGCHRKSVYWHVIGMGTTPEVHSIFLEGHTFLVRNHRQASLGISPITFLTAQTLLMDLGQFLLFCHIPSHQHDGMEAYVKVDSCPEEPQLRMKNNEEAEDYDDDLTDSEMDVVRFDDDNSPSIIQARSGAKKHPKTWVHYIAAEEEDWDYAPLVLAPDDRSYKSQYLNNGPQRIGRKYKKVRFMAYTDETFKTREAIQHESGILGPLLYGEVGDTLLIIFKNQASRPYNIYPHGITDVRPLYSRRLPKGVKHLKDFPILPGEIFKYKWTVTVEDGPTKSDPRCLTRYYSSFVNMERDLASGLIGPLLICYKESVDQRGNQIMSDKRNVILFSVFDENRSWYLTENIQRFLPNPAGVQLEDPEFQASNIMHSINGYVFDSLQLSVCLHEVAYWYILSIGAQTDFLSVFFSGYTFKHKMVYEDTLTLFPFSGETVFMSMENPGLWILGCHNSDFRNRGMTALLKVSSCDWNTGDYYEDSYEDISAYFDSKNNAIEPRSFSQNPPVLKRHQREGTRTTLQSDQEEIDYDDTISVEMKKEDFDIYDEDENQSPRSFQKKTRHYFIAAVERLWDYGMSSSPHVLRNRAQSGSVPQFKKVVFQEFTDGSFTQPLYRGELNEHLGLLGPYIRAEVEDNIMVTFRNQASRPYSFYSSLISYEEDQRQGAEPRQNFVKPNETKTYFWKVQHHMAPTKDEFDCKAWAYFSDVDLEKDVHSGLIGPLLVCHTNTLNPAHGRQVTVQEFALFFTIFDETKSWYFTENMERNCRAPCNIQMEDPTFKENYRFHAINGYIMDTLPGLVMAQDQRIRWYLLSMGSNENIHSIHFSGHVFTVRKKEEYKMALYNLYPGVFETVEMLPSKAGIWRVECLIGEHLHAGMSTLFLVYSNKCQNPLGMASGHIRDFQITASGQYGQWAPKLARLHYSGSINAWSTKEPFSWIKVDLLAPMIIHGIKTQGARQKFSSLYISQFIIMYSLDGKKWQTYRGNSTGTDMVFFGNVDSSGIKHNIFNPPIIARYIRLHPTHYSIRSTLRMELMGCDLNSCSMPLGMESKAISDAQITASSYFTNMFATWSPSKARLHLQGRSNAWRPQVNNPKEWLQVDFQKTMKVTGVTTQGVKSLDTSMYVKEFLISSSQDGHQWTLFFQNGKVKVFQGNQDSFTPVVNSLDPPLLTRYLRIHPQSWEHQIALRMEVLGCEAQDLY

SEQ ID NO: 1309 - DNA, 4371 bp, synthetic construct
  misc_feature 1..4371: note = Variant of human B-domain deleted Factor VIII
  source 1..4371: mol_type = other DNA
atgcagattgaactgtctacctgcttcttcctctgtttgctgaggttctgctttagcgccactagacggtactaccttggcgctgtggagctgtcctgggactatatgcagagtgatttgggagagcttcccgtcgacgcacgatttcctcctcgcgttccaaagtcatttccctttaacacaagccaggtgtacaagaagacgctcttcgtcgaattcaccgatcacctgttcaatatcgccaaacccagaccaccatggatgggtcttttggggcctaccatacaagcggaggtgtatgacacagttgttatcactctcaagaacatggcttctcatccggtaagtcttcacgcagtgggcgtgtcctactggaaagcttcagaaggagccgagtatgatgatcagacatcccagagggagaaagaagacgacaaggtatttccaggtgggtctcatacctatgtgtggcaagtgctcaaagagaatggccctatggcaagcgatccgccgtgtttgacttacagctacctttcacacgttgacctcgtcaaggacctcaactccgggttgattggagccttgttggtatgcagggaaggatctcttgccaaagagaagacacagaccctccacaagtttatccttctctttgctgtgttcgatgagggcaaaagttggcatagcgaaacgaagaattccctcatgcaggatcgcgacgcagccagcgccagagcttggcccaagatgcacactgtgaacggatatgtcaataggacgcttcctggcttgattgggtgtcatcggaaaagtgtctactggcacgtgatcggaatggggacaacaccagaggtccactccatatttctcgaaggccataccttccttgttcgaaaccacagacaggcatccttggggatctctcccattacctttctcactgcccaaacgctccttatggacttgggtcagttccttctcttttgccatatcccgtcacaccagcatgatggtatggaagcttatgtgaaagtcgacagttgtcctgaggagccacagttgcgcatgaagaataatgaagaagccgaggattacgacgacgatctcaccgattctgagatggacgtggtgaggtttgatgacgacaactctccctccatcattcaagctcggagcggggcgaagaaacaccccaagacttgggtccactatatagcggcggaagaggaggattgggattacgctcctcttgtattggcaccagatgaccgctcatacaaaagccagtacctcaacaacggaccgcagagaattggccggaagtataagaaagtgcgatttatggcctatacagacgaaacctttaagacaagggaggccatccagcatgagagtgggattttgggacctcttctttacggcgaagttggtgataccctcctcatcatcttcaagaatcaagcttctcgcccctataacatttacccacacgggatcactgacgttaggcctttgtatagcagaagacttcccaaaggcgtgaagcatctcaaagacttccccattttgccaggcgagatctttaagtacaaatggaccgtcacagtggaagatggaccgactaaatcagaccctcgatgccttacgcggtactattcctccttcgtgaatatggagagagatttggcaagcggactcataggaccactcctcatctgttacaaggaatctgtagaccagaggggtaaccagattatgagtgataaacgcaatgtgatcctttttagcgtcttcgacgagaaccggtcctggtacttgaccgagaatatacaaaggttccttcccaaccccgcaggcgttcagttggaagaccctgagtttcaggccagcaatattatgcactcaatcaacggctatgtgtttgatagtctccagctttctgtttgcctccatgaagtagcctattggtacatcttgtcaattggtgctcaaacagacttcctctccgtcttcttctccggctacacctttaagcacaagatggtgtatgaggacactctcacactctttccattttctggagaaaccgtgttcatgagcatggagaatccaggcctttggatcttgggttgccacaacagtgattttcgcaatcggggaatgactgctctcctcaaagtcagcagctgtgattggaacacaggcgactattacgaagattcttacgaggacataagtgcctactttgactccaagaataacgccattgagcccagatcattctcccagaatcctcccgtgcttaaaaggcatcagcgcgaaggtaccagaactactcttcagtctgatcaagaggagattgactatgacgacaccattagcgtggaaatgaagaaggaggatttcgatatctatgacgaagatgagaaccagtctccgcggagctttcagaagaagacgcgacactacttcattgcagcagtcgaaaggctttgggactacggtatgtcatcatcccctcatgtgttgcgcaatagagctcagagtggaagtgttccacagttcaagaaagtcgtctttcaagagtttacagatggcagcttcacacagcctctctatcggggcgagcttaacgaacatttgggactccttggtccctatatccgagccgaagtggaggacaacattatggttacctttaggaatcaagcctctcgcccctacagcttctactcctccctcatcagttatgaggaggatcagagacaatgggctgaaccacggaagaactttgtgaaaccgaatgagacgaagacctacttctggaaagtacagcaccacatggcccccacaaaagacgaattcgattgcaaagcatgggcgtatttttcagacgttgacttggagaaagatgtacattcaggacttattggtcctttgttggtgtgtcacactaacactctcaatccagcccatggcaggcaggtgacagtccaggaattcgctcttttctttaccatctttgatgagaccaagtcctggtacttcacggaaaacatggagcgcaattgcagagccccctgtaacatacagatggaggaccctacctttaaggaaaattatcggttccacgcaatcaacggatacattatggatacactccctggccttgtgatggctcaggaccaacgaatcaggtggtacctcctcagcatgggttctaatgagaacatacactccattcacttttcaggacatgtgttcactgtccggaagaaagaagagtataagatggccctctacaatttgtatccaggcgtgtttgagaccgttgaaatgcttccctctaaagctggcatctggagagtagagtgcttgatcggagaacatcttcacgcaggtatgagcaccttgttcctcgtgtacagcaacaaatgtcagaatccacttggcatggccagtggacacattcgcgactttcagatcacagcatctggccagtatggacaatgggccccaaagttggctcgcctccattactccggtagcataaatgcgtggtccactaaagaacctttcagctggattaaggtcgatcttcttgcccccatgatcatccacggcattaagacacagggagcgaggcagaaattctcctccctctacatctcacagttcattattatgtatagtttggacggcaagaagtggcaaacttatagaggtaacagtactggaacagacatggtgttcttcggcaacgttgatagctctggcatcaaacacaacatctttaatcctcccataatagctcggtacatcagattgcatccgacccactacagcattaggagtacactccgaatggagcttatgggttgcgacttgaattcctgttcaatgccactcggaatggagtctaaagccatctctgatgcacagataaccgccagtagctactttacgaacatgtttgctacgtggtcaccctctaaggcaaggcttcatttgcaaggccggtctaatgcctggagacctcaggtgaacaacccgaaagaatggctccaggtggactttcagaagaccatgaaagtaacaggtgtcactactcagggagttaagtccttggatactagcatgtatgtgaaggagttccttatttcctcatcacaagatggccaccagtggaccctcttctttcagaatggtaaggtcaaagtgtttcagggcaatcaagacagcttcacacccgtggtgaacagtcttgatcctccactcttgacacgataccttcgaatccatccacagtcttgggagcaccagattgcattgcgcatggaagtacttggatgcgaggctcaggacctctac

SEQ ID NO: 1310 - protein, 1457 aa, synthetic construct
  REGION 1..1457: note = Variant of human B-domain deleted Factor VIII
MQIELSTCFFLCLLRFCFSATRRYYLGAVELSWDYMQSDLGELPVDARFPPRVPKSFPFNTSQVYKKTLFVEFTDHLFNIAKPRPPWMGLLGPTIQAEVYDTVVITLKNMASHPVSLHAVGVSYWKASEGAEYDDQTSQREKEDDKVFPGGSHTYVWQVLKENGPMASDPPCLTYSYLSHVDLVKDLNSGLIGALLVCREGSLAKEKTQTLHKFILLFAVFDEGKSWHSETKNSLMQDRDAASARAWPKMHTVNGYVNRTLPGLIGCHRKSVYWHVIGMGTTPEVHSIFLEGHTFLVRNHRQASLGISPITFLTAQTLLMDLGQFLLFCHIPSHQHDGMEAYVKVDSCPEEPQLRMKNNEEAEDYDDDLTDSEMDVVRFDDDNSPSIIQARSGAKKHPKTWVHYIAAEEEDWDYAPLVLAPDDRSYKSQYLNNGPQRIGRKYKKVRFMAYTDETFKTREAIQHESGILGPLLYGEVGDTLLIIFKNQASRPYNIYPHGITDVRPLYSRRLPKGVKHLKDFPILPGEIFKYKWTVTVEDGPTKSDPRCLTRYYSSFVNMERDLASGLIGPLLICYKESVDQRGNQIMSDKRNVILFSVFDENRSWYLTENIQRFLPNPAGVQLEDPEFQASNIMHSINGYVFDSLQLSVCLHEVAYWYILSIGAQTDFLSVFFSGYTFKHKMVYEDTLTLFPFSGETVFMSMENPGLWILGCHNSDFRNRGMTALLKVSSCDWNTGDYYEDSYEDISAYFDSKNNAIEPRSFSQNPPVLKRHQREGTRTTLQSDQEEIDYDDTISVEMKKEDFDIYDEDENQSPRSFQKKTRHYFIAAVERLWDYGMSSSPHVLRNRAQSGSVPQFKKVVFQEFTDGSFTQPLYRGELNEHLGLLGPYIRAEVEDNIMVTFRNQASRPYSFYSSLISYEEDQRQWAEPRKNFVKPNETKTYFWKVQHHMAPTKDEFDCKAWAYFSDVDLEKDVHSGLIGPLLVCHTNTLNPAHGRQVTVQEFALFFTIFDETKSWYFTENMERNCRAPCNIQMEDPTFKENYRFHAINGYIMDTLPGLVMAQDQRIRWYLLSMGSNENIHSIHFSGHVFTVRKKEEYKMALYNLYPGVFETVEMLPSKAGIWRVECLIGEHLHAGMSTLFLVYSNKCQNPLGMASGHIRDFQITASGQYGQWAPKLARLHYSGSINAWSTKEPFSWIKVDLLAPMIIHGIKTQGARQKFSSLYISQFIIMYSLDGKKWQTYRGNSTGTDMVFFGNVDSSGIKHNIFNPPIIARYIRLHPTHYSIRSTLRMELMGCDLNSCSMPLGMESKAISDAQITASSYFTNMFATWSPSKARLHLQGRSNAWRPQVNNPKEWLQVDFQKTMKVTGVTTQGVKSLDTSMYVKEFLISSSQDGHQWTLFFQNGKVKVFQGNQDSFTPVVNSLDPPLLTRYLRIHPQSWEHQIALRMEVLGCEAQDLY

SEQ ID NO: 1311 - DNA, 4371 bp, synthetic construct
  misc_feature 1..4371: note = Variant of human B-domain deleted Factor VIII
  source 1..4371: mol_type = other DNA
atgcagattgaactgtctacctgcttcttcctctgtttgctgaggttctgctttagcgccactagacggtactaccttggcgctgtggagctgtcctgggactatatgcagagtgatttgggagagcttcccgtcgacgcacgatttcctcctcgcgttccaaagtcatttccctttaacacaagccaggtgtacaagaagacgctcttcgtcgaattcaccgatcacctgttcaatatcgccaaacccagaccaccatggatgggtcttttggggcctaccatacaagcggaggtgtatgacacagttgttatcactctcaagaacatggcttctcatccggtaagtcttcacgcagtgggcgtgtcctactggaaagcttcagaaggagccgagtatgatgatcagacatcccagagggagaaagaagacgacaaggtatttccaggtgggtctcatacctatgtgtggcaagtgctcaaagagaatggccctatggcaagcgatccgccgtgtttgacttacagctacctttcacacgttgacctcgtcaaggacctcaactccgggttgattggagccttgttggtatgcagggaaggatctcttgccaaagagaagacacagaccctccacaagtttatccttctctttgctgtgttcgatgagggcaaaagttggcatagcgaaacgaagaattccctcatgcaggatcgcgacgcagccagcgccagagcttggcccaagatgcacactgtgaacggatatgtcaataggacgcttcctggcttgattgggtgtcatcggaaaagtgtctactggcacgtgatcggaatggggacaacaccagaggtccactccatatttctcgaaggccataccttccttgttcgaaaccacagacaggcatccttggggatctctcccattacctttctcactgcccaaacgctccttatggacttgggtcagttccttctcttttgccatatcccgtcacaccagcatgatggtatggaagcttatgtgaaagtcgacagttgtcctgaggagccacagttgcgcatgaagaataatgaagaagccgaggattacgacgacgatctcaccgattctgagatggacgtggtgaggtttgatgacgacaactctccctccatcattcaagctcggagcggggcgaagaaacaccccaagacttgggtccactatatagcggcggaagaggaggattgggattacgctcctcttgtattggcaccagatgaccgctcatacaaaagccagtacctcaacaacggaccgcagagaattggccggaagtataagaaagtgcgatttatggcctatacagacgaaacctttaagacaagggaggccatccagcatgagagtgggattttgggacctcttctttacggcgaagttggtgataccctcctcatcatcttcaagaatcaagcttctcgcccctataacatttacccacacgggatcactgacgttaggcctttgtatagcagaagacttcccaaaggcgtgaagcatctcaaagacttccccattttgccaggcgagatctttaagtacaaatggaccgtcacagtggaagatggaccgactaaatcagaccctcgatgccttacgcggtactattcctccttcgtgaatatggagagagatttggcaagcggactcataggaccactcctcatctgttacaaggaatctgtagaccagaggggtaaccagattatgagtgataaacgcaatgtgatcctttttagcgtcttcgacgagaaccggtcctggtacttgaccgagaatatacaaaggttccttcccaaccccgcaggcgttcagttggaagaccctgagtttcaggccagcaatattatgcactcaatcaacggctatgtgtttgatagtctccagctttctgtttgcctccatgaagtagcctattggtacatcttgtcaattggtgctcaaacagacttcctctccgtcttcttctccggctacacctttaagcacaagatggtgtatgaggacactctcacactctttccattttctggagaaaccgtgttcatgagcatggagaatccaggcctttggatcttgggttgccacaacagtgattttcgcaatcggggaatgactgctctcctcaaagtcagcagctgtgattggaacacaggcgactattacgaagattcttacgaggacataagtgcctactttgactccaagaataacgccattgagcccagatcattctcccagaatcctcccgtgcttaaaaggcatcagcgcgaaggtaccagaactactcttcagtctgatcaagaggagattgactatgacgacaccattagcgtggaaatgaagaaggaggatttcgatatctatgaccctgatgagaaccagtctccgcggagctttcagaagaagacgcgacactacttcattgcagcagtcgaaaggctttgggactacggtatgtcatcatcccctcatgtgttgcgcaatagagctcagagtggaagtgttccacagttcaagaaagtcgtctttcaagagtttacagatggcagcttcacacagcctctctatcggggcgagcttaacgaacatttgggactccttggtccctatatccgagccgaagtggaggacaacattatggttacctttaggaatcaagcctctcgcccctacagcttctactcctccctcatcagttatgaggaggatcagagacaaggcgctgaaccacggaagaactttgtgaaaccgaatgagacgaagacctacttctggaaagtacagcaccacatggcccccacaaaagacgaattcgattgcaaagcatgggcgtatttttcagacgttgacttggagaaagatgtacattcaggacttattggtcctttgttggtgtgtcacactaacactctcaatccagcccatggcaggcaggtgacagtccaggaattcgctcttttctttaccatctttgatgagaccaagtcctggtacttcacggaaaacatggagcgcaattgcagagccccctgtaacatacagatggaggaccctacctttaaggaaaattatcggttccacgcaatcaacggatacattatggatacactccctggccttgtgatggctcaggaccaacgaatcaggtggtacctcctcagcatgggttctaatgagaacatacactccattcacttttcaggacatgtgttcactgtccggaagaaagaagagtataagatggccctctacaatttgtatccaggcgtgtttgagaccgttgaaatgcttccctctaaagctggcatctggagagtagagtgcttgatcggagaacatcttcacgcaggtatgagcaccttgttcctcgtgtacagcaacaaatgtcagaatccacttggcatggccagtggacacattcgcgactttcagatcacagcatctggccagtatggacaatgggccccaaagttggctcgcctccattactccggtagcataaatgcgtggtccactaaagaacctttcagctggattaaggtcgatcttcttgcccccatgatcatccacggcattaagacacagggagcgaggcagaaattctcctccctctacatctcacagttcattattatgtatagtttggacggcaagaagtggcaaacttatagaggtaacagtactggaacagacatggtgttcttcggcaacgttgatagctctggcatcaaacacaacatctttaatcctcccataatagctcggtacatcagattgcatccgacccactacagcattaggagtacactccgaatggagcttatgggttgcgacttgaattcctgttcaatgccactcggaatggagtctaaagccatctctgatgcacagataaccgccagtagctactttacgaacatgtttgctacgtggtcaccctctaaggcaaggcttcatttgcaaggccggtctaatgcctggagacctcaggtgaacaacccgaaagaatggctccaggtggactttcagaagaccatgaaagtaacaggtgtcactactcagggagttaagtccttggatactagcatgtatgtgaaggagttccttatttcctcatcacaagatggccaccagtggaccctcttctttcagaatggtaaggtcaaagtgtttcagggcaatcaagacagcttcacacccgtggtgaacagtcttgatcctccactcttgacacgataccttcgaatccatccacagtcttgggagcaccagattgcattgcgcatggaagtacttggatgcgaggctcaggacctctac

SEQ ID NO: 1312 - protein, 1457 aa, synthetic construct
  REGION 1..1457: note = Variant of human B-domain deleted Factor VIII
MQIELSTCFFLCLLRFCFSATRRYYLGAVELSWDYMQSDLGELPVDARFPPRVPKSFPFNTSQVYKKTLFVEFTDHLFNIAKPRPPWMGLLGPTIQAEVYDTVVITLKNMASHPVSLHAVGVSYWKASEGAEYDDQTSQREKEDDKVFPGGSHTYVWQVLKENGPMASDPPCLTYSYLSHVDLVKDLNSGLIGALLVCREGSLAKEKTQTLHKFILLFAVFDEGKSWHSETKNSLMQDRDAASARAWPKMHTVNGYVNRTLPGLIGCHRKSVYWHVIGMGTTPEVHSIFLEGHTFLVRNHRQASLGISPITFLTAQTLLMDLGQFLLFCHIPSHQHDGMEAYVKVDSCPEEPQLRMKNNEEAEDYDDDLTDSEMDVVRFDDDNSPSIIQARSGAKKHPKTWVHYIAAEEEDWDYAPLVLAPDDRSYKSQYLNNGPQRIGRKYKKVRFMAYTDETFKTREAIQHESGILGPLLYGEVGDTLLIIFKNQASRPYNIYPHGITDVRPLYSRRLPKGVKHLKDFPILPGEIFKYKWTVTVEDGPTKSDPRCLTRYYSSFVNMERDLASGLIGPLLICYKESVDQRGNQIMSDKRNVILFSVFDENRSWYLTENIQRFLPNPAGVQLEDPEFQASNIMHSINGYVFDSLQLSVCLHEVAYWYILSIGAQTDFLSVFFSGYTFKHKMVYEDTLTLFPFSGETVFMSMENPGLWILGCHNSDFRNRGMTALLKVSSCDWNTGDYYEDSYEDISAYFDSKNNAIEPRSFSQNPPVLKRHQREGTRTTLQSDQEEIDYDDTISVEMKKEDFDIYDPDENQSPRSFQKKTRHYFIAAVERLWDYGMSSSPHVLRNRAQSGSVPQFKKVVFQEFTDGSFTQPLYRGELNEHLGLLGPYIRAEVEDNIMVTFRNQASRPYSFYSSLISYEEDQRQGAEPRKNFVKPNETKTYFWKVQHHMAPTKDEFDCKAWAYFSDVDLEKDVHSGLIGPLLVCHTNTLNPAHGRQVTVQEFALFFTIFDETKSWYFTENMERNCRAPCNIQMEDPTFKENYRFHAINGYIMDTLPGLVMAQDQRIRWYLLSMGSNENIHSIHFSGHVFTVRKKEEYKMALYNLYPGVFETVEMLPSKAGIWRVECLIGEHLHAGMSTLFLVYSNKCQNPLGMASGHIRDFQITASGQYGQWAPKLARLHYSGSINAWSTKEPFSWIKVDLLAPMIIHGIKTQGARQKFSSLYISQFIIMYSLDGKKWQTYRGNSTGTDMVFFGNVDSSGIKHNIFNPPIIARYIRLHPTHYSIRSTLRMELMGCDLNSCSMPLGMESKAISDAQITASSYFTNMFATWSPSKARLHLQGRSNAWRPQVNNPKEWLQVDFQKTMKVTGVTTQGVKSLDTSMYVKEFLISSSQDGHQWTLFFQNGKVKVFQGNQDSFTPVVNSLDPPLLTRYLRIHPQSWEHQIALRMEVLGCEAQDLY

SEQ ID NO: 1313 - DNA, 4371 bp, synthetic construct
  misc_feature 1..4371: note = Variant of human B-domain deleted Factor VIII
  source 1..4371: mol_type = other DNA
atgcagattgaactgtctacctgcttcttcctctgtttgctgaggttctgctttagcgccactagacggtactaccttggcgctgtggagctgtcctgggactatatgcagagtgatttgggagagcttcccgtcgacgcacgatttcctcctcgcgttccaaagtcatttccctttaacacaagccaggtgtacaagaagacgctcttcgtcgaattcaccgatcacctgttcaatatcgccaaacccagaccaccatggatgggtcttttggggcctaccatacaagcggaggtgtatgacacagttgttatcactctcaagaacatggcttctcatccggtaagtcttcacgcagtgggcgtgtcctactggaaagcttcagaaggagccgagtatgatgatcagacatcccagagggagaaagaagacgacaaggtatttccaggtgggtctcatacctatgtgtggcaagtgctcaaagagaatggccctatggcaagcgatccgccgtgtttgacttacagctacctttcacacgttgacctcgtcaaggacctcaactccgggttgattggagccttgttggtatgcagggaaggatctcttgccaaagagaagacacagaccctccacaagtttatccttctctttgctgtgttcgatgagggcaaaagttggcatagcgaaacgaagaattccctcatgcaggatcgcgacgcagccagcgccagagcttggcccaagatgcacactgtgaacggatatgtcaataggacgcttcctggcttgattgggtgtcatcggaaaagtgtctactggcacgtgatcggaatggggacaacaccagaggtccactccatatttctcgaaggccataccttccttgttcgaaaccacagacaggcatccttggggatctctcccattacctttctcactgcccaaacgctccttatggacttgggtcagttccttctcttttgccatatcccgtcacaccagcatgatggtatggaagcttatgtgaaagtcgacagttgtcctgaggagccacagttgcgcatgaagaataatgaagaagccgaggattacgacgacgatctcaccgattctgagatggacgtggtgaggtttgatgacgacaactctccctccatcattcaagctcggagcggggcgaagaaacaccccaagacttgggtccactatatagcggcggaagaggaggattgggattacgctcctcttgtattggcaccagatgaccgctcatacaaaagccagtacctcaacaacggaccgcagagaattggccggaagtataagaaagtgcgatttatggcctatacagacgaaacctttaagacaagggaggccatccagcatgagagtgggattttgggacctcttctttacggcgaagttggtgataccctcctcatcatcttcaagaatcaagcttctcgcccctataacatttacccacacgggatcactgacgttaggcctttgtatagcagaagacttcccaaaggcgtgaagcatctcaaagacttccccattttgccaggcgagatctttaagtacaaatggaccgtcacagtggaagatggaccgactaaatcagaccctcgatgccttacgcggtactattcctccttcgtgaatatggagagagatttggcaagcggactcataggaccactcctcatctgttacaaggaatctgtagaccagaggggtaaccagattatgagtgataaacgcaatgtgatcctttttagcgtcttcgacgagaaccggtcctggtacttgaccgagaatatacaaaggttccttcccaaccccgcaggcgttcagttggaagaccctgagtttcaggccagcaatattatgcactcaatcaacggctatgtgtttgatagtctccagctttctgtttgcctccatgaagtagcctattggtacatcttgtcaattggtgctcaaacagacttcctctccgtcttcttctccggctacacctttaagcacaagatggtgtatgaggacactctcacactctttccattttctggagaaaccgtggatatgagcatggagaatccaggcctttggatcttgggttgccacaacagtgattttcgcaatcggggaatgactgctctcctcaaagtcagcagctgtgattggaacacaggcgactattacgaagattcttacgaggacataagtgcctactttgactccaagaataacgccattgagcccagatcattctcccagaatcctcccgtgcttaaaaggcatcagcgcgaaggtaccagaactactcttcagtctgatcaagaggagattgactatgacgacaccattagcgtggaaatgaagaaggaggatttcgatatctatgacgaagatgagaaccagtctccgcggagctttcagaagaagacgcgacactacttcattgcagcagtcgaaaggctttgggactacggtatgtcatcatcccctcatgtgttgcgcaatagagctcagagtggaagtgttccacagttcaagaaagtcgtctttcaagagtttacagatggcagcttcacacagcctctctatcggggcgagcttaacgaacatttgggactccttggtccctatatccgagccgaagtggaggacaacattatggttacctttaggaatcaagcctctcgcccctacagcttctactcctccctcatcagttatgaggaggatcagagacaaggcgctgaaccacggaagaactttgtgaaaccgaatgagacgaagacctacttctggaaagtacagcaccacatggcccccacaaaagacgaattcgattgcaaagcatgggcgtatttttcagacgttgacttggagaaagatgtacattcaggacttattggtcctttgttggtgtgtcacactaacactctcaatccagcccatggcaggcaggtgacagtccaggaattcgctcttttctttaccatctttgatgagaccaagtcctggtacttcacggaaaacatggagcgcaattgcagagccccctgtaacatacagatggaggaccctacctttaaggaaaattatcggttccacgcaatcaacggatacattatggatacactccctggccttgtgatggctcaggaccaacgaatcaggtggtacctcctcagcatgggttctaatgagaacatacactccattcacttttcaggacatgtgttcactgtccggaagaaagaagagtataagatggccctctacaatttgtatccaggcgtgtttgagaccgttgaaatgcttccctctaaagctggcatctggagagtagagtgcttgatcggagaacatcttcacgcaggtatgagcaccttgttcctcgtgtacagcaacaaatgtcagaatccacttggcatggccagtggacacattcgcgactttcagatcacagcatctggccagtatggacaatgggccccaaagttggctcgcctccattactccggtagcataaatgcgtggtccactaaagaacctttcagctggattaaggtcgatcttcttgcccccatgatcatccacggcattaagacacagggagcgaggcagaaattctcctccctctacatctcacagttcattattatgtatagtttggacggcaagaagtggcaaacttatagaggtaacagtactggaacagacatggtgttcttcggcaacgttgatagctctggcatcaaacacaacatctttaatcctcccataatagctcggtacatcagattgcatccgacccactacagcattaggagtacactccgaatggagcttatgggttgcgacttgaattcctgttcaatgccactcggaatggagtctaaagccatctctgatgcacagataaccgccagtagctactttacgaacatgtttgctacgtggtcaccctctaaggcaaggcttcatttgcaaggccggtctaatgcctggagacctcaggtgaacaacccgaaagaatggctccaggtggactttcagaagaccatgaaagtaacaggtgtcactactcagggagttaagtccttggatactagcatgtatgtgaaggagttccttatttcctcatcacaagatggccaccagtggaccctcttctttcagaatggtaaggtcaaagtgtttcagggcaatcaagacagcttcacacccgtggtgaacagtcttgatcctccactcttgacacgataccttcgaatccatccacagtcttgggagcaccagattgcattgcgcatggaagtacttggatgcgaggctcaggacctctac

SEQ ID NO: 1314 - protein, 1457 aa, synthetic construct
  REGION 1..1457: note = Variant of human B-domain deleted Factor VIII
MQIELSTCFFLCLLRFCFSATRRYYLGAVELSWDYMQSDLGELPVDARFPPRVPKSFPFNTSQVYKKTLFVEFTDHLFNIAKPRPPWMGLLGPTIQAEVYDTVVITLKNMASHPVSLHAVGVSYWKASEGAEYDDQTSQREKEDDKVFPGGSHTYVWQVLKENGPMASDPPCLTYSYLSHVDLVKDLNSGLIGALLVCREGSLAKEKTQTLHKFILLFAVFDEGKSWHSETKNSLMQDRDAASARAWPKMHTVNGYVNRTLPGLIGCHRKSVYWHVIGMGTTPEVHSIFLEGHTFLVRNHRQASLGISPITFLTAQTLLMDLGQFLLFCHIPSHQHDGMEAYVKVDSCPEEPQLRMKNNEEAEDYDDDLTDSEMDVVRFDDDNSPSIIQARSGAKKHPKTWVHYIAAEEEDWDYAPLVLAPDDRSYKSQYLNNGPQRIGRKYKKVRFMAYTDETFKTREAIQHESGILGPLLYGEVGDTLLIIFKNQASRPYNIYPHGITDVRPLYSRRLPKGVKHLKDFPILPGEIFKYKWTVTVEDGPTKSDPRCLTRYYSSFVNMERDLASGLIGPLLICYKESVDQRGNQIMSDKRNVILFSVFDENRSWYLTENIQRFLPNPAGVQLEDPEFQASNIMHSINGYVFDSLQLSVCLHEVAYWYILSIGAQTDFLSVFFSGYTFKHKMVYEDTLTLFPFSGETVDMSMENPGLWILGCHNSDFRNRGMTALLKVSSCDWNTGDYYEDSYEDISAYFDSKNNAIEPRSFSQNPPVLKRHQREGTRTTLQSDQEEIDYDDTISVEMKKEDFDIYDEDENQSPRSFQKKTRHYFIAAVERLWDYGMSSSPHVLRNRAQSGSVPQFKKVVFQEFTDGSFTQPLYRGELNEHLGLLGPYIRAEVEDNIMVTFRNQASRPYSFYSSLISYEEDQRQGAEPRKNFVKPNETKTYFWKVQHHMAPTKDEFDCKAWAYFSDVDLEKDVHSGLIGPLLVCHTNTLNPAHGRQVTVQEFALFFTIFDETKSWYFTENMERNCRAPCNIQMEDPTFKENYRFHAINGYIMDTLPGLVMAQDQRIRWYLLSMGSNENIHSIHFSGHVFTVRKKEEYKMALYNLYPGVFETVEMLPSKAGIWRVECLIGEHLHAGMSTLFLVYSNKCQNPLGMASGHIRDFQITASGQYGQWAPKLARLHYSGSINAWSTKEPFSWIKVDLLAPMIIHGIKTQGARQKFSSLYISQFIIMYSLDGKKWQTYRGNSTGTDMVFFGNVDSSGIKHNIFNPPIIARYIRLHPTHYSIRSTLRMELMGCDLNSCSMPLGMESKAISDAQITASSYFTNMFATWSPSKARLHLQGRSNAWRPQVNNPKEWLQVDFQKTMKVTGVTTQGVKSLDTSMYVKEFLISSSQDGHQWTLFFQNGKVKVFQGNQDSFTPVVNSLDPPLLTRYLRIHPQSWEHQIALRMEVLGCEAQDLY

SEQ ID NO: 1315 - DNA, 4371 bp, synthetic construct
  misc_feature 1..4371: note = Variant of human B-domain deleted Factor VIII
  source 1..4371: mol_type = other DNA
atgcagattgaactgtctacctgcttcttcctctgtttgctgaggttctgctttagcgccactagacggtactaccttggcgctgtggagctgtcctgggactatatgcagagtgatttgggagagcttcccgtcgacgcacgatttcctcctcgcgttccaaagtcatttccctttaacacaagccaggtgtacaagaagacgctcttcgtcgaattcaccgatcacctgttcaatatcgccaaacccagaccaccatggatgggtcttttggggcctaccatacaagcggaggtgtatgacacagttgttatcactctcaagaacatggcttctcatccggtaagtcttcacgcagtgggcgtgtcctactggaaagcttcagaaggagccgagtatgatgatcagacatcccagagggagaaagaagacgacaaggtatttccaggtgggtctcatacctatgtgtggcaagtgctcaaagagaatggccctatggcaggggatccgccgtgtttgacttacagctacctttcacacgttgacctcgtcaaggacctcaactccgggttgattggagccttgttggtatgcagggaaggatctcttgccaaagagaagacacagaccctccacaagtttatccttctctttgctgtgttcgatgagggcaaaagttggcatagcgaaacgaagaattccctcatgcaggatcgcgacgcagccagcgccagagcttggcccaagatgcacactgtgaacggatatgtcaataggacgcttcctggcttgattgggtgtcatcggaaaagtgtctactggcacgtgatcggaatggggacaacaccagaggtccactccatatttctcgaaggccataccttccttgttcgaaaccacagacaggcatccttggggatctctcccattacctttctcactgcccaaacgctccttatggacttgggtcagttccttctcttttgccatatcccgtcacaccagcatgatggtatggaagcttatgtgaaagtcgacagttgtcctgaggagccacagttgcgcatgaagaataatgaagaagccgaggattacgacgacgatctcaccgattctgagatggacgtggtgaggtttgatgacgacaactctccctccatcattcaagctcggagcggggcgaagaaacaccccaagacttgggtccactatatagcggcggaagaggaggattgggattacgctcctcttgtattggcaccagatgaccgctcatacaaaagccagtacctcaacaacggaccgcagagaattggccggaagtataagaaagtgcgatttatggcctatacagacgaaacctttaagacaagggaggccatccagcatgagagtgggattttgggacctcttctttacggcgaagttggtgataccctcctcatcatcttcaagaatcaagcttctcgcccctataacatttacccacacgggatcactgacgttaggcctttgtatagcagaagacttcccaaaggcgtgaagcatctcaaagacttccccattttgccaggcgagatctttaagtacaaatggaccgtcacagtggaagatggaccgactaaatcagaccctcgatgccttacgcggtactattcctccttcgtgaatatggagagagatttggcaagcggactcataggaccactcctcatctgttacaaggaatctgtagaccagaggggtaaccagattatgagtgataaacgcaatgtgatcctttttagcgtcttcgacgagaaccggtcctggtacttgaccgagaatatacaaaggttccttcccaaccccgcaggcgttcagttggaagaccctgagtttcaggccagcaatattatgcactcaatcaacggctatgtgtttgatagtctccagctttctgtttgcctccatgaagtagcctattggtacatcttgtcaattggtgctcaaacagacttcctctccgtcttcttctccggctacacctttaagcacaagatggtgtatgaggacactctcacactctttccattttctggagaaaccgtgttcatgagcatggagaatccaggcctttggatcttgggttgccacaacagtgattttcgcaatcggggaatgactgctctcctcaaagtcagcagctgtgattggaacacaggcgactattacgaagattcttacgaggacataagtgcctactttgactccaagaataacgccattgagcccagatcattctcccagaatcctcccgtgcttaaaaggcatcagcgcgaaggtaccagaactactcttcagtctgatcaagaggagattgactatgacgacaccattagcgtggaaatgaagaaggaggatttcgatatctatgacgaagatgagaaccagtctccgcggagctttcagaagaagacgcgacactacttcattgcagcagtcgaaaggctttgggactacggtatgtcatcatcccctcatgtgttgcgcaatagagctcagagtggaagtgttccacagttcaagaaagtcgtctttcaagagtttacagatggcagcttcacacagcctctctatcggggcgagcttaacgaacatttgggactccttggtccctatatccgagccgaagtggaggacaacattatggttacctttaggaatcaagcctctcgcccctacagcttctactcctccctcatcagttatgaggaggatcagagacaaggcgctgaaccacggaagaactttgtgaaaccgaatgagacgaagacctacttctggaaagtacagcaccacatggcccccacaaaagacgaattcgattgcaaagcatgggcgtatttttcagacgttgacttggagaaagatgtacattcaggacttattggtcctttgttggtgtgtcacactaacactctcaatccagcccatggcaggcaggtgacagtccaggaattcgctcttttctttaccatctttgatgagaccaagtcctggtacttcacggaaaacatggagcgcaattgcagagccccctgtaacatacagatggaggaccctacctttaaggaaaattatcggttccacgcaatcaacggatacattatggatacactccctggccttgtgatggctcaggaccaacgaatcaggtggtacctcctcagcatgggttctaatgagaacatacactccattcacttttcaggacatgtgttcactgtccggaagaaagaagagtataagatggccctctacaatttgtatccaggcgtgtttgagaccgttgaaatgcttccctctaaagctggcatctggagagtagagtgcttgatcggagaacatcttcacgcaggtatgagcaccttgttcctcgtgtacagcaacaaatgtcagaatccacttggcatggccagtggacacattcgcgactttcagatcacagcatctggccagtatggacaatgggccccaaagttggctcgcctccattactccggtagcataaatgcgtggtccactaaagaacctttcagctggattaaggtcgatcttcttgcccccatgatcatccacggcattaagacacagggagcgaggcagaaattctcctccctctacatctcacagttcattattatgtatagtttggacggcaagaagtggcaaacttatagaggtaacagtactggaacagacatggtgttcttcggcaacgttgatagctctggcatcaaacacaacatctttaatcctcccataatagctcggtacatcagattgcatccgacccactacagcattaggagtacactccgaatggagcttatgggttgcgacttgaattcctgttcaatgccactcggaatggagtctaaagccatctctgatgcacagataaccgccagtagctactttacgaacatgtttgctacgtggtcaccctctaaggcaaggcttcatttgcaaggccggtctaatgcctggagacctcaggtgaacaacccgaaagaatggctccaggtggactttcagaagaccatgaaagtaacaggtgtcactactcagggagttaagtccttggatactagcatgtatgtgaaggagttccttatttcctcatcacaagatggccaccagtggaccctcttctttcagaatggtaaggtcaaagtgtttcagggcaatcaagacagcttcacacccgtggtgaacagtcttgatcctccactcttgacacgataccttcgaatccatccacagtcttgggagcaccagattgcattgcgcatggaagtacttggatgcgaggctcaggacctctac

SEQ ID NO: 1316 - protein, 1457 aa, synthetic construct
  REGION 1..1457: note = Variant of human B-domain deleted Factor VIII
MQIELSTCFFLCLLRFCFSATRRYYLGAVELSWDYMQSDLGELPVDARFPPRVPKSFPFNTSQVYKKTLFVEFTDHLFNIAKPRPPWMGLLGPTIQAEVYDTVVITLKNMASHPVSLHAVGVSYWKASEGAEYDDQTSQREKEDDKVFPGGSHTYVWQVLKENGPMAGDPPCLTYSYLSHVDLVKDLNSGLIGALLVCREGSLAKEKTQTLHKFILLFAVFDEGKSWHSETKNSLMQDRDAASARAWPKMHTVNGYVNRTLPGLIGCHRKSVYWHVIGMGTTPEVHSIFLEGHTFLVRNHRQASLGISPITFLTAQTLLMDLGQFLLFCHIPSHQHDGMEAYVKVDSCPEEPQLRMKNNEEAEDYDDDLTDSEMDVVRFDDDNSPSIIQARSGAKKHPKTWVHYIAAEEEDWDYAPLVLAPDDRSYKSQYLNNGPQRIGRKYKKVRFMAYTDETFKTREAIQHESGILGPLLYGEVGDTLLIIFKNQASRPYNIYPHGITDVRPLYSRRLPKGVKHLKDFPILPGEIFKYKWTVTVEDGPTKSDPRCLTRYYSSFVNMERDLASGLIGPLLICYKESVDQRGNQIMSDKRNVILFSVFDENRSWYLTENIQRFLPNPAGVQLEDPEFQASNIMHSINGYVFDSLQLSVCLHEVAYWYILSIGAQTDFLSVFFSGYTFKHKMVYEDTLTLFPFSGETVFMSMENPGLWILGCHNSDFRNRGMTALLKVSSCDWNTGDYYEDSYEDISAYFDSKNNAIEPRSFSQNPPVLKRHQREGTRTTLQSDQEEIDYDDTISVEMKKEDFDIYDEDENQSPRSFQKKTRHYFIAAVERLWDYGMSSSPHVLRNRAQSGSVPQFKKVVFQEFTDGSFTQPLYRGELNEHLGLLGPYIRAEVEDNIMVTFRNQASRPYSFYSSLISYEEDQRQGAEPRKNFVKPNETKTYFWKVQHHMAPTKDEFDCKAWAYFSDVDLEKDVHSGLIGPLLVCHTNTLNPAHGRQVTVQEFALFFTIFDETKSWYFTENMERNCRAPCNIQMEDPTFKENYRFHAINGYIMDTLPGLVMAQDQRIRWYLLSMGSNENIHSIHFSGHVFTVRKKEEYKMALYNLYPGVFETVEMLPSKAGIWRVECLIGEHLHAGMSTLFLVYSNKCQNPLGMASGHIRDFQITASGQYGQWAPKLARLHYSGSINAWSTKEPFSWIKVDLLAPMIIHGIKTQGARQKFSSLYISQFIIMYSLDGKKWQTYRGNSTGTDMVFFGNVDSSGIKHNIFNPPIIARYIRLHPTHYSIRSTLRMELMGCDLNSCSMPLGMESKAISDAQITASSYFTNMFATWSPSKARLHLQGRSNAWRPQVNNPKEWLQVDFQKTMKVTGVTTQGVKSLDTSMYVKEFLISSSQDGHQWTLFFQNGKVKVFQGNQDSFTPVVNSLDPPLLTRYLRIHPQSWEHQIALRMEVLGCEAQDLY

SEQ ID NO: 1317 - DNA, 4371 bp, synthetic construct
  misc_feature 1..4371: note = Variant of human B-domain deleted Factor VIII
  source 1..4371: mol_type = other DNA
atgcagattgaactgtctacctgcttcttcctctgtttgctgaggttctgctttagcgccactagacggtactaccttggcgctgtggagctgtcctgggactatatgcagagtgatttgggagagcttcccgtcgacgcacgatttcctcctcgcgttccaaagtcatttccctttaacacaagccaggtgtacaagaagacgctcttcgtcgaattcaccgatcacctgttcaatatcgccaaacccagaccaccatggatgggtcttttggggcctaccatacaagcggaggtgtatgacacagttgttatcactctcaagaacatggcttctcatccggtaagtcttcacgcagtgggcgtgtcctactggaaagcttcagaaggagccgagtatgatgatcagacatcccagagggagaaagaagacgacaaggtatttccaggtgggtctcatacctatgtgtggcaagtgctcaaagagaatggccctatggcaagcgatccgccgtgtttgacttacagctacctttcacacgttgacctcgtcaaggacctcaactccgggttgattggagccttgttggtatgcagggaaggatctcttgccaaagagaagacacagaccctccacaagtttatccttctctttgctgtgttcgatgagggcaaaagttggcatagcgaaacgaagaattccctcatgcaggatcgcgacgcagccagcgccagagcttggcccaagatgcacactgtgaacggatatgtcaataggacgcttcctggcttgattgggtgtcatcggaaaagtgtctactggcacgtgatcggaatggggacaacaccagaggtccactccatatttctcgaaggccataccttccttgttcgaaaccacagacaggcatccttggggatctctcccattacctttctcactgcccaaacgctccttatggacttgggtcagttccttctcttttgccatatcccgtcacaccagcatgatggtatggaagcttatgtgaaagtcgacagttgtcctgaggagccacagttgcgcatgaagaataatgaagaagccgaggattacgacgacgatctcaccgattctgagatggacgtggtgaggtttgatgacgacaactctccctccatcattcaagctcggagcggggcgaagaaacaccccaagacttgggtccactatatagcggcggaagaggaggattgggattacgctcctcttgtattggcaccagatgaccgctcatacaaaagccagtacctcaacaacggaccgcagagaattggccggaagtataagaaagtgcgatttatggcctatacagacgaaacctttaagacaagggaggccatccagcatgagagtgggattttgggacctcttctttacggcgaagttggtgataccctcctcatcatcttcaagaatcaagcttctcgcccctataacatttacccacacgggatcactgacgttaggcctttgtatagcagaagacttcccaaaggcgtgaagcatctcaaagacttccccattttgccaggcgagatctttaagtacaaatggaccgtcacagtggaagatggaccgactaaatcagaccctcgatgccttacgcggtactattcctccttcgtgaatatggagagagatttggcaagcggactcataggaccactcctcatctgttacaaggaatctgtagaccagaggggtaaccagattatgagtgataaacgcaatgtgatcctttttagcgtcttcgacgagaaccggtcctggtacttgaccgagaatatacaaaggttccttcccaaccccgcaggcgttcagttggaagaccctgagtttcaggccagcaatattatgcactcaatcaacggctatgtgtttgatagtctccagctttctgtttgcctccatgaagtagcctattggtacatcttgtcaattggtgctcaaacagacttcctctccgtcttcttctccggctacacctttaagcacaagatggtgtatgaggacactctcacactctttccattttctggagaaaccgtgttcatgagcatggagaatccaggcctttggatcttgggttgccacaacagtgattttcgcaatcggggaatgactgctctcctcaaagtcagcagctgtgattggaacacaggcgactattacgaagattcttacgaggacataagtgcctactttgactccaagaataacgccattgagcccagatcattctcccagaatcctcccgtgcttaaaaggcatcagcgcgaaggtaccagaactactcttcagtctgatcaagaggagattgactatgacgacaccattagcgtggaaatgaagaaggaggatttcgatatctatgacgaagatgagaaccagtctccgcggagctttcagaagaagacgcgacactacttcattgcagcagtcgaaaggctttgggactacggtatgtcatcatcccctcatgtgttgcgcaatagagctcagagtggaagtgttccacagttcaagaaagtcgtctttcaagagtttacagatggcagcttcacacagcctctctatcggggcgagcttaacgaacatttgggactccttggtccctatatccgagccgaagtggaggacaacattatggttacctttaggaatcaagcctctcgcccctacagcttctactcctccctcatcagttatgaggaggatcagagacaaggcgctgaaccacgggttaactttgtgaaaccgaatgagacgaagacctacttctggaaagtacagcaccacatggcccccacaaaagacgaattcgattgcaaagcatgggcgtatttttcagacgttgacttggagaaagatgtacattcaggacttattggtcctttgttggtgtgtcacactaacactctcaatccagcccatggcaggcaggtgacagtccaggaattcgctcttttctttaccatctttgatgagaccaagtcctggtacttcacggaaaacatggagcgcaattgcagagccccctgtaacatacagatggaggaccctacctttaaggaaaattatcggttccacgcaatcaacggatacattatggatacactccctggccttgtgatggctcaggaccaacgaatcaggtggtacctcctcagcatgggttctaatgagaacatacactccattcacttttcaggacatgtgttcactgtccggaagaaagaagagtataagatggccctctacaatttgtatccaggcgtgtttgagaccgttgaaatgcttccctctaaagctggcatctggagagtagagtgcttgatcggagaacatcttcacgcaggtatgagcaccttgttcctcgtgtacagcaacaaatgtcagaatccacttggcatggccagtggacacattcgcgactttcagatcacagcatctggccagtatggacaatgggccccaaagttggctcgcctccattactccggtagcataaatgcgtggtccactaaagaacctttcagctggattaaggtcgatcttcttgcccccatgatcatccacggcattaagacacagggagcgaggcagaaattctcctccctctacatctcacagttcattattatgtatagtttggacggcaagaagtggcaaacttatagaggtaacagtactggaacagacatggtgttcttcggcaacgttgatagctctggcatcaaacacaacatctttaatcctcccataatagctcggtacatcagattgcatccgacccactacagcattaggagtacactccgaatggagcttatgggttgcgacttgaattcctgttcaatgccactcggaatggagtctaaagccatctctgatgcacagataaccgccagtagctactttacgaacatgtttgctacgtggtcaccctctaaggcaaggcttcatttgcaaggccggtctaatgcctggagacctcaggtgaacaacccgaaagaatggctccaggtggactttcagaagaccatgaaagtaacaggtgtcactactcagggagttaagtccttggatactagcatgtatgtgaaggagttccttatttcctcatcacaagatggccaccagtggaccctcttctttcagaatggtaaggtcaaagtgtttcagggcaatcaagacagcttcacacccgtggtgaacagtcttgatcctccactcttgacacgataccttcgaatccatccacagtcttgggagcaccagattgcattgcgcatggaagtacttggatgcgaggctcaggacctctac

SEQ ID NO: 1318 - protein, 1457 aa, synthetic construct
  REGION 1..1457: note = Variant of human B-domain deleted Factor VIII
MQIELSTCFFLCLLRFCFSATRRYYLGAVELSWDYMQSDLGELPVDARFPPRVPKSFPFNTSQVYKKTLFVEFTDHLFNIAKPRPPWMGLLGPTIQAEVYDTVVITLKNMASHPVSLHAVGVSYWKASEGAEYDDQTSQREKEDDKVFPGGSHTYVWQVLKENGPMASDPPCLTYSYLSHVDLVKDLNSGLIGALLVCREGSLAKEKTQTLHKFILLFAVFDEGKSWHSETKNSLMQDRDAASARAWPKMHTVNGYVNRTLPGLIGCHRKSVYWHVIGMGTTPEVHSIFLEGHTFLVRNHRQASLGISPITFLTAQTLLMDLGQFLLFCHIPSHQHDGMEAYVKVDSCPEEPQLRMKNNEEAEDYDDDLTDSEMDVVRFDDDNSPSIIQARSGAKKHPKTWVHYIAAEEEDWDYAPLVLAPDDRSYKSQYLNNGPQRIGRKYKKVRFMAYTDETFKTREAIQHESGILGPLLYGEVGDTLLIIFKNQASRPYNIYPHGITDVRPLYSRRLPKGVKHLKDFPILPGEIFKYKWTVTVEDGPTKSDPRCLTRYYSSFVNMERDLASGLIGPLLICYKESVDQRGNQIMSDKRNVILFSVFDENRSWYLTENIQRFLPNPAGVQLEDPEFQASNIMHSINGYVFDSLQLSVCLHEVAYWYILSIGAQTDFLSVFFSGYTFKHKMVYEDTLTLFPFSGETVFMSMENPGLWILGCHNSDFRNRGMTALLKVSSCDWNTGDYYEDSYEDISAYFDSKNNAIEPRSFSQNPPVLKRHQREGTRTTLQSDQEEIDYDDTISVEMKKEDFDIYDEDENQSPRSFQKKTRHYFIAAVERLWDYGMSSSPHVLRNRAQSGSVPQFKKVVFQEFTDGSFTQPLYRGELNEHLGLLGPYIRAEVEDNIMVTFRNQASRPYSFYSSLISYEEDQRQGAEPRVNFVKPNETKTYFWKVQHHMAPTKDEFDCKAWAYFSDVDLEKDVHSGLIGPLLVCHTNTLNPAHGRQVTVQEFALFFTIFDETKSWYFTENMERNCRAPCNIQMEDPTFKENYRFHAINGYIMDTLPGLVMAQDQRIRWYLLSMGSNENIHSIHFSGHVFTVRKKEEYKMALYNLYPGVFETVEMLPSKAGIWRVECLIGEHLHAGMSTLFLVYSNKCQNPLGMASGHIRDFQITASGQYGQWAPKLARLHYSGSINAWSTKEPFSWIKVDLLAPMIIHGIKTQGARQKFSSLYISQFIIMYSLDGKKWQTYRGNSTGTDMVFFGNVDSSGIKHNIFNPPIIARYIRLHPTHYSIRSTLRMELMGCDLNSCSMPLGMESKAISDAQITASSYFTNMFATWSPSKARLHLQGRSNAWRPQVNNPKEWLQVDFQKTMKVTGVTTQGVKSLDTSMYVKEFLISSSQDGHQWTLFFQNGKVKVFQGNQDSFTPVVNSLDPPLLTRYLRIHPQSWEHQIALRMEVLGCEAQDLY

SEQ ID NO: 1319 - DNA, 4371 bp, synthetic construct
  misc_feature 1..4371: note = Variant of human B-domain deleted Factor VIII
  source 1..4371: mol_type = other DNA
atgcagattgaactgtctacctgcttcttcctctgtttgctgaggttctgctttagcgccactagacggtactaccttggcgctgtggagctgtcctgggactatatgcagagtgatttgggagagcttcccgtcgacgcacgatttcctcctcgcgttccaaagtcatttccctttaacacaagccaggtgtacaagaagacgctcttcgtcgaattcaccgatcacctgttcaatatcgccaaacccagaccaccatggatgggtcttttggggcctaccatacaagcggaggtgtatgacacagttgttatcactctcaagaacatggcttctcatccggtaagtcttcacgcagtgggcgtgtcctactggaaagcttcagaaggagccgagtatgatgatcagacatcccagagggagaaagaagacgacaaggtatttccaggtgggtctcatacctatgtgtggcaagtgctcaaagagaatggccctatggcaagcgatccgccgtgtttgacttacagctacctttcacacgttgacctcgtcaaggacctcaactccgggttgattggagccttgttggtatgcagggaaggatctcttgccaaagagaagacacagaccctccacaagtttatccttctctttgctgtgttcgatgagggcaaaagttggcatagcgaaacgaagaattccctcatgcaggatcgcgacgcagccagcgccagagcttggcccaagatgcacactgtgaacggatatgtcaataggacgcttcctggcttgattgggtgtcatcggaaaagtgtctactggcacgtgatcggaatggggacaacaccagaggtccactccatatttctcgaaggccataccttccttgttcgaaaccacagacaggcatccttggggatctctcccattacctttctcactgcccaaacgctccttatggacttgggtcagttccttctcttttgccatatcccgtcacaccagcatgatggtatggaagcttatgtgaaagtcgacagttgtcctgaggagccacagttgcgcatgaagaataatgaagaagccgaggattacgacgacgatctcaccgattctgagatggacgtggtgaggtttgatgacgacaactctccctccatcattcaagctcggagcggggcgaagaaacaccccaagacttgggtccactatatagcggcggaagaggaggattgggattacgctcctcttgtattggcaccagatgaccgctcatacaaaagccagtacctcaacaacggaccgcagagaattggccggaagtataagaaagtgcgatttatggcctatacagacgaaacctttaagacaagggaggccatccagcatgagagtgggattttgggacctcttctttacggcgaagttggtgataccctcctcatcatcttcaagaatcaagcttctcgcccctataacatttacccacacgggatcactgacgttaggcctttgtatagcagaagacttcccaaaggcgtgaagcatctcaaagacttccccattttgccaggcgagatctttaagtacaaatggaccgtcacagtggaagatggaccgactaaatcagaccctcgatgccttacgcggtactattcctccttcgtgaatatggagagagatttggcaagcggactcataggaccactcctcatctgttacaaggaatctgtagaccagaggggtaaccagattatgagtgataaacgcaatgtgatcctttttagcgtcttcgacgagaaccggtcctggtacttgaccgagaatatacaaaggttccttcccaaccccgcaggcgttcagttggaagaccctgagtttcaggccagcaatattatgcactcaatcaacggctatgtgtttgatagtctccagctttctgtttgcctccatgaagtagcctattggtacatcttgtcaattggtgctcaaacagacttcctctccgtcttcttctccggctacacctttaagcacaagatggtgtatgaggacactctcacactctttccattttctggagaaaccgtgttcatgagcatggagaatccaggcctttggatcttgggttgccacaacagtgattttcgcaatcggggaatgactgctctcctcaaagtcagcagctgtgattggaacacaggcgactattacgaagattcttacgaggacataagtgcctactttgactccaagaataacgccattgagcccagatcattctcccagaatcctcccgtgcttaaaaggcatcagcgcgaaggtaccagaactactcttcagtctgatcaagaggagattgactatgacgacaccattagcgtggaaatgaagaaggaggatttcgatatctatgacgaagatgagaaccagtctccgcggagctttcaggcgaagacgcgacactacttcattgcagcagtcgaaaggctttgggactacggtatgtcatcatcccctcatgtgttgcgcaatagagctcagagtggaagtgttccacagttcaagaaagtcgtctttcaagagtttacagatggcagcttcacacagcctctctatcggggcgagcttaacgaacatttgggactccttggtccctatatccgagccgaagtggaggacaacattatggttacctttaggaatcaagcctctcgcccctacagcttctactcctccctcatcagttatgaggaggatcagagacaaggcgctgaaccacggaagaactttgtgaaaccgaatgagacgaagacctacttctggaaagtacagcaccacatggcccccacaaaagacgaattcgattgcaaagcatgggcgtatttttcagacgttgacttggagaaagatgtacattcaggacttattggtcctttgttggtgtgtcacactaacactctcaatccagcccatggcaggcaggtgacagtccaggaattcgctcttttctttaccatctttgatgagaccaagtcctggtacttcacggaaaacatggagcgcaattgcagagccccctgtaacatacagatggaggaccctacctttaaggaaaattatcggttccacgcaatcaacggatacattatggatacactccctggccttgtgatggctcaggaccaacgaatcaggtggtacctcctcagcatgggttctaatgagaacatacactccattcacttttcaggacatgtgttcactgtccggaagaaagaagagtataagatggccctctacaatttgtatccaggcgtgtttgagaccgttgaaatgcttccctctaaagctggcatctggagagtagagtgcttgatcggagaacatcttcacgcaggtatgagcaccttgttcctcgtgtacagcaacaaatgtcagaatccacttggcatggccagtggacacattcgcgactttcagatcacagcatctggccagtatggacaatgggccccaaagttggctcgcctccattactccggtagcataaatgcgtggtccactaaagaacctttcagctggattaaggtcgatcttcttgcccccatgatcatccacggcattaagacacagggagcgaggcagaaattctcctccctctacatctcacagttcattattatgtatagtttggacggcaagaagtggcaaacttatagaggtaacagtactggaacagacatggtgttcttcggcaacgttgatagctctggcatcaaacacaacatctttaatcctcccataatagctcggtacatcagattgcatccgacccactacagcattaggagtacactccgaatggagcttatgggttgcgacttgaattcctgttcaatgccactcggaatggagtctaaagccatctctgatgcacagataaccgccagtagctactttacgaacatgtttgctacgtggtcaccctctaaggcaaggcttcatttgcaaggccggtctaatgcctggagacctcaggtgaacaacccgaaagaatggctccaggtggactttcagaagaccatgaaagtaacaggtgtcactactcagggagttaagtccttggatactagcatgtatgtgaaggagttccttatttcctcatcacaagatggccaccagtggaccctcttctttcagaatggtaaggtcaaagtgtttcagggcaatcaagacagcttcacacccgtggtgaacagtcttgatcctccactcttgacacgataccttcgaatccatccacagtcttgggagcaccagattgcattgcgcatggaagtacttggatgcgaggctcaggacctctac

SEQ ID NO: 1320 - protein, 1457 aa, synthetic construct
  REGION 1..1457: note = Variant of human B-domain deleted Factor VIII
MQIELSTCFFLCLLRFCFSATRRYYLGAVELSWDYMQSDLGELPVDARFPPRVPKSFPFNTSQVYKKTLFVEFTDHLFNIAKPRPPWMGLLGPTIQAEVYDTVVITLKNMASHPVSLHAVGVSYWKASEGAEYDDQTSQREKEDDKVFPGGSHTYVWQVLKENGPMASDPPCLTYSYLSHVDLVKDLNSGLIGALLVCREGSLAKEKTQTLHKFILLFAVFDEGKSWHSETKNSLMQDRDAASARAWPKMHTVNGYVNRTLPGLIGCHRKSVYWHVIGMGTTPEVHSIFLEGHTFLVRNHRQASLGISPITFLTAQTLLMDLGQFLLFCHIPSHQHDGMEAYVKVDSCPEEPQLRMKNNEEAEDYDDDLTDSEMDVVRFDDDNSPSIIQARSGAKKHPKTWVHYIAAEEEDWDYAPLVLAPDDRSYKSQYLNNGPQRIGRKYKKVRFMAYTDETFKTREAIQHESGILGPLLYGEVGDTLLIIFKNQASRPYNIYPHGITDVRPLYSRRLPKGVKHLKDFPILPGEIFKYKWTVTVEDGPTKSDPRCLTRYYSSFVNMERDLASGLIGPLLICYKESVDQRGNQIMSDKRNVILFSVFDENRSWYLTENIQRFLPNPAGVQLEDPEFQASNIMHSINGYVFDSLQLSVCLHEVAYWYILSIGAQTDFLSVFFSGYTFKHKMVYEDTLTLFPFSGETVFMSMENPGLWILGCHNSDFRNRGMTALLKVSSCDWNTGDYYEDSYEDISAYFDSKNNAIEPRSFSQNPPVLKRHQREGTRTTLQSDQEEIDYDDTISVEMKKEDFDIYDEDENQSPRSFQAKTRHYFIAAVERLWDYGMSSSPHVLRNRAQSGSVPQFKKVVFQEFTDGSFTQPLYRGELNEHLGLLGPYIRAEVEDNIMVTFRNQASRPYSFYSSLISYEEDQRQGAEPRKNFVKPNETKTYFWKVQHHMAPTKDEFDCKAWAYFSDVDLEKDVHSGLIGPLLVCHTNTLNPAHGRQVTVQEFALFFTIFDETKSWYFTENMERNCRAPCNIQMEDPTFKENYRFHAINGYIMDTLPGLVMAQDQRIRWYLLSMGSNENIHSIHFSGHVFTVRKKEEYKMALYNLYPGVFETVEMLPSKAGIWRVECLIGEHLHAGMSTLFLVYSNKCQNPLGMASGHIRDFQITASGQYGQWAPKLARLHYSGSINAWSTKEPFSWIKVDLLAPMIIHGIKTQGARQKFSSLYISQFIIMYSLDGKKWQTYRGNSTGTDMVFFGNVDSSGIKHNIFNPPIIARYIRLHPTHYSIRSTLRMELMGCDLNSCSMPLGMESKAISDAQITASSYFTNMFATWSPSKARLHLQGRSNAWRPQVNNPKEWLQVDFQKTMKVTGVTTQGVKSLDTSMYVKEFLISSSQDGHQWTLFFQNGKVKVFQGNQDSFTPVVNSLDPPLLTRYLRIHPQSWEHQIALRMEVLGCEAQDLY

SEQ ID NO: 1321 - DNA, 4371 bp, synthetic construct
  misc_feature 1..4371: note = Variant of human B-domain deleted Factor VIII
  source 1..4371: mol_type = other DNA
atgcagattgaactgtctacctgcttcttcctctgtttgctgaggttctgctttagcgccactagacggtactaccttggcgctgtggagctgtcctgggactatatgcagagtgatttgggagagcttcccgtcgacgcacgatttcctcctcgcgttccaaagtcatttccctttaacacaagccaggtgtacaagaagacgctcttcgtcgaattcaccgatcacctgttcaatatcgccaaacccagaccaccatggatgggtcttttggggcctaccatacaagcggaggtgtatgacacagttgttatcactctcaagaacatggcttctcatccggtaagtcttcacgcagtgggcgtgtcctactggaaagcttcagaaggagccgagtatgatgatcagacatcccagagggagaaagaagacgacaaggtatttccaggtgggtctcatacctatgtgtggcaagtgctcaaagagaatggccctatggcaagcgatccgccgtgtttgacttacagctacctttcacacgttgacctcgtcaaggacctcaactccgggttgattggagccttgttggtatgcagggaaggatctcttgccaaagagaagacacagaccctccacaagtttatccttctctttgctgtgttcgatgagggcaaaagttggcatagcgaaacgaagaattccctcatgcaggatcgcgacgcagccagcgccagagcttggcccaagatgcacactgtgaacggatatgtcaataggacgcttcctggcttgattgggtgtcatcggaaaagtgtctactggcacgtgatcggaatggggacaacaccagaggtccactccatatttctcgaaggccataccttccttgttcgaaaccacagacaggcatccttggggatctctcccattacctttctcactgcccaaacgctccttatggacttgggtcagttccttctcttttgccatatcccgtcacaccagcatgatggtatggaagcttatgtgaaagtcgacagttgtcctgaggagccacagttgcgcatgaagaataatgaagaagccgaggattacgacgacgatctcaccgattctgagatggacgtggtgaggtttgatgacgacaactctccctccatcattcaagctcggagcggggcgaagaaacaccccaagacttgggtccactatatagcggcggaagaggaggattgggattacgctcctcttgtattggcaccagatgaccgctcatacaaaagccagtacctcaacaacggaccgcagagaattggccggaagtataagaaagtgcgatttatggcctatacagacgaaacctttaagacaagggaggccatccagcatgagagtgggattttgggacctcttctttacggcgaagttggtgataccctcctcatcatcttcaagaatcaagcttctcgcccctataacatttacccacacgggatcactgacgttaggcctttgtatagcagaagacttcccaaaggcgtgaagcatctcaaagacttccccattttgccaggcgagatctttaagtacaaatggaccgtcacagtggaagatggaccgactaaatcagaccctcgatgccttacgcggtactattcctccttcgtgaatatggagagagatttggcaagcggactcataggaccactcctcatctgttacaaggaatctgtagaccagaggggtaaccagattatgagtgataaacgcaatgtgatcctttttagcgtcttcgacgagaaccggtcctggtacttgaccgagaatatacaaaggttccttcccaaccccgcaggcgttcagttggaagaccctgagtttcaggccagcaatattatgcactcaatcaacggctatgtgtttgatagtctccagctttctgtttgcctccatgaagtagcctattggtacatcttgtcaattggtgctcaaacagacttcctctccgtcttcttctccggctacacctttaagcacaagatggtgtatgaggacactctcacactctttccattttctggagaaaccgtgttcatgagcatggagaatccaggcctttggatcttgggttgccacaacagtgattttcgcaatcggggaatgactgctctcctcaaagtcagcagctgtgattggaacacaggcgactattacgaagattcttacgaggacataagtgcctactttgactccaagaataacgccattgagcccagatcattctcccagaatcctcccgtgcttaaaaggcatcagcgcgaaggtaccagaactactcttcagtctgatcaagaggagattgactatgacgacaccattagcgtggaaatgaagaaggaggatttcgatatctatgacgaagatgagaaccagtctccgcggagctttcagtcgaagacgcgacactacttcattgcagcagtcgaaaggctttgggactacggtatgtcatcatcccctcatgtgttgcgcaatagagctcagagtggaagtgttccacagttcaagaaagtcgtctttcaagagtttacagatggcagcttcacacagcctctctatcggggcgagcttaacgaacatttgggactccttggtccctatatccgagccgaagtggaggacaacattatggttacctttaggaatcaagcctctcgcccctacagcttctactcctccctcatcagttatgaggaggatcagagacaaggcgctgaaccacggaagaactttgtgaaaccgaatgagacgaagacctacttctggaaagtacagcaccacatggcccccacaaaagacgaattcgattgcaaagcatgggcgtatttttcagacgttgacttggagaaagatgtacattcaggacttattggtcctttgttggtgtgtcacactaacactctcaatccagcccatggcaggcaggtgacagtccaggaattcgctcttttctttaccatctttgatgagaccaagtcctggtacttcacggaaaacatggagcgcaattgcagagccccctgtaacatacagatggaggaccctacctttaaggaaaattatcggttccacgcaatcaacggatacattatggatacactccctggccttgtgatggctcaggaccaacgaatcaggtggtacctcctcagcatgggttctaatgagaacatacactccattcacttttcaggacatgtgttcactgtccggaagaaagaagagtataagatggccctctacaatttgtatccaggcgtgtttgagaccgttgaaatgcttccctctaaagctggcatctggagagtagagtgcttgatcggagaacatcttcacgcaggtatgagcaccttgttcctcgtgtacagcaacaaatgtcagaatccacttggcatggccagtggacacattcgcgactttcagatcacagcatctggccagtatggacaatgggccccaaagttggctcgcctccattactccggtagcataaatgcgtggtccactaaagaacctttcagctggattaaggtcgatcttcttgcccccatgatcatccacggcattaagacacagggagcgaggcagaaattctcctccctctacatctcacagttcattattatgtatagtttggacggcaagaagtggcaaacttatagaggtaacagtactggaacagacatggtgttcttcggcaacgttgatagctctggcatcaaacacaacatctttaatcctcccataatagctcggtacatcagattgcatccgacccactacagcattaggagtacactccgaatggagcttatgggttgcgacttgaattcctgttcaatgccactcggaatggagtctaaagccatctctgatgcacagataaccgccagtagctactttacgaacatgtttgctacgtggtcaccctctaaggcaaggcttcatttgcaaggccggtctaatgcctggagacctcaggtgaacaacccgaaagaatggctccaggtggactttcagaagaccatgaaagtaacaggtgtcactactcagggagttaagtccttggatactagcatgtatgtgaaggagttccttatttcctcatcacaagatggccaccagtggaccctcttctttcagaatggtaaggtcaaagtgtttcagggcaatcaagacagcttcacacccgtggtgaacagtcttgatcctccactcttgacacgataccttcgaatccatccacagtcttgggagcaccagattgcattgcgcatggaagtacttggatgcgaggctcaggacctctac

SEQ ID NO: 1322 - protein, 1457 aa, synthetic construct
  REGION 1..1457: note = Variant of human B-domain deleted Factor VIII
MQIELSTCFFLCLLRFCFSATRRYYLGAVELSWDYMQSDLGELPVDARFPPRVPKSFPFNTSQVYKKTLFVEFTDHLFNIAKPRPPWMGLLGPTIQAEVYDTVVITLKNMASHPVSLHAVGVSYWKASEGAEYDDQTSQREKEDDKVFPGGSHTYVWQVLKENGPMASDPPCLTYSYLSHVDLVKDLNSGLIGALLVCREGSLAKEKTQTLHKFILLFAVFDEGKSWHSETKNSLMQDRDAASARAWPKMHTVNGYVNRTLPGLIGCHRKSVYWHVIGMGTTPEVHSIFLEGHTFLVRNHRQASLGISPITFLTAQTLLMDLGQFLLFCHIPSHQHDGMEAYVKVDSCPEEPQLRMKNNEEAEDYDDDLTDSEMDVVRFDDDNSPSIIQARSGAKKHPKTWVHYIAAEEEDWDYAPLVLAPDDRSYKSQYLNNGPQRIGRKYKKVRFMAYTDETFKTREAIQHESGILGPLLYGEVGDTLLIIFKNQASRPYNIYPHGITDVRPLYSRRLPKGVKHLKDFPILPGEIFKYKWTVTVEDGPTKSDPRCLTRYYSSFVNMERDLASGLIGPLLICYKESVDQRGNQIMSDKRNVILFSVFDENRSWYLTENIQRFLPNPAGVQLEDPEFQASNIMHSINGYVFDSLQLSVCLHEVAYWYILSIGAQTDFLSVFFSGYTFKHKMVYEDTLTLFPFSGETVFMSMENPGLWILGCHNSDFRNRGMTALLKVSSCDWNTGDYYEDSYEDISAYFDSKNNAIEPRSFSQNPPVLKRHQREGTRTTLQSDQEEIDYDDTISVEMKKEDFDIYDEDENQSPRSFQSKTRHYFIAAVERLWDYGMSSSPHVLRNRAQSGSVPQFKKVVFQEFTDGSFTQPLYRGELNEHLGLLGPYIRAEVEDNIMVTFRNQASRPYSFYSSLISYEEDQRQGAEPRKNFVKPNETKTYFWKVQHHMAPTKDEFDCKAWAYFSDVDLEKDVHSGLIGPLLVCHTNTLNPAHGRQVTVQEFALFFTIFDETKSWYFTENMERNCRAPCNIQMEDPTFKENYRFHAINGYIMDTLPGLVMAQDQRIRWYLLSMGSNENIHSIHFSGHVFTVRKKEEYKMALYNLYPGVFETVEMLPSKAGIWRVECLIGEHLHAGMSTLFLVYSNKCQNPLGMASGHIRDFQITASGQYGQWAPKLARLHYSGSINAWSTKEPFSWIKVDLLAPMIIHGIKTQGARQKFSSLYISQFIIMYSLDGKKWQTYRGNSTGTDMVFFGNVDSSGIKHNIFNPPIIARYIRLHPTHYSIRSTLRMELMGCDLNSCSMPLGMESKAISDAQITASSYFTNMFATWSPSKARLHLQGRSNAWRPQVNNPKEWLQVDFQKTMKVTGVTTQGVKSLDTSMYVKEFLISSSQDGHQWTLFFQNGKVKVFQGNQDSFTPVVNSLDPPLLTRYLRIHPQSWEHQIALRMEVLGCEAQDLY

SEQ ID NO: 1323 - DNA, 4371 bp, synthetic construct
  misc_feature 1..4371: note = Variant of human B-domain deleted Factor VIII
  source 1..4371: mol_type = other DNA
atgcagattgaactgtctacctgcttcttcctctgtttgctgaggttctgctttagcgccactagacggtactaccttggcgctgtggagctgtcctgggactatatgcagagtgatttgggagagcttcccgtcgacgcacgatttcctcctcgcgttccaaagtcatttccctttaacacaagccaggtgtacaagaagacgctcttcgtcgaattcaccgatcacctgttcaatatcgccaaacccagaccaccatggatgggtcttttggggcctaccatacaagcggaggtgtatgacacagttgttatcactctcaagaacatggcttctcatccggtaagtcttcacgcagtgggcgtgtcctactggaaagcttcagaaggagccgagtatgatgatcagacatcccagagggagaaagaagacgacaaggtatttccaggtgggtctcatacctatgtgtggcaagtgctcaaagagaatggccctatggcaagcgatccgccgtgtttgacttacagctacctttcacacgttgacctcgtcaaggacctcaactccgggttgattggagccttgttggtatgcagggaaggatctcttgccaaagagaagacacagaccctccacaagtttatccttctctttgctgtgttcgatgagggcaaaagttggcatagcgaaacgaagaattccctcatgcaggatcgcgacgcagccagcgccagagcttggcccaagatgcacactgtgaacggatatgtcaataggacgcttcctggcttgattgggtgtcatcggaaaagtgtctactggcacgtgatcggaatggggacaacaccagaggtccactccatatttctcgaaggccataccttccttgttcgaaaccacagacaggcatccttggggatctctcccattacctttctcactgcccaaacgctccttatggacttgggtcagttccttctcttttgccatatcccgtcacaccagcatgatggtatggaagcttatgtgaaagtcgacagttgtcctgaggagccacagttgcgcatgaagaataatgaagaagccgaggattacgacgacgatctcaccgattctgagatggacgtggtgaggtttgatgacgacaactctccctccatcattcaagctcggagcggggcgaagaaacaccccaagacttgggtccactatatagcggcggaagaggaggattgggattacgctcctcttgtattggcaccagatgaccgctcatacaaaagccagtacctcaacaacggaccgcagagaattggccggaagtataagaaagtgcgatttatggcctatacagacgaaacctttaagacaagggaggccatccagcatgagagtgggattttgggacctcttctttacggcgaagttggtgataccctcctcatcatcttcaagaatcaagcttctcgcccctataacatttacccacacgggatcactgacgttaggcctttgtatagcagaagacttcccaaaggcgtgaagcatctcaaagacttccccattttgccaggcgagatctttaagtacaaatggaccgtcacagtggaagatggaccgactaaatcagaccctcgatgccttacgcggtactattcctccttcgtgaatatggagagagatttggcaagcggactcataggaccactcctcatctgttacaaggaatctgtagaccagaagggtaaccagattatgagtgataaacgcaatgtgatcctttttagcgtcttcgacgagaaccggtcctggtacttgaccgagaatatacaaaggttccttcccaaccccgcaggcgttcagttggaagaccctgagtttcaggccagcaatattatgcactcaatcaacggctatgtgtttgatagtctccagctttctgtttgcctccatgaagtagcctattggtacatcttgtcaattggtgctcaaacagacttcctctccgtcttcttctccggctacacctttaagcacaagatggtgtatgaggacactctcacactctttccattttctggagaaaccgtgttcatgagcatggagaatccaggcctttggatcttgggttgccacaacagtgattttcgcaatcggggaatgactgctctcctcaaagtcagcagctgtgattggaacacaggcgactattacgaagattcttacgaggacataagtgcctactttgactccaagaataacgccattgagcccagatcattctcccagaatcctcccgtgcttaaaaggcatcagcgcgaaggtaccagaactactcttcagtctgatcaagaggagattgactatgacgacaccattagcgtggaaatgaagaaggaggatttcgatatctatgacgaagatgagaaccagtctccgcggagctttcagaagaagacgcgacactacttcattgcagcagtcgaaaggctttgggactacggtatgtcatcatcccctcatgtgttgcgcaatagagctcagagtggaagtgttccacagttcaagaaagtcgtctttcaagagtttacagatggcagcttcacacagcctctctatcggggcgagcttaacgaacatttgggactccttggtccctatatccgagccgaagtggaggacaacattatggttacctttaggaatcaagcctctcgcccctacagcttctactcctccctcatcagttatgaggaggatcagagacaaggcgctgaaccacggaagaactttgtgaaaccgaatgagacgaagacctacttctggaaagtacagcaccacatggcccccacaaaagacgaattcgattgcaaagcatgggcgtatttttcagacgttgacttggagaaagatgtacattcaggacttattggtcctttgttggtgtgtcacactaacactctcaatccagcccatggcaggcaggtgacagtccaggaattcgctcttttctttaccatctttgatgagaccaagtcctggtacttcacggaaaacatggagcgcaattgcagagccccctgtaacatacagatggaggaccctacctttaaggaaaattatcggttccacgcaatcaacggatacattatggatacactccctggccttgtgatggctcaggaccaacgaatcaggtggtacctcctcagcatgggttctaatgagaacatacactccattcacttttcaggacatgtgttcactgtccggaagaaagaagagtataagatggccctctacaatttgtatccaggcgtgtttgagaccgttgaaatgcttccctctaaagctggcatctggagagtagagtgcttgatcggagaacatcttcacgcaggtatgagcaccttgttcctcgtgtacagcaacaaatgtcagaatccacttggcatggccagtggacacattcgcgactttcagatcacagcatctggccagtatggacaatgggccccaaagttggctcgcctccattactccggtagcataaatgcgtggtccactaaagaacctttcagctggattaaggtcgatcttcttgcccccatgatcatccacggcattaagacacagggagcgaggcagaaattctcctccctctacatctcacagttcattattatgtatagtttggacggcaagaagtggcaaacttatagaggtaacagtactggaacagacatggtgttcttcggcaacgttgatagctctggcatcaaacacaacatctttaatcctcccataatagctcggtacatcagattgcatccgacccactacagcattaggagtacactccgaatggagcttatgggttgcgacttgaattcctgttcaatgccactcggaatggagtctaaagccatctctgatgcacagataaccgccagtagctactttacgaacatgtttgctacgtggtcaccctctaaggcaaggcttcatttgcaaggccggtctaatgcctggagacctcaggtgaacaacccgaaagaatggctccaggtggactttcagaagaccatgaaagtaacaggtgtcactactcagggagttaagtccttggatactagcatgtatgtgaaggagttccttatttcctcatcacaagatggccaccagtggaccctcttctttcagaatggtaaggtcaaagtgtttcagggcaatcaagacagcttcacacccgtggtgaacagtcttgatcctccactcttgacacgataccttcgaatccatccacagtcttgggagcaccagattgcattgcgcatggaagtacttggatgcgaggctcaggacctctac

SEQ ID NO: 1324 - protein, 1457 aa, synthetic construct
  REGION 1..1457: note = Variant of human B-domain deleted Factor VIII
MQIELSTCFFLCLLRFCFSATRRYYLGAVELSWDYMQSDLGELPVDARFPPRVPKSFPFNTSQVYKKTLFVEFTDHLFNIAKPRPPWMGLLGPTIQAEVYDTVVITLKNMASHPVSLHAVGVSYWKASEGAEYDDQTSQREKEDDKVFPGGSHTYVWQVLKENGPMASDPPCLTYSYLSHVDLVKDLNSGLIGALLVCREGSLAKEKTQTLHKFILLFAVFDEGKSWHSETKNSLMQDRDAASARAWPKMHTVNGYVNRTLPGLIGCHRKSVYWHVIGMGTTPEVHSIFLEGHTFLVRNHRQASLGISPITFLTAQTLLMDLGQFLLFCHIPSHQHDGMEAYVKVDSCPEEPQLRMKNNEEAEDYDDDLTDSEMDVVRFDDDNSPSIIQARSGAKKHPKTWVHYIAAEEEDWDYAPLVLAPDDRSYKSQYLNNGPQRIGRKYKKVRFMAYTDETFKTREAIQHESGILGPLLYGEVGDTLLIIFKNQASRPYNIYPHGITDVRPLYSRRLPKGVKHLKDFPILPGEIFKYKWTVTVEDGPTKSDPRCLTRYYSSFVNMERDLASGLIGPLLICYKESVDQKGNQIMSDKRNVILFSVFDENRSWYLTENIQRFLPNPAGVQLEDPEFQASNIMHSINGYVFDSLQLSVCLHEVAYWYILSIGAQTDFLSVFFSGYTFKHKMVYEDTLTLFPFSGETVFMSMENPGLWILGCHNSDFRNRGMTALLKVSSCDWNTGDYYEDSYEDISAYFDSKNNAIEPRSFSQNPPVLKRHQREGTRTTLQSDQEEIDYDDTISVEMKKEDFDIYDEDENQSPRSFQKKTRHYFIAAVERLWDYGMSSSPHVLRNRAQSGSVPQFKKVVFQEFTDGSFTQPLYRGELNEHLGLLGPYIRAEVEDNIMVTFRNQASRPYSFYSSLISYEEDQRQGAEPRKNFVKPNETKTYFWKVQHHMAPTKDEFDCKAWAYFSDVDLEKDVHSGLIGPLLVCHTNTLNPAHGRQVTVQEFALFFTIFDETKSWYFTENMERNCRAPCNIQMEDPTFKENYRFHAINGYIMDTLPGLVMAQDQRIRWYLLSMGSNENIHSIHFSGHVFTVRKKEEYKMALYNLYPGVFETVEMLPSKAGIWRVECLIGEHLHAGMSTLFLVYSNKCQNPLGMASGHIRDFQITASGQYGQWAPKLARLHYSGSINAWSTKEPFSWIKVDLLAPMIIHGIKTQGARQKFSSLYISQFIIMYSLDGKKWQTYRGNSTGTDMVFFGNVDSSGIKHNIFNPPIIARYIRLHPTHYSIRSTLRMELMGCDLNSCSMPLGMESKAISDAQITASSYFTNMFATWSPSKARLHLQGRSNAWRPQVNNPKEWLQVDFQKTMKVTGVTTQGVKSLDTSMYVKEFLISSSQDGHQWTLFFQNGKVKVFQGNQDSFTPVVNSLDPPLLTRYLRIHPQSWEHQIALRMEVLGCEAQDLY

SEQ ID NO: 1325 - DNA, 4371 bp, synthetic construct
  misc_feature 1..4371: note = Variant of human B-domain deleted Factor VIII
  source 1..4371: mol_type = other DNA
atgcagattgaactgtctacctgcttcttcctctgtttgctgaggttctgctttagcgccactagacggtactaccttggcgctgtggagctgtcctgggactatatgcagagtgatttgggagagcttcccgtcgacgcacgatttcctcctcgcgttccaaagtcatttccctttaacacaagccaggtgtacaagaagacgctcttcgtcgaattcaccgatcacctgttcaatatcgccaaacccagaccaccatggatgggtcttttggggcctaccatacaagcggaggtgtatgacacagttgttatcactctcaagaacatggcttctcatccggtaagtcttcacgcagtgggcgtgtcctactggaaagcttcagaaggagccgagtatgatgatcagacatcccagagggagaaagaagacgacaaggtatttccaggtgggtctcatacctatgtgtggcaagtgctcaaagagaatggccctatggcaagcgatccgccgtgtttgacttacagctacctttcacacgttgacctcgtcaaggacctcaactccgggttgattggagccttgttggtatgcagggaaggatctcttgccaaagagaagacacagaccctccacaagtttatccttctctttgctgtgttcgatgagggcaaaagttggcatagcgaaacgaagaattccctcatgcaggatcgcgacgcagccagcgccagagcttggcccaagatgcacactgtgaacggatatgtcaataggacgcttcctggcttgattgggtgtcatcggaaaagtgtctactggcacgtgatcggaatggggacaacaccagaggtccactccatatttctcgaaggccataccttccttgttcgaaaccacagacaggcatccttggggatctctcccattacctttctcactgcccaaacgctccttatggacttgggtcagttccttctcttttgccatatcccgtcacaccagcatgatggtatggaagcttatgtgaaagtcgacagttgtcctgaggagccacagttgcgcatgaagaataatgaagaagccgaggattacgacgacgatctcaccgattctgagatggacgtggtgaggtttgatgacgacaactctccctccatcattcaagctcggagcggggcgaagaaacaccccaagacttgggtccactatatagcggcggaagaggaggattgggattacgctcctcttgtattggcaccagatgaccgctcatacaaaagccagtacctcaacaacggaccgcagagaattggccggaagtataagaaagtgcgatttatggcctatacagacgaaacctttaagacaagggaggccatccagcatgagagtgggattttgggacctcttctttacggcgaagttggtgataccctcctcatcatcttcaagaatcaagcttctcgcccctataacatttacccacacgggatcactgacgttaggcctttgtatagcagaagacttcccaaaggcgtgaagcatctcaaagacttccccattttgccaggcgagatctttaagtacaaatggaccgtcacagtggaagatggaccgactaaatcagaccctcgatgccttacgcggtactattcctccttcgtgaatatggagagagatttggcaagcggactcataggaccactcctcatctgttacaaggaatctgtagaccagaggggtaaccagattatgagtgataaacgcaatgtgatcctttttagcgtcttcgacgagaaccggtcctggtacttgaccgagaatatacaaaggttccttcccaaccccgcaggcgttcagttggaagaccctgagtttcaggccagcaatattatgcactcaatcaacggctatgtgtttgatagtctccagctttctgtttgcctccatgaagtagcctattggtacatcttgtcaattggtgctcaaacagacttcctctccgtcttcttctccggctacacctttaagcacaagatggtgtatgaggacactctcacactctttccattttctggagaaaccgtgttcatgagcatggagaatccaggcctttggatcttgggttgccacaacagtgattttcgcaatcggggaatgactgctctcctcaaagtcagcagctgtgattggaacacaggcgactattacgaagattcttacgaggacataagtgcctactttgactccaagaataacgccattgagcccagatcattctcccagaatcctcccgtgcttaaaaggcatcagcgcgaaggtaccagaactactcttcagtctgatcaagaggagattgactatgacgacaccattagcgtggaaatgaagaaggaggatttcgatatctatgacgaagatgagaaccagtctccgcggagctttcagcctaagacgcgacactacttcattgcagcagtcgaaaggctttgggactacggtatgtcatcatcccctcatgtgttgcgcaatagagctcagagtggaagtgttccacagttcaagaaagtcgtctttcaagagtttacagatggcagcttcacacagcctctctatcggggcgagcttaacgaacatttgggactccttggtccctatatccgagccgaagtggaggacaacattatggttacctttaggaatcaagcctctcgcccctacagcttctactcctccctcatcagttatgaggaggatcagagacaaggcgctgaaccacggaagaactttgtgaaaccgaatgagacgaagacctacttctggaaagtacagcaccacatggcccccacaaaagacgaattcgattgcaaagcatgggcgtatttttcagacgttgacttggagaaagatgtacattcaggacttattggtcctttgttggtgtgtcacactaacactctcaatccagcccatggcaggcaggtgacagtccaggaattcgctcttttctttaccatctttgatgagaccaagtcctggtacttcacggaaaacatggagcgcaattgcagagccccctgtaacatacagatggaggaccctacctttaaggaaaattatcggttccacgcaatcaacggatacattatggatacactccctggccttgtgatggctcaggaccaacgaatcaggtggtacctcctcagcatgggttctaatgagaacatacactccattcacttttcaggacatgtgttcactgtccggaagaaagaagagtataagatggccctctacaatttgtatccaggcgtgtttgagaccgttgaaatgcttccctctaaagctggcatctggagagtagagtgcttgatcggagaacatcttcacgcaggtatgagcaccttgttcctcgtgtacagcaacaaatgtcagaatccacttggcatggccagtggacacattcgcgactttcagatcacagcatctggccagtatggacaatgggccccaaagttggctcgcctccattactccggtagcataaatgcgtggtccactaaagaacctttcagctggattaaggtcgatcttcttgcccccatgatcatccacggcattaagacacagggagcgaggcagaaattctcctccctctacatctcacagttcattattatgtatagtttggacggcaagaagtggcaaacttatagaggtaacagtactggaacagacatggtgttcttcggcaacgttgatagctctggcatcaaacacaacatctttaatcctcccataatagctcggtacatcagattgcatccgacccactacagcattaggagtacactccgaatggagcttatgggttgcgacttgaattcctgttcaatgccactcggaatggagtctaaagccatctctgatgcacagataaccgccagtagctactttacgaacatgtttgctacgtggtcaccctctaaggcaaggcttcatttgcaaggccggtctaatgcctggagacctcaggtgaacaacccgaaagaatggctccaggtggactttcagaagaccatgaaagtaacaggtgtcactactcagggagttaagtccttggatactagcatgtatgtgaaggagttccttatttcctcatcacaagatggccaccagtggaccctcttctttcagaatggtaaggtcaaagtgtttcagggcaatcaagacagcttcacacccgtggtgaacagtcttgatcctccactcttgacacgataccttcgaatccatccacagtcttgggagcaccagattgcattgcgcatggaagtacttggatgcgaggctcaggacctctac

SEQ ID NO: 1326 - protein, 1457 aa, synthetic construct
  REGION 1..1457: note = Variant of human B-domain deleted Factor VIII
MQIELSTCFFLCLLRFCFSATRRYYLGAVELSWDYMQSDLGELPVDARFPPRVPKSFPFNTSQVYKKTLFVEFTDHLFNIAKPRPPWMGLLGPTIQAEVYDTVVITLKNMASHPVSLHAVGVSYWKASEGAEYDDQTSQREKEDDKVFPGGSHTYVWQVLKENGPMASDPPCLTYSYLSHVDLVKDLNSGLIGALLVCREGSLAKEKTQTLHKFILLFAVFDEGKSWHSETKNSLMQDRDAASARAWPKMHTVNGYVNRTLPGLIGCHRKSVYWHVIGMGTTPEVHSIFLEGHTFLVRNHRQASLGISPITFLTAQTLLMDLGQFLLFCHIPSHQHDGMEAYVKVDSCPEEPQLRMKNNEEAEDYDDDLTDSEMDVVRFDDDNSPSIIQARSGAKKHPKTWVHYIAAEEEDWDYAPLVLAPDDRSYKSQYLNNGPQRIGRKYKKVRFMAYTDETFKTREAIQHESGILGPLLYGEVGDTLLIIFKNQASRPYNIYPHGITDVRPLYSRRLPKGVKHLKDFPILPGEIFKYKWTVTVEDGPTKSDPRCLTRYYSSFVNMERDLASGLIGPLLICYKESVDQRGNQIMSDKRNVILFSVFDENRSWYLTENIQRFLPNPAGVQLEDPEFQASNIMHSINGYVFDSLQLSVCLHEVAYWYILSIGAQTDFLSVFFSGYTFKHKMVYEDTLTLFPFSGETVFMSMENPGLWILGCHNSDFRNRGMTALLKVSSCDWNTGDYYEDSYEDISAYFDSKNNAIEPRSFSQNPPVLKRHQREGTRTTLQSDQEEIDYDDTISVEMKKEDFDIYDEDENQSPRSFQPKTRHYFIAAVERLWDYGMSSSPHVLRNRAQSGSVPQFKKVVFQEFTDGSFTQPLYRGELNEHLGLLGPYIRAEVEDNIMVTFRNQASRPYSFYSSLISYEEDQRQGAEPRKNFVKPNETKTYFWKVQHHMAPTKDEFDCKAWAYFSDVDLEKDVHSGLIGPLLVCHTNTLNPAHGRQVTVQEFALFFTIFDETKSWYFTENMERNCRAPCNIQMEDPTFKENYRFHAINGYIMDTLPGLVMAQDQRIRWYLLSMGSNENIHSIHFSGHVFTVRKKEEYKMALYNLYPGVFETVEMLPSKAGIWRVECLIGEHLHAGMSTLFLVYSNKCQNPLGMASGHIRDFQITASGQYGQWAPKLARLHYSGSINAWSTKEPFSWIKVDLLAPMIIHGIKTQGARQKFSSLYISQFIIMYSLDGKKWQTYRGNSTGTDMVFFGNVDSSGIKHNIFNPPIIARYIRLHPTHYSIRSTLRMELMGCDLNSCSMPLGMESKAISDAQITASSYFTNMFATWSPSKARLHLQGRSNAWRPQVNNPKEWLQVDFQKTMKVTGVTTQGVKSLDTSMYVKEFLISSSQDGHQWTLFFQNGKVKVFQGNQDSFTPVVNSLDPPLLTRYLRIHPQSWEHQIALRMEVLGCEAQDLY

SEQ ID NO: 1327 - DNA, 4371 bp, synthetic construct
  misc_feature 1..4371: note = Variant of human B-domain deleted Factor VIII
  source 1..4371: mol_type = other DNA
atgcagattgaactgtctacctgcttcttcctctgtttgctgaggttctgctttagcgccactagacggtactaccttggcgctgtggagctgtcctgggactatatgcagagtgatttgggagagcttcccgtcgacgcacgatttcctcctcgcgttccaaagtcatttccctttaacacaagccaggtgtacaagaagacgctcttcgtcgaattcaccgatcacctgttcaatatcgccaaacccagaccaccatggatgggtcttttggggcctaccatacaagcggaggtgtatgacacagttgttatcactctcaagaacatggcttctcatccggtaagtcttcacgcagtgggcgtgtcctactggaaagcttcagaaggagccgagtatgatgatcagacatcccagagggagaaagaagacgacaaggtatttccaggtgggtctcatacctatgtgtggcaagtgctcaaagagaatggccctatggcaagcgatccgccgtgtttgacttacagctacctttcacacgttgacctcgtcaaggacctcaactccgggttgattggagccttgttggtatgcagggaaggatctcttgccaaagagaagacacagaccctccacaagtttatccttctctttgctgtgttcgatgagggcaaaagttggcatagcgaaacgaagaattccctcatgcaggatcgcgacgcagccagcgccagagcttggcccaagatgcacactgtgaacggatatgtcaataggacgcttcctggcttgattgggtgtcatcggaaaagtgtctactggcacgtgatcggaatggggacaacaccagaggtccactccatatttctcgaaggccataccttccttgttcgaaaccacagacaggcatccttggggatctctcccattacctttctcactgcccaaacgctccttatggacttgggtcagttccttctcttttgccatatcccgtcacaccagcatgatggtatggaagcttatgtgaaagtcgacagttgtcctgaggagccacagttgcgcatgaagaataatgaagaagccgaggattacgacgacgatctcaccgattctgagatggacgtggtgaggtttgatgacgacaactctccctccatcattcaagctcggagcggggcgaagaaacaccccaagacttgggtccactatatagcggcggaagaggaggattgggattacgctcctcttgtattggcaccagatgaccgctcatacaaaagccagtacctcaacaacggaccgcagagaattggccggaagtataagaaagtgcgatttatggcctatacagacgaaacctttaagacaagggaggccatccagcatgagagtgggattttgggacctcttctttacggcgaagttggtgataccctcctcatcatcttcaagaatcaagcttctcgcccctataacatttacccacacgggatcactgacgttaggcctttgtatagcagaagacttcccaaaggcgtgaagcatctcaaagacttccccattttgccaggcgagatctttaagtacaaatggaccgtcacagtggaagatggaccgactaaatcagaccctcgatgccttacgcggtactattcctccttcgtgaatatggagagagatttggcaagcggactcataggaccactcctcatctgttacaaggaatctgtagaccagaggggtaaccagattatgagtgataaacgcaatgtgatcctttttagcgtcttcgacgagaaccggtcctggtacttgaccgagaatatacaaaggttccttcccaaccccgcaggcgttcagttggaagaccctgagtttcaggccagcaatattatgcactcaatcaacggctatgtgtttgatagtctccagctttctgtttgcctccatgaagtagcctattggtacatcttgtcaattggtgctcaaacagacttcctctccgtcttcttctccggctacacctttaagcacaagatggtgtatgaggacactctcacactctttccattttctggagaaaccgtgttcatgagcatggagaatccaggcctttggatcttgggttgccacaacagtgattttcgcaatcggggaatgactgctctcctcaaagtcagcagctgtgattggaacacaggcgactattacgaagattcttacgaggacataagtgcctactttgactccaagaataacgccattgagcccagatcattctcccagaatcctcccgtgcttaaaaggcatcagcgcgaaggtaccagaactactcttcagtctgatcaagaggagattgactatgacgacaccattagcgtggaaatgaagaaggaggatttcgatatctatgacgaagatgagaaccagtctccgcggagctttcagaagaagacgcgacactacttcattgcagcagtcgaaaggctttgggactacggtatgtcatcatcccctcatgtgttgcgcaatagagctcagagtggaagtgttccacagttcaagaaagtcgtctttcaagagtttacagatggcagcttcacacagcctctctatcggggcgagcttaacgaacatttgggactccttggtccctatatccgagccgaagtggaggacaacattatggttacctttaggaatcaagcctctcgcccctacagcttctactcctccctcatcaagtatgaggaggatcagagacaaggcgctgaaccacggaagaactttgtgaaaccgaatgagacgaagacctacttctggaaagtacagcaccacatggcccccacaaaagacgaattcgattgcaaagcatgggcgtatttttcagacgttgacttggagaaagatgtacattcaggacttattggtcctttgttggtgtgtcacactaacactctcaatccagcccatggcaggcaggtgacagtccaggaattcgctcttttctttaccatctttgatgagaccaagtcctggtacttcacggaaaacatggagcgcaattgcagagccccctgtaacatacagatggaggaccctacctttaaggaaaattatcggttccacgcaatcaacggatacattatggatacactccctggccttgtgatggctcaggaccaacgaatcaggtggtacctcctcagcatgggttctaatgagaacatacactccattcacttttcaggacatgtgttcactgtccggaagaaagaagagtataagatggccctctacaatttgtatccaggcgtgtttgagaccgttgaaatgcttccctctaaagctggcatctggagagtagagtgcttgatcggagaacatcttcacgcaggtatgagcaccttgttcctcgtgtacagcaacaaatgtcagaatccacttggcatggccagtggacacattcgcgactttcagatcacagcatctggccagtatggacaatgggccccaaagttggctcgcctccattactccggtagcataaatgcgtggtccactaaagaacctttcagctggattaaggtcgatcttcttgcccccatgatcatccacggcattaagacacagggagcgaggcagaaattctcctccctctacatctcacagttcattattatgtatagtttggacggcaagaagtggcaaacttatagaggtaacagtactggaacagacatggtgttcttcggcaacgttgatagctctggcatcaaacacaacatctttaatcctcccataatagctcggtacatcagattgcatccgacccactacagcattaggagtacactccgaatggagcttatgggttgcgacttgaattcctgttcaatgccactcggaatggagtctaaagccatctctgatgcacagataaccgccagtagctactttacgaacatgtttgctacgtggtcaccctctaaggcaaggcttcatttgcaaggccggtctaatgcctggagacctcaggtgaacaacccgaaagaatggctccaggtggactttcagaagaccatgaaagtaacaggtgtcactactcagggagttaagtccttggatactagcatgtatgtgaaggagttccttatttcctcatcacaagatggccaccagtggaccctcttctttcagaatggtaaggtcaaagtgtttcagggcaatcaagacagcttcacacccgtggtgaacagtcttgatcctccactcttgacacgataccttcgaatccatccacagtcttgggagcaccagattgcattgcgcatggaagtacttggatgcgaggctcaggacctctac

SEQ ID NO: 1328 - protein, 1457 aa, synthetic construct
  REGION 1..1457: note = Variant of human B-domain deleted Factor VIII
MQIELSTCFFLCLLRFCFSATRRYYLGAVELSWDYMQSDLGELPVDARFPPRVPKSFPFNTSQVYKKTLFVEFTDHLFNIAKPRPPWMGLLGPTIQAEVYDTVVITLKNMASHPVSLHAVGVSYWKASEGAEYDDQTSQREKEDDKVFPGGSHTYVWQVLKENGPMASDPPCLTYSYLSHVDLVKDLNSGLIGALLVCREGSLAKEKTQTLHKFILLFAVFDEGKSWHSETKNSLMQDRDAASARAWPKMHTVNGYVNRTLPGLIGCHRKSVYWHVIGMGTTPEVHSIFLEGHTFLVRNHRQASLGISPITFLTAQTLLMDLGQFLLFCHIPSHQHDGMEAYVKVDSCPEEPQLRMKNNEEAEDYDDDLTDSEMDVVRFDDDNSPSIIQARSGAKKHPKTWVHYIAAEEEDWDYAPLVLAPDDRSYKSQYLNNGPQRIGRKYKKVRFMAYTDETFKTREAIQHESGILGPLLYGEVGDTLLIIFKNQASRPYNIYPHGITDVRPLYSRRLPKGVKHLKDFPILPGEIFKYKWTVTVEDGPTKSDPRCLTRYYSSFVNMERDLASGLIGPLLICYKESVDQRGNQIMSDKRNVILFSVFDENRSWYLTENIQRFLPNPAGVQLEDPEFQASNIMHSINGYVFDSLQLSVCLHEVAYWYILSIGAQTDFLSVFFSGYTFKHKMVYEDTLTLFPFSGETVFMSMENPGLWILGCHNSDFRNRGMTALLKVSSCDWNTGDYYEDSYEDISAYFDSKNNAIEPRSFSQNPPVLKRHQREGTRTTLQSDQEEIDYDDTISVEMKKEDFDIYDEDENQSPRSFQKKTRHYFIAAVERLWDYGMSSSPHVLRNRAQSGSVPQFKKVVFQEFTDGSFTQPLYRGELNEHLGLLGPYIRAEVEDNIMVTFRNQASRPYSFYSSLIKYEEDQRQGAEPRKNFVKPNETKTYFWKVQHHMAPTKDEFDCKAWAYFSDVDLEKDVHSGLIGPLLVCHTNTLNPAHGRQVTVQEFALFFTIFDETKSWYFTENMERNCRAPCNIQMEDPTFKENYRFHAINGYIMDTLPGLVMAQDQRIRWYLLSMGSNENIHSIHFSGHVFTVRKKEEYKMALYNLYPGVFETVEMLPSKAGIWRVECLIGEHLHAGMSTLFLVYSNKCQNPLGMASGHIRDFQITASGQYGQWAPKLARLHYSGSINAWSTKEPFSWIKVDLLAPMIIHGIKTQGARQKFSSLYISQFIIMYSLDGKKWQTYRGNSTGTDMVFFGNVDSSGIKHNIFNPPIIARYIRLHPTHYSIRSTLRMELMGCDLNSCSMPLGMESKAISDAQITASSYFTNMFATWSPSKARLHLQGRSNAWRPQVNNPKEWLQVDFQKTMKVTGVTTQGVKSLDTSMYVKEFLISSSQDGHQWTLFFQNGKVKVFQGNQDSFTPVVNSLDPPLLTRYLRIHPQSWEHQIALRMEVLGCEAQDLY

SEQ ID NO: 1329 - DNA, 4371 bp, synthetic construct
  misc_feature 1..4371: note = Variant of human B-domain deleted Factor VIII
  source 1..4371: mol_type = other DNA
atgcagattgaactgtctacctgcttcttcctctgtttgctgaggttctgctttagcgccactagacggtactaccttggcgctgtggagctgtcctgggactatatgcagagtgatttgggagagcttcccgtcgacgcacgatttcctcctcgcgttccaaagtcatttccctttaacacaagccaggtgtacaagaagacgctcttcgtcgaattcaccgatcacctgttcaatatcgccaaacccagaccaccatggatgggtcttttggggcctaccatacaagcggaggtgtatgacacagttgttatcactctcaagaacatggcttctcatccggtaagtcttcacgcagtgggcgtgtcctactggaaagcttcagaaggagccgagtatgatgatcagacatcccagagggagaaagaagacgacaaggtatttccaggtgggtctcatacctatgtgtggcaagtgctcaaagagaatggccctatggcaagcgatccgccgtgtttgacttacagctacctttcacacgttgacctcgtcaaggacctcaactccgggttgattggagccttgttggtatgcagggaaggatctcttgccaaagagaagacacagaccctccacaagtttatccttctctttgctgtgttcgatgagggcaaaagttggcatagcgaaacgaagaattccctcatgcaggatcgcgacgcagccagcgccagagcttggcccaagatgcacactgtgaacggatatgtcaataggacgcttcctggcttgattgggtgtcatcggaaaagtgtctactggcacgtgatcggaatggggacaacaccagaggtccactccatatttctcgaaggccataccttccttgttcgaaaccacagacaggcatccttggggatctctcccattacctttctcactgcccaaacgctccttatggacttgggtcagttccttctcttttgccatatcccgtcacaccagcatgatggtatggaagcttatgtgaaagtcgacagttgtcctgaggagccacagttgcgcatgaagaataatgaagaagccgaggattacgacgacgatctcaccgattctgagatggacgtggtgaggtttgatgacgacaactctccctccatcattcaagctcggagcggggcgaagaaacaccccaagacttgggtccactatatagcggcggaagaggaggattgggattacgctcctcttgtattggcaccagatgaccgctcatacaaaagccagtacctcaacaacggaccgcagagaattggccggaagtataagaaagtgcgatttatggcctatacagacgaaacctttaagacaagggaggccatccagcatgagagtgggattttgggacctcttctttacggcgaagttggtgataccctcctcatcatcttcaagaatcaagcttctcgcccctataacatttacccacacgggatcactgacgttaggcctttgtatagcagaagacttcccaaaggcgtgaagcatctcaaagacttccccattttgccaggcgagatctttaagtacaaatggaccgtcacagtggaagatggaccgactaaatcagaccctcgatgccttacgcggtactattcctccttcgtgaatatggagagagatttggcaagcggactcataggaccactcctcatctgttacaaggaatctgtagaccagaggggtaaccagattatgagtgataaacgcaatgtgatcctttttagcgtcttcgacgagaaccggtcctggtacttgaccgagaatatacaaaggttccttcccaaccccgcaggcgttcagttggaagaccctgagtttcaggccagcaatattatgcactcaatcaacggctatgtgtttgatagtctccagctttctgtttgcctccatgaagtagcctattggtacatcttgtcaattggtgctcaaacagacttcctctccgtcttcttctccggctacacctttaagcacaagatggtgtatgaggacactctcacactctttccattttctggagaaaccgtgtcgatgagcatggagaatccaggcctttggatcttgggttgccacaacagtgattttcgcaatcggggaatgactgctctcctcaaagtcagcagctgtgattggaacacaggcgactattacgaagattcttacgaggacataagtgcctactttgactccaagaataacgccattgagcccagatcattctcccagaatcctcccgtgcttaaaaggcatcagcgcgaaggtaccagaactactcttcagtctgatcaagaggagattgactatgacgacaccattagcgtggaaatgaagaaggaggatttcgatatctatgacgaagatgagaaccagtctccgcggagctttcagaagaagacgcgacactacttcattgcagcagtcgaaaggctttgggactacggtatgtcatcatcccctcatgtgttgcgcaatagagctcagagtggaagtgttccacagttcaagaaagtcgtctttcaagagtttacagatggcagcttcacacagcctctctatcggggcgagcttaacgaacatttgggactccttggtccctatatccgagccgaagtggaggacaacattatggttacctttaggaatcaagcctctcgcccctacagcttctactcctccctcatcagttatgaggaggatcagagacaaggcgctgaaccacggaagaactttgtgaaaccgaatgagacgaagacctacttctggaaagtacagcaccacatggcccccacaaaagacgaattcgattgcaaagcatgggcgtatttttcagacgttgacttggagaaagatgtacattcaggacttattggtcctttgttggtgtgtcacactaacactctcaatccagcccatggcaggcaggtgacagtccaggaattcgctcttttctttaccatctttgatgagaccaagtcctggtacttcacggaaaacatggagcgcaattgcagagccccctgtaacatacagatggaggaccctacctttaaggaaaattatcggttccacgcaatcaacggatacattatggatacactccctggccttgtgatggctcaggaccaacgaatcaggtggtacctcctcagcatgggttctaatgagaacatacactccattcacttttcaggacatgtgttcactgtccggaagaaagaagagtataagatggccctctacaatttgtatccaggcgtgtttgagaccgttgaaatgcttccctctaaagctggcatctggagagtagagtgcttgatcggagaacatcttcacgcaggtatgagcaccttgttcctcgtgtacagcaacaaatgtcagaatccacttggcatggccagtggacacattcgcgactttcagatcacagcatctggccagtatggacaatgggccccaaagttggctcgcctccattactccggtagcataaatgcgtggtccactaaagaacctttcagctggattaaggtcgatcttcttgcccccatgatcatccacggcattaagacacagggagcgaggcagaaattctcctccctctacatctcacagttcattattatgtatagtttggacggcaagaagtggcaaacttatagaggtaacagtactggaacagacatggtgttcttcggcaacgttgatagctctggcatcaaacacaacatctttaatcctcccataatagctcggtacatcagattgcatccgacccactacagcattaggagtacactccgaatggagcttatgggttgcgacttgaattcctgttcaatgccactcggaatggagtctaaagccatctctgatgcacagataaccgccagtagctactttacgaacatgtttgctacgtggtcaccctctaaggcaaggcttcatttgcaaggccggtctaatgcctggagacctcaggtgaacaacccgaaagaatggctccaggtggactttcagaagaccatgaaagtaacaggtgtcactactcagggagttaagtccttggatactagcatgtatgtgaaggagttccttatttcctcatcacaagatggccaccagtggaccctcttctttcagaatggtaaggtcaaagtgtttcagggcaatcaagacagcttcacacccgtggtgaacagtcttgatcctccactcttgacacgataccttcgaatccatccacagtcttgggagcaccagattgcattgcgcatggaagtacttggatgcgaggctcaggacctctac

SEQ ID NO: 1330 - protein, 1457 aa, synthetic construct
  REGION 1..1457: note = Variant of human B-domain deleted Factor VIII
MQIELSTCFFLCLLRFCFSATRRYYLGAVELSWDYMQSDLGELPVDARFPPRVPKSFPFNTSQVYKKTLFVEFTDHLFNIAKPRPPWMGLLGPTIQAEVYDTVVITLKNMASHPVSLHAVGVSYWKASEGAEYDDQTSQREKEDDKVFPGGSHTYVWQVLKENGPMASDPPCLTYSYLSHVDLVKDLNSGLIGALLVCREGSLAKEKTQTLHKFILLFAVFDEGKSWHSETKNSLMQDRDAASARAWPKMHTVNGYVNRTLPGLIGCHRKSVYWHVIGMGTTPEVHSIFLEGHTFLVRNHRQASLGISPITFLTAQTLLMDLGQFLLFCHIPSHQHDGMEAYVKVDSCPEEPQLRMKNNEEAEDYDDDLTDSEMDVVRFDDDNSPSIIQARSGAKKHPKTWVHYIAAEEEDWDYAPLVLAPDDRSYKSQYLNNGPQRIGRKYKKVRFMAYTDETFKTREAIQHESGILGPLLYGEVGDTLLIIFKNQASRPYNIYPHGITDVRPLYSRRLPKGVKHLKDFPILPGEIFKYKWTVTVEDGPTKSDPRCLTRYYSSFVNMERDLASGLIGPLLICYKESVDQRGNQIMSDKRNVILFSVFDENRSWYLTENIQRFLPNPAGVQLEDPEFQASNIMHSINGYVFDSLQLSVCLHEVAYWYILSIGAQTDFLSVFFSGYTFKHKMVYEDTLTLFPFSGETVSMSMENPGLWILGCHNSDFRNRGMTALLKVSSCDWNTGDYYEDSYEDISAYFDSKNNAIEPRSFSQNPPVLKRHQREGTRTTLQSDQEEIDYDDTISVEMKKEDFDIYDEDENQSPRSFQKKTRHYFIAAVERLWDYGMSSSPHVLRNRAQSGSVPQFKKVVFQEFTDGSFTQPLYRGELNEHLGLLGPYIRAEVEDNIMVTFRNQASRPYSFYSSLISYEEDQRQGAEPRKNFVKPNETKTYFWKVQHHMAPTKDEFDCKAWAYFSDVDLEKDVHSGLIGPLLVCHTNTLNPAHGRQVTVQEFALFFTIFDETKSWYFTENMERNCRAPCNIQMEDPTFKENYRFHAINGYIMDTLPGLVMAQDQRIRWYLLSMGSNENIHSIHFSGHVFTVRKKEEYKMALYNLYPGVFETVEMLPSKAGIWRVECLIGEHLHAGMSTLFLVYSNKCQNPLGMASGHIRDFQITASGQYGQWAPKLARLHYSGSINAWSTKEPFSWIKVDLLAPMIIHGIKTQGARQKFSSLYISQFIIMYSLDGKKWQTYRGNSTGTDMVFFGNVDSSGIKHNIFNPPIIARYIRLHPTHYSIRSTLRMELMGCDLNSCSMPLGMESKAISDAQITASSYFTNMFATWSPSKARLHLQGRSNAWRPQVNNPKEWLQVDFQKTMKVTGVTTQGVKSLDTSMYVKEFLISSSQDGHQWTLFFQNGKVKVFQGNQDSFTPVVNSLDPPLLTRYLRIHPQSWEHQIALRMEVLGCEAQDLY

SEQ ID NO: 1331 - DNA, 4371 bp, synthetic construct
  misc_feature 1..4371: note = Variant of human B-domain deleted Factor VIII
  source 1..4371: mol_type = other DNA
atgcagattgaactgtctacctgcttcttcctctgtttgctgaggttctgctttagcgccactagacggtactaccttggcgctgtggagctgtcctgggactatatgcagagtgatttgggagagcttcccgtcgacgcacgatttcctcctcgcgttccaaagtcatttccctttaacacaagccaggtgtacaagaagacgctcttcgtcgaattcaccgatcacctgttcaatatcgccaaacccagaccaccatggatgggtcttttggggcctaccatacaagcggaggtgtatgacacagttgttatcactctcaagaacatggcttctcatccggtaagtcttcacgcagtgggcgtgtcctactggaaagcttcagaaggagccgagtatgatgatcagacatcccagagggagaaagaagacgacaaggtatttccaggtgggtctcatacctatgtgtggcaagtgctcaaagagaatggccctatggcaagcgatccgccgtgtttgacttacagctacctttcacacgttgacctcgtcaaggacctcaactccgggttgattggagccttgttggtatgcagggaaggatctcttgccaaagagaagacacagaccctccacaagtttatccttctctttgctgtgttcgatgagggcaaaagttggcatagcgaaacgaagaattccctcatgcaggatcgcgacgcagccagcgccagagcttggcccaagatgcacactgtgaacggatatgtcaataggacgcttcctggcttgattgggtgtcatcggaaaagtgtctactggcacgtgatcggaatggggacaacaccagaggtccactccatatttctcgaaggccataccttccttgttcgaaaccacagacaggggtccttggggatctctcccattacctttctcactgcccaaacgctccttatggacttgggtcagttccttctcttttgccatatcccgtcacaccagcatgatggtatggaagcttatgtgaaagtcgacagttgtcctgaggagccacagttgcgcatgaagaataatgaagaagccgaggattacgacgacgatctcaccgattctgagatggacgtggtgaggtttgatgacgacaactctccctccatcattcaagctcggagcggggcgaagaaacaccccaagacttgggtccactatatagcggcggaagaggaggattgggattacgctcctcttgtattggcaccagatgaccgctcatacaaaagccagtacctcaacaacggaccgcagagaattggccggaagtataagaaagtgcgatttatggcctatacagacgaaacctttaagacaagggaggccatccagcatgagagtgggattttgggacctcttctttacggcgaagttggtgataccctcctcatcatcttcaagaatcaagcttctcgcccctataacatttacccacacgggatcactgacgttaggcctttgtatagcagaagacttcccaaaggcgtgaagcatctcaaagacttccccattttgccaggcgagatctttaagtacaaatggaccgtcacagtggaagatggaccgactaaatcagaccctcgatgccttacgcggtactattcctccttcgtgaatatggagagagatttggcaagcggactcataggaccactcctcatctgttacaaggaatctgtagaccagaggggtaaccagattatgagtgataaacgcaatgtgatcctttttagcgtcttcgacgagaaccggtcctggtacttgaccgagaatatacaaaggttccttcccaaccccgcaggcgttcagttggaagaccctgagtttcaggccagcaatattatgcactcaatcaacggctatgtgtttgatagtctccagctttctgtttgcctccatgaagtagcctattggtacatcttgtcaattggtgctcaaacagacttcctctccgtcttcttctccggctacacctttaagcacaagatggtgtatgaggacactctcacactctttccattttctggagaaaccgtgttcatgagcatggagaatccaggcctttggatcttgggttgccacaacagtgattttcgcaatcggggaatgactgctctcctcaaagtcagcagctgtgattggaacacaggcgactattacgaagattcttacgaggacataagtgcctactttgactccaagaataacgccattgagcccagatcattctcccagaatcctcccgtgcttaaaaggcatcagcgcgaaggtaccagaactactcttcagtctgatcaagaggagattgactatgacgacaccattagcgtggaaatgaagaaggaggatttcgatatctatgacgaagatgagaaccagtctccgcggagctttcagaagaagacgcgacactacttcattgcagcagtcgaaaggctttgggactacggtatgtcatcatcccctcatgtgttgcgcaatagagctcagagtggaagtgttccacagttcaagaaagtcgtctttcaagagtttacagatggcagcttcacacagcctctctatcggggcgagcttaacgaacatttgggactccttggtccctatatccgagccgaagtggaggacaacattatggttacctttaggaatcaagcctctcgcccctacagcttctactcctccctcatcagttatgaggaggatcagagacaaggcgctgaaccacggaagaactttgtgaaaccgaatgagacgaagacctacttctggaaagtacagcaccacatggcccccacaaaagacgaattcgattgcaaagcatgggcgtatttttcagacgttgacttggagaaagatgtacattcaggacttattggtcctttgttggtgtgtcacactaacactctcaatccagcccatggcaggcaggtgacagtccaggaattcgctcttttctttaccatctttgatgagaccaagtcctggtacttcacggaaaacatggagcgcaattgcagagccccctgtaacatacagatggaggaccctacctttaaggaaaattatcggttccacgcaatcaacggatacattatggatacactccctggccttgtgatggctcaggaccaacgaatcaggtggtacctcctcagcatgggttctaatgagaacatacactccattcacttttcaggacatgtgttcactgtccggaagaaagaagagtataagatggccctctacaatttgtatccaggcgtgtttgagaccgttgaaatgcttccctctaaagctggcatctggagagtagagtgcttgatcggagaacatcttcacgcaggtatgagcaccttgttcctcgtgtacagcaacaaatgtcagaatccacttggcatggccagtggacacattcgcgactttcagatcacagcatctggccagtatggacaatgggccccaaagttggctcgcctccattactccggtagcataaatgcgtggtccactaaagaacctttcagctggattaaggtcgatcttcttgcccccatgatcatccacggcattaagacacagggagcgaggcagaaattctcctccctctacatctcacagttcattattatgtatagtttggacggcaagaagtggcaaacttatagaggtaacagtactggaacagacatggtgttcttcggcaacgttgatagctctggcatcaaacacaacatctttaatcctcccataatagctcggtacatcagattgcatccgacccactacagcattaggagtacactccgaatggagcttatgggttgcgacttgaattcctgttcaatgccactcggaatggagtctaaagccatctctgatgcacagataaccgccagtagctactttacgaacatgtttgctacgtggtcaccctctaaggcaaggcttcatttgcaaggccggtctaatgcctggagacctcaggtgaacaacccgaaagaatggctccaggtggactttcagaagaccatgaaagtaacaggtgtcactactcagggagttaagtccttggatactagcatgtatgtgaaggagttccttatttcctcatcacaagatggccaccagtggaccctcttctttcagaatggtaaggtcaaagtgtttcagggcaatcaagacagcttcacacccgtggtgaacagtcttgatcctccactcttgacacgataccttcgaatccatccacagtcttgggagcaccagattgcattgcgcatggaagtacttggatgcgaggctcaggacctctac

SEQ ID NO: 1332 - protein, 1457 aa, synthetic construct
  REGION 1..1457: note = Variant of human B-domain deleted Factor VIII
MQIELSTCFFLCLLRFCFSATRRYYLGAVELSWDYMQSDLGELPVDARFPPRVPKSFPFNTSQVYKKTLFVEFTDHLFNIAKPRPPWMGLLGPTIQAEVYDTVVITLKNMASHPVSLHAVGVSYWKASEGAEYDDQTSQREKEDDKVFPGGSHTYVWQVLKENGPMASDPPCLTYSYLSHVDLVKDLNSGLIGALLVCREGSLAKEKTQTLHKFILLFAVFDEGKSWHSETKNSLMQDRDAASARAWPKMHTVNGYVNRTLPGLIGCHRKSVYWHVIGMGTTPEVHSIFLEGHTFLVRNHRQGSLGISPITFLTAQTLLMDLGQFLLFCHIPSHQHDGMEAYVKVDSCPEEPQLRMKNNEEAEDYDDDLTDSEMDVVRFDDDNSPSIIQARSGAKKHPKTWVHYIAAEEEDWDYAPLVLAPDDRSYKSQYLNNGPQRIGRKYKKVRFMAYTDETFKTREAIQHESGILGPLLYGEVGDTLLIIFKNQASRPYNIYPHGITDVRPLYSRRLPKGVKHLKDFPILPGEIFKYKWTVTVEDGPTKSDPRCLTRYYSSFVNMERDLASGLIGPLLICYKESVDQRGNQIMSDKRNVILFSVFDENRSWYLTENIQRFLPNPAGVQLEDPEFQASNIMHSINGYVFDSLQLSVCLHEVAYWYILSIGAQTDFLSVFFSGYTFKHKMVYEDTLTLFPFSGETVFMSMENPGLWILGCHNSDFRNRGMTALLKVSSCDWNTGDYYEDSYEDISAYFDSKNNAIEPRSFSQNPPVLKRHQREGTRTTLQSDQEEIDYDDTISVEMKKEDFDIYDEDENQSPRSFQKKTRHYFIAAVERLWDYGMSSSPHVLRNRAQSGSVPQFKKVVFQEFTDGSFTQPLYRGELNEHLGLLGPYIRAEVEDNIMVTFRNQASRPYSFYSSLISYEEDQRQGAEPRKNFVKPNETKTYFWKVQHHMAPTKDEFDCKAWAYFSDVDLEKDVHSGLIGPLLVCHTNTLNPAHGRQVTVQEFALFFTIFDETKSWYFTENMERNCRAPCNIQMEDPTFKENYRFHAINGYIMDTLPGLVMAQDQRIRWYLLSMGSNENIHSIHFSGHVFTVRKKEEYKMALYNLYPGVFETVEMLPSKAGIWRVECLIGEHLHAGMSTLFLVYSNKCQNPLGMASGHIRDFQITASGQYGQWAPKLARLHYSGSINAWSTKEPFSWIKVDLLAPMIIHGIKTQGARQKFSSLYISQFIIMYSLDGKKWQTYRGNSTGTDMVFFGNVDSSGIKHNIFNPPIIARYIRLHPTHYSIRSTLRMELMGCDLNSCSMPLGMESKAISDAQITASSYFTNMFATWSPSKARLHLQGRSNAWRPQVNNPKEWLQVDFQKTMKVTGVTTQGVKSLDTSMYVKEFLISSSQDGHQWTLFFQNGKVKVFQGNQDSFTPVVNSLDPPLLTRYLRIHPQSWEHQIALRMEVLGCEAQDLY

SEQ ID NO: 1333 - DNA, 4371 bp, synthetic construct
  misc_feature 1..4371: note = Variant of human B-domain deleted Factor VIII
  source 1..4371: mol_type = other DNA
atgcagattgaactgtctacctgcttcttcctctgtttgctgaggttctgctttagcgccactagacggtactaccttggcgctgtggagctgtcctgggactatatgcagagtgatttgggagagcttcccgtcgacgcacgatttcctcctcgcgttccaaagtcatttccctttaacacaagccaggtgtacaagaagacgctcttcgtcgaattcaccgatcacctgttcaatatcgccaaacccagaccaccatggatgggtcttttggggcctaccatacaagcggaggtgtatgacacagttgttatcactctcaagaacatggcttctcatccggtaagtcttcacgcagtgggcgtgtcctactggaaagcttcagaaggagccgagtatgatgatcagacatcccagagggagaaagaagacgacaaggtatttccaggtgggtctcatacctatgtgtggcaagtgctcaaagagaatggccctatggcaagcgatccgccgtgtttgacttacagctacctttcacacgttgacctcgtcaaggacctcaactccgggttgattggagccttgttggtatgcagggaaggatctcttgccaaagagaagacacagaccctccacaagtttatccttctctttgctgtgttcgatgagggcaaaagttggcatagcgaaacgaagaattccctcatgcaggatcgcgacgcagccagcgccagagcttggcccaagatgcacactgtgaacggatatgtcaataggacgcttcctggcttgattgggtgtcatcggaaaagtgtctactggcacgtgatcggaatggggacaacaccagaggtccactccatatttctcgaaggccataccttccttgttcgaaaccacagacaggcatccttggggatctctcccattacctttctcactgcccaaacgctccttatggacttgggtcagttccttctcttttgccatatcccgtcacaccagcatgatggtatggaagcttatgtgaaagtcgacagttgtcctgaggagccacagttgcgcatgaagaataatgaagaagccgaggattacgacgacgatctcaccgattctgagatggacgtggtgaggtttgatgacgacaactctccctccatcattcaagctcggagcggggcgaagaaacaccccaagacttgggtccactatatagcggcggaagaggaggattgggattacgctcctcttgtattggcaccagatgaccgctcatacaaaagccagtacctcaacaacggaccgcagagaattggccggaagtataagaaagtgcgatttatggcctatacagacgaaacctttaagacaagggaggccatccagcatgagagtgggattttgggacctcttctttacggcgaagttggtgataccctcctcatcatcttcaagaatcaagcttctcgcccctataacatttacccacacgggatcactgacgttaggcctttgtatagcagaagacttcccaaaggcgtgaagcatctcaaagacttccccattttgccaggcgagatctttaagtacaaatggaccgtcacagtggaagatggaccgactaaatcagaccctcgatgccttacgcggtactattcctccttcgtgaatatggagagagatttggcaagcggactcataggaccactcctcatctgttacaaggaatctgtagaccagaggggtaaccagattatgagtgataaacgcaatgtgatcctttttagcgtcttcgacgagaaccggtcctggtacttgaccgagaatatacaaaggttccttcccaaccccgcaggcgttcagttggaagaccctgagtttcaggccagcaatattatgcactcaatcaacggctatgtgtttgatagtctccagctttctgtttgcctccatgaagtagcctattggtacatcttgtcaattggtgctcaaacagacttcctctccgtcttcttctccggctacacctttaagcacaagatggtgtatgaggacactctcacactctttccattttctggagaaaccgtgttcatgagcatggagaatccaggcctttggatcttgggttgccacaacagtgattttcgcaatcggggaatgactgctctcctcaaagtcagcagctgtgattggaacacaggcgactattacgaagattcttacgaggacataagtgcctactttgactccaagaataacgccattgagcccagatcattctcccagaatcctcccgtgcttaaaaggcatcagcgcgaaggtaccagaactactcttcagtctgatcaagaggagattgactatgacgacaccattagcgtggaaatgaagaaggaggatttcgatatctatgacgaagatgagaaccagtctccgcggagctttcagaagaagacgcgacactacttcattgcagcagtcgaaaggctttgggactacggtatgtcatcatcccctcatgtgttgcgcaatagagctcagagtggaagtgttccacagttcaagaaagtcgtctttcaagagtttacagatggcagcttcacacagcctctctatcggggcgagcttaacgaacatttgggactccttggtccctatatccgagccgaagtggaggacaacattatggttacctttaggaatcaagcctctcgcccctacagcttctactcctccctcatctgttatgaggaggatcagagacaaggcgctgaaccacggaagaactttgtgaaaccgaatgagacgaagacctacttctggaaagtacagcaccacatggcccccacaaaagacgaattcgattgcaaagcatgggcgtatttttcagacgttgacttggagaaagatgtacattcaggacttattggtcctttgttggtgtgtcacactaacactctcaatccagcccatggcaggcaggtgacagtccaggaattcgctcttttctttaccatctttgatgagaccaagtcctggtacttcacggaaaacatggagcgcaattgcagagccccctgtaacatacagatggaggaccctacctttaaggaaaattatcggttccacgcaatcaacggatacattatggatacactccctggccttgtgatggctcaggaccaacgaatcaggtggtacctcctcagcatgggttctaatgagaacatacactccattcacttttcaggacatgtgttcactgtccggaagaaagaagagtataagatggccctctacaatttgtatccaggcgtgtttgagaccgttgaaatgcttccctctaaagctggcatctggagagtagagtgcttgatcggagaacatcttcacgcaggtatgagcaccttgttcctcgtgtacagcaacaaatgtcagaatccacttggcatggccagtggacacattcgcgactttcagatcacagcatctggccagtatggacaatgggccccaaagttggctcgcctccattactccggtagcataaatgcgtggtccactaaagaacctttcagctggattaaggtcgatcttcttgcccccatgatcatccacggcattaagacacagggagcgaggcagaaattctcctccctctacatctcacagttcattattatgtatagtttggacggcaagaagtggcaaacttatagaggtaacagtactggaacagacatggtgttcttcggcaacgttgatagctctggcatcaaacacaacatctttaatcctcccataatagctcggtacatcagattgcatccgacccactacagcattaggagtacactccgaatggagcttatgggttgcgacttgaattcctgttcaatgccactcggaatggagtctaaagccatctctgatgcacagataaccgccagtagctactttacgaacatgtttgctacgtggtcaccctctaaggcaaggcttcatttgcaaggccggtctaatgcctggagacctcaggtgaacaacccgaaagaatggctccaggtggactttcagaagaccatgaaagtaacaggtgtcactactcagggagttaagtccttggatactagcatgtatgtgaaggagttccttatttcctcatcacaagatggccaccagtggaccctcttctttcagaatggtaaggtcaaagtgtttcagggcaatcaagacagcttcacacccgtggtgaacagtcttgatcctccactcttgacacgataccttcgaatccatccacagtcttgggagcaccagattgcattgcgcatggaagtacttggatgcgaggctcaggacctctac

SEQ ID NO: 1334 - protein, 1457 aa, synthetic construct
  REGION 1..1457: note = Variant of human B-domain deleted Factor VIII
MQIELSTCFFLCLLRFCFSATRRYYLGAVELSWDYMQSDLGELPVDARFPPRVPKSFPFNTSQVYKKTLFVEFTDHLFNIAKPRPPWMGLLGPTIQAEVYDTVVITLKNMASHPVSLHAVGVSYWKASEGAEYDDQTSQREKEDDKVFPGGSHTYVWQVLKENGPMASDPPCLTYSYLSHVDLVKDLNSGLIGALLVCREGSLAKEKTQTLHKFILLFAVFDEGKSWHSETKNSLMQDRDAASARAWPKMHTVNGYVNRTLPGLIGCHRKSVYWHVIGMGTTPEVHSIFLEGHTFLVRNHRQASLGISPITFLTAQTLLMDLGQFLLFCHIPSHQHDGMEAYVKVDSCPEEPQLRMKNNEEAEDYDDDLTDSEMDVVRFDDDNSPSIIQARSGAKKHPKTWVHYIAAEEEDWDYAPLVLAPDDRSYKSQYLNNGPQRIGRKYKKVRFMAYTDETFKTREAIQHESGILGPLLYGEVGDTLLIIFKNQASRPYNIYPHGITDVRPLYSRRLPKGVKHLKDFPILPGEIFKYKWTVTVEDGPTKSDPRCLTRYYSSFVNMERDLASGLIGPLLICYKESVDQRGNQIMSDKRNVILFSVFDENRSWYLTENIQRFLPNPAGVQLEDPEFQASNIMHSINGYVFDSLQLSVCLHEVAYWYILSIGAQTDFLSVFFSGYTFKHKMVYEDTLTLFPFSGETVFMSMENPGLWILGCHNSDFRNRGMTALLKVSSCDWNTGDYYEDSYEDISAYFDSKNNAIEPRSFSQNPPVLKRHQREGTRTTLQSDQEEIDYDDTISVEMKKEDFDIYDEDENQSPRSFQKKTRHYFIAAVERLWDYGMSSSPHVLRNRAQSGSVPQFKKVVFQEFTDGSFTQPLYRGELNEHLGLLGPYIRAEVEDNIMVTFRNQASRPYSFYSSLICYEEDQRQGAEPRKNFVKPNETKTYFWKVQHHMAPTKDEFDCKAWAYFSDVDLEKDVHSGLIGPLLVCHTNTLNPAHGRQVTVQEFALFFTIFDETKSWYFTENMERNCRAPCNIQMEDPTFKENYRFHAINGYIMDTLPGLVMAQDQRIRWYLLSMGSNENIHSIHFSGHVFTVRKKEEYKMALYNLYPGVFETVEMLPSKAGIWRVECLIGEHLHAGMSTLFLVYSNKCQNPLGMASGHIRDFQITASGQYGQWAPKLARLHYSGSINAWSTKEPFSWIKVDLLAPMIIHGIKTQGARQKFSSLYISQFIIMYSLDGKKWQTYRGNSTGTDMVFFGNVDSSGIKHNIFNPPIIARYIRLHPTHYSIRSTLRMELMGCDLNSCSMPLGMESKAISDAQITASSYFTNMFATWSPSKARLHLQGRSNAWRPQVNNPKEWLQVDFQKTMKVTGVTTQGVKSLDTSMYVKEFLISSSQDGHQWTLFFQNGKVKVFQGNQDSFTPVVNSLDPPLLTRYLRIHPQSWEHQIALRMEVLGCEAQDLY

SEQ ID NO: 1335 - DNA, 4371 bp, synthetic construct
  misc_feature 1..4371: note = Variant of human B-domain deleted Factor VIII
  source 1..4371: mol_type = other DNA
atgcagattgaactgtctacctgcttcttcctctgtttgctgaggttctgctttagcgccactagacggtactaccttggcgctgtggagctgtcctgggactatatgcagagtgatttgggagagcttcccgtcgacgcacgatttcctcctcgcgttccaaagtcatttccctttaacacaagccaggtgtacaagaagacgctcttcgtcgaattcaccgatcacctgttcaatatcgccaaacccagaccaccatggatgggtcttttggggcctaccatacaagcggaggtgtatgacacagttgttatcactctcaagaacatggcttctcatccggtaagtcttcacgcagtgggcgtgtcctactggaaagcttcagaaggagccgagtatgatgatcagacatcccagagggagaaagaagacgacaaggtatttccaggtgggtctcatacctatgtgtggcaagtgctcaaagagaatggccctatggcaagcgatccgccgtgtttgacttacagctacctttcacacgttgacctcgtcaaggacctcaactccgggttgattggagccttgttggtatgcagggaaggatctcttgccaaagagaagacacagaccctccacaagtttatccttctctttgctgtgttcgatgagggcaaaagttggcatagcgaaacgaagaattccctcatgcaggatcgcgacgcagccagcgccagagcttggcccaagatgcacactgtgaacggatatgtcaataggacgcttcctggcttgattgggtgtcatcggaaaagtgtctactggcacgtgatcggaatggggacaacaccagaggtccactccatatttctcgaaggccataccttccttgttcgaaaccacagacaggcatccttggggatctctcccattacctttctcactgcccaaacgctccttatggacttgggtcagttccttctcttttgccatatcccgtcacaccagcatgatggtatggaagcttatgtgaaagtcgacagttgtcctgaggagccacagttgcgcatgaagaataatgaagaagccgaggattacgacgacgatctcaccgattctgagatggacgtggtgaggtttgatgacgacaactctccctccatcattcaagctcggagcggggcgaagaaacaccccaagacttgggtccactatatagcggcggaagaggaggattgggattacgctcctcttgtattggcaccagatgaccgctcatacaaaagccagtacctcaacaacggaccgcagagaattggccggaagtataagaaagtgcgatttatggcctatacagacgaaacctttaagacaagggaggccatccagcatgagagtgggattttgggacctcttctttacggcgaagttggtgataccctcctcatcatcttcaagaatcaagcttctcgcccctataacatttacccacacgggatcactgacgttaggcctttgtatagcagaagacttcccaaaggcgtgaagcatctcaaagacttccccattttgccaggcgagatctttaagtacaaatggaccgtcacagtggaagatggaccgactaaatcagaccctcgatgccttacgcggtactattcctccttcgtgaatatggagagagatttggcaagcggactcataggaccactcctcatctgttacaaggaatctgtagaccagaggggtaaccagattatgagtgataaacgcaatgtgatcctttttagcgtcttcgacgagaaccggtcctggtacttgaccgagaatatacaaaggttccttcccaaccccgcaggcgttcagttggaagaccctgagtttcaggccagcaatattatgcactcaatcaacggctatgtgtttgatagtctccagctttctgtttgcctccatgaagtagcctattggtacatcttgtcaattggtgctcaaacagacttcctctccgtcttcttctccggctacacctttaagcacaagatggtgtatgaggacactctcacactctttccattttctggagaaaccgtgttcatgagcatggagaatccaggcctttggatcttgggttgccacaacagtgattttcgcaatcggggaatgactgctctcctcaaagtcagcagctgtgattggaacacaggcgactattacgaagattcttacgaggacataagtgcctactttgactccaagaataacgccattgagcccagatcattctcccagaatcctcccgtgcttaaaaggcatcagcgcgaaggtaccagaactactcttcagtctgatcaagaggagattgactatgacgacaccattagcgtggaaatgaagaaggaggatttcgatatctatgacgaagatgagaaccagtctccgcggagctttcagaagaagacgcgacactacttcattgcagcagtcgaaaggctttgggactacggtatgtcatcatcccctcatgtgttgcgcaatagagctcagagtggaagtgttccacagttcaagaaagtcgtctttcaagagtttacagatggcagcttcacacagcctctctatcggggcgagcttaacgaacatttgggactccttggtccctatatccgagccgaagtggaggacaacattatggttacctttaggaatcaagcctctcgcccctacagcttctactcctccctcatcagttatgaggaggatcagagacaaggcgctgaaccacggaagaactttgtgaaaccgaatgagacgaagacctacttctggaaagtacagcaccacatggcccccacaaaagacgaattcgattgcaaagcatgggcgtatttttcagacgttgacttggagaaagatgtacattcaggacttattggtcctttgttggtgtgtcacactaacactctcaatccagcccatggcaggcaggtgacagtccaggaattcgctcttttctttaccatctttgatgagaccaagtcctggtacttcacggaaaacatggagcgcaattgcagagccccctgtaacatacagatggaggaccctacctttaaggaaaattatcggttccacgcaatcaacggatacattatggatacactccctggccttgtgatggctcaggaccaacgaatcaggtggtacctcctcagcatgggttctaatgagaacatacactccattcacttttcaggacatgtgttcactgtccggaagaaagaagagtataagatggccctctacaatttgtatccaggcgtgtttgagaccgttgaaatgcttccctctaaagctggcatctggagagtagagtgcttgatcggagaacatcttcacgcaggtatgagcaccttgttcctcgtgtacagcaacaaatgtcagaatccacttggcatggccagtggacacattcgcgactttcagatcacagcatctggccagtatggacaatgggccccaaagttggctcgcctccattactccggtagcataaatgcgtggtccactaaagaacctttcagctggattaaggtcgatcttcttgcccccatgatcatccacggcattaagacacagggagcgaggcagaaattctcctccctctacatctcacagttcattattatgtatagtttggacggcaagaagtggcaaacttatagaggtaacagtactggaacagacatggtgttcttcggcaacgttgatagctctggcatcaaacacaacatctttaatcctcccataatagctcggtacatcagattgcatccgacccactacagcattaggagtacactccgaatggagcttatgggttgcgacttgaattcctgttcaatgccactcggaatggagtctaaagccatctctgatgcacagataaccgccagtagctactttacgaacatgtttgctacgtggtcaccctctaaggcaaggcttcatttgcaaggccggtctaatgcctggagacctcaggtgaacaacccgaaagaatggctccaggtggactttcagaagaccatgaaagtaacaggtgtcactactcagggagttaagtccttggatactagcatgtatgtgaaggagttccttatttcctcatcacaagatggccaccagtggaccctcttctttcagaatggtaaggtcaaagtgtttcagggcaatcaagacagcttcacacccgtggtgaacagtcttgatcctccactcttgggtcgataccttcgaatccatccacagtcttgggagcaccagattgcattgcgcatggaagtacttggatgcgaggctcaggacctctac

SEQ ID NO: 1336 - protein, 1457 aa, synthetic construct
  REGION 1..1457: note = Variant of human B-domain deleted Factor VIII
MQIELSTCFFLCLLRFCFSATRRYYLGAVELSWDYMQSDLGELPVDARFPPRVPKSFPFNTSQVYKKTLFVEFTDHLFNIAKPRPPWMGLLGPTIQAEVYDTVVITLKNMASHPVSLHAVGVSYWKASEGAEYDDQTSQREKEDDKVFPGGSHTYVWQVLKENGPMASDPPCLTYSYLSHVDLVKDLNSGLIGALLVCREGSLAKEKTQTLHKFILLFAVFDEGKSWHSETKNSLMQDRDAASARAWPKMHTVNGYVNRTLPGLIGCHRKSVYWHVIGMGTTPEVHSIFLEGHTFLVRNHRQASLGISPITFLTAQTLLMDLGQFLLFCHIPSHQHDGMEAYVKVDSCPEEPQLRMKNNEEAEDYDDDLTDSEMDVVRFDDDNSPSIIQARSGAKKHPKTWVHYIAAEEEDWDYAPLVLAPDDRSYKSQYLNNGPQRIGRKYKKVRFMAYTDETFKTREAIQHESGILGPLLYGEVGDTLLIIFKNQASRPYNIYPHGITDVRPLYSRRLPKGVKHLKDFPILPGEIFKYKWTVTVEDGPTKSDPRCLTRYYSSFVNMERDLASGLIGPLLICYKESVDQRGNQIMSDKRNVILFSVFDENRSWYLTENIQRFLPNPAGVQLEDPEFQASNIMHSINGYVFDSLQLSVCLHEVAYWYILSIGAQTDFLSVFFSGYTFKHKMVYEDTLTLFPFSGETVFMSMENPGLWILGCHNSDFRNRGMTALLKVSSCDWNTGDYYEDSYEDISAYFDSKNNAIEPRSFSQNPPVLKRHQREGTRTTLQSDQEEIDYDDTISVEMKKEDFDIYDEDENQSPRSFQKKTRHYFIAAVERLWDYGMSSSPHVLRNRAQSGSVPQFKKVVFQEFTDGSFTQPLYRGELNEHLGLLGPYIRAEVEDNIMVTFRNQASRPYSFYSSLISYEEDQRQGAEPRKNFVKPNETKTYFWKVQHHMAPTKDEFDCKAWAYFSDVDLEKDVHSGLIGPLLVCHTNTLNPAHGRQVTVQEFALFFTIFDETKSWYFTENMERNCRAPCNIQMEDPTFKENYRFHAINGYIMDTLPGLVMAQDQRIRWYLLSMGSNENIHSIHFSGHVFTVRKKEEYKMALYNLYPGVFETVEMLPSKAGIWRVECLIGEHLHAGMSTLFLVYSNKCQNPLGMASGHIRDFQITASGQYGQWAPKLARLHYSGSINAWSTKEPFSWIKVDLLAPMIIHGIKTQGARQKFSSLYISQFIIMYSLDGKKWQTYRGNSTGTDMVFFGNVDSSGIKHNIFNPPIIARYIRLHPTHYSIRSTLRMELMGCDLNSCSMPLGMESKAISDAQITASSYFTNMFATWSPSKARLHLQGRSNAWRPQVNNPKEWLQVDFQKTMKVTGVTTQGVKSLDTSMYVKEFLISSSQDGHQWTLFFQNGKVKVFQGNQDSFTPVVNSLDPPLLGRYLRIHPQSWEHQIALRMEVLGCEAQDLY

SEQ ID NO: 1337 - DNA, 4371 bp, synthetic construct
  misc_feature 1..4371: note = Variant of human B-domain deleted Factor VIII
  source 1..4371: mol_type = other DNA
atgcagattgaactgtctacctgcttcttcctctgtttgctgaggttctgctttagcgccactagacggtactaccttggcgctgtggagctgtcctgggactatatgcagagtgatttgggagagcttcccgtcgacgcacgatttcctcctcgcgttccaaagtcatttccctttaacacaagccaggtgtacaagaagacgctcttcgtcgaattcaccgatcacctgttcaatatcgccaaacccagaccaccatggatgggtcttttggggcctaccatacaagcggaggtgtatgacacagttgttatcactctcaagaacatggcttctcatccggtaagtcttcacgcagtgggcgtgtcctactggaaagcttcagaaggagccgagtatgatgatcagacatcccagagggagaaagaagacgacaaggtatttccaggtgggtctcatacctatgtgtggcaagtgctcaaagagaatggccctatggcaagcgatccgccgtgtttgacttacagctacctttcacacgttgacctcgtcaaggacctcaactccgggttgattggagccttgttggtatgcagggaaggatctcttgccaaagagaagacacagaccctccacaagtttatccttctctttgctgtgttcgatgagggcaaaagttggcatagcgaaacgaagaattccctcatgcaggatcgcgacgcagccagcgccagagcttggcccaagatgcacactgtgaacggatatgtcaataggacgcttcctggcttgattgggtgtcatcggaaaagtgtctactggcacgtgatcggaatggggacaacaccagaggtccactccatatttctcgaaggccataccttccttgttcgaaaccacagacaggcatccttggggatctctcccattacctttctcactgcccaaacgctccttatggacttgggtcagttccttctcttttgccatatcccgtcacaccagcatgatggtatggaagcttatgtgaaagtcgacagttgtcctgaggagccacagttgcgcatgaagaataatgaagaagccgaggattacgacgacgatctcaccgattctgagatggacgtggtgaggtttgatgacgacaactctccctccatcattcaagctcggagcggggcgaagaaacaccccaagacttgggtccactatatagcggcggaagaggaggattgggattacgctcctcttgtattggcaccagatgaccgctcatacaaaagccagtacctcaacaacggaccgcagagaattggccggaagtataagaaagtgcgatttatggcctatacagacgaaacctttaagacaagggaggccatccagcatgagagtgggattttgggacctcttctttacggcgaagttggtgataccctcctcatcatcttcaagaatcaagcttctcgcccctataacatttacccacacgggatcactgacgttaggcctttgtatagcagaagacttcccaaaggcgtgaagcatctcaaagacttccccattttgccaggcgagatctttaagtacaaatggaccgtcacagtggaagatggaccgactaaatcagaccctcgatgccttacgcggtactattcctccttcgtgaatatggagagagatttggcaagcggactcataggaccactcctcatctgttacaaggaatctgtagaccagaggggtaaccagattatgagtgataaacgcaatgtgatcctttttagcgtcttcgacgagaaccggtcctggtacttgaccgagaatatacaaaggttccttcccaaccccgcaggcgttcagttggaagaccctgagtttcaggccagcaatattatgcactcaatcaacggctatgtgtttgatagtctccagctttctgtttgcctccatgaagtagcctattggtacatcttgtcaattggtgctcaaacagacttcctctccgtcttcttctccggctacacctttaagcacaagatggtgtatgaggacactctcacactctttccattttctggagaaaccgtgttcatgagcatggagaatccaggcctttggatcttgggttgccacaacagtgattttcgcaatcggggaatgactgctctcctcaaagtcagcagctgtgattggaacacaggcgactattacgaagattcttacgaggacataagtgcctactttgactccaagaataacgccattgagcccagatcattctcccagaatcctcccgtgcttaaaaggcatcagcgcgaaggtaccagaactactcttcagtctgatcaagaggagattgactatgacgacaccattagcgtggaaatgaagaaggaggatttcgatatcctggacgaagatgagaaccagtctccgcggagctttcagaagaagacgcgacactacttcattgcagcagtcgaaaggctttgggactacggtatgtcatcatcccctcatgtgttgcgcaatagagctcagagtggaagtgttccacagttcaagaaagtcgtctttcaagagtttacagatggcagcttcacacagcctctctatcggggcgagcttaacgaacatttgggactccttggtccctatatccgagccgaagtggaggacaacattatggttacctttaggaatcaagcctctcgcccctacagcttctactcctccctcatcagttatgaggaggatcagagacaaggcgctgaaccacggaagaactttgtgaaaccgaatgagacgaagacctacttctggaaagtacagcaccacatggcccccacaaaagacgaattcgattgcaaagcatgggcgtatttttcagacgttgacttggagaaagatgtacattcaggacttattggtcctttgttggtgtgtcacactaacactctcaatccagcccatggcaggcaggtgacagtccaggaattcgctcttttctttaccatctttgatgagaccaagtcctggtacttcacggaaaacatggagcgcaattgcagagccccctgtaacatacagatggaggaccctacctttaaggaaaattatcggttccacgcaatcaacggatacattatggatacactccctggccttgtgatggctcaggaccaacgaatcaggtggtacctcctcagcatgggttctaatgagaacatacactccattcacttttcaggacatgtgttcactgtccggaagaaagaagagtataagatggccctctacaatttgtatccaggcgtgtttgagaccgttgaaatgcttccctctaaagctggcatctggagagtagagtgcttgatcggagaacatcttcacgcaggtatgagcaccttgttcctcgtgtacagcaacaaatgtcagaatccacttggcatggccagtggacacattcgcgactttcagatcacagcatctggccagtatggacaatgggccccaaagttggctcgcctccattactccggtagcataaatgcgtggtccactaaagaacctttcagctggattaaggtcgatcttcttgcccccatgatcatccacggcattaagacacagggagcgaggcagaaattctcctccctctacatctcacagttcattattatgtatagtttggacggcaagaagtggcaaacttatagaggtaacagtactggaacagacatggtgttcttcggcaacgttgatagctctggcatcaaacacaacatctttaatcctcccataatagctcggtacatcagattgcatccgacccactacagcattaggagtacactccgaatggagcttatgggttgcgacttgaattcctgttcaatgccactcggaatggagtctaaagccatctctgatgcacagataaccgccagtagctactttacgaacatgtttgctacgtggtcaccctctaaggcaaggcttcatttgcaaggccggtctaatgcctggagacctcaggtgaacaacccgaaagaatggctccaggtggactttcagaagaccatgaaagtaacaggtgtcactactcagggagttaagtccttggatactagcatgtatgtgaaggagttccttatttcctcatcacaagatggccaccagtggaccctcttctttcagaatggtaaggtcaaagtgtttcagggcaatcaagacagcttcacacccgtggtgaacagtcttgatcctccactcttgacacgataccttcgaatccatccacagtcttgggagcaccagattgcattgcgcatggaagtacttggatgcgaggctcaggacctctac

SEQ ID NO: 1338 - protein, 1457 aa, synthetic construct
  REGION 1..1457: note = Variant of human B-domain deleted Factor VIII
MQIELSTCFFLCLLRFCFSATRRYYLGAVELSWDYMQSDLGELPVDARFPPRVPKSFPFNTSQVYKKTLFVEFTDHLFNIAKPRPPWMGLLGPTIQAEVYDTVVITLKNMASHPVSLHAVGVSYWKASEGAEYDDQTSQREKEDDKVFPGGSHTYVWQVLKENGPMASDPPCLTYSYLSHVDLVKDLNSGLIGALLVCREGSLAKEKTQTLHKFILLFAVFDEGKSWHSETKNSLMQDRDAASARAWPKMHTVNGYVNRTLPGLIGCHRKSVYWHVIGMGTTPEVHSIFLEGHTFLVRNHRQASLGISPITFLTAQTLLMDLGQFLLFCHIPSHQHDGMEAYVKVDSCPEEPQLRMKNNEEAEDYDDDLTDSEMDVVRFDDDNSPSIIQARSGAKKHPKTWVHYIAAEEEDWDYAPLVLAPDDRSYKSQYLNNGPQRIGRKYKKVRFMAYTDETFKTREAIQHESGILGPLLYGEVGDTLLIIFKNQASRPYNIYPHGITDVRPLYSRRLPKGVKHLKDFPILPGEIFKYKWTVTVEDGPTKSDPRCLTRYYSSFVNMERDLASGLIGPLLICYKESVDQRGNQIMSDKRNVILFSVFDENRSWYLTENIQRFLPNPAGVQLEDPEFQASNIMHSINGYVFDSLQLSVCLHEVAYWYILSIGAQTDFLSVFFSGYTFKHKMVYEDTLTLFPFSGETVFMSMENPGLWILGCHNSDFRNRGMTALLKVSSCDWNTGDYYEDSYEDISAYFDSKNNAIEPRSFSQNPPVLKRHQREGTRTTLQSDQEEIDYDDTISVEMKKEDFDILDEDENQSPRSFQKKTRHYFIAAVERLWDYGMSSSPHVLRNRAQSGSVPQFKKVVFQEFTDGSFTQPLYRGELNEHLGLLGPYIRAEVEDNIMVTFRNQASRPYSFYSSLISYEEDQRQGAEPRKNFVKPNETKTYFWKVQHHMAPTKDEFDCKAWAYFSDVDLEKDVHSGLIGPLLVCHTNTLNPAHGRQVTVQEFALFFTIFDETKSWYFTENMERNCRAPCNIQMEDPTFKENYRFHAINGYIMDTLPGLVMAQDQRIRWYLLSMGSNENIHSIHFSGHVFTVRKKEEYKMALYNLYPGVFETVEMLPSKAGIWRVECLIGEHLHAGMSTLFLVYSNKCQNPLGMASGHIRDFQITASGQYGQWAPKLARLHYSGSINAWSTKEPFSWIKVDLLAPMIIHGIKTQGARQKFSSLYISQFIIMYSLDGKKWQTYRGNSTGTDMVFFGNVDSSGIKHNIFNPPIIARYIRLHPTHYSIRSTLRMELMGCDLNSCSMPLGMESKAISDAQITASSYFTNMFATWSPSKARLHLQGRSNAWRPQVNNPKEWLQVDFQKTMKVTGVTTQGVKSLDTSMYVKEFLISSSQDGHQWTLFFQNGKVKVFQGNQDSFTPVVNSLDPPLLTRYLRIHPQSWEHQIALRMEVLGCEAQDLY

SEQ ID NO: 1339 - DNA, 4371 bp, synthetic construct
  misc_feature 1..4371: note = Variant of human B-domain deleted Factor VIII
  source 1..4371: mol_type = other DNA
atgcagattgaactgtctacctgcttcttcctctgtttgctgaggttctgctttagcgccactagacggtactaccttggcgctgtggagctgtcctgggactatatgcagagtgatttgggagagcttcccgtcgacgcacgatttcctcctcgcgttccaaagtcatttccctttaacacaagccaggtgtacaagaagacgctcttcgtcgaattcaccgatcacctgttcaatatcgccaaacccagaccaccatggatgggtcttttggggcctaccatacaagcggaggtgtatgacacagttgttatcactctcaagaacatggcttctcatccggtaagtcttcacgcagtgggcgtgtcctactggaaagcttcagaaggagccgagtatgatgatcagacatcccagagggagaaagaagacgacaaggtatttccaggtgggtctcatacctatgtgtggcaagtgctcaaagagaatggccctatggcaagcgatccgccgtgtttgacttacagctacctttcacacgttgacctcgtcaaggacctcaactccgggttgattggagccttgttggtatgcagggaaggatctcttgccaaagagaagacacagaccctccacaagtttatccttctctttgctgtgttcgatgagggcaaaagttggcatagcgaaacgaagaattccctcatgcaggatcgcgacgcagccagcgccagagcttggcccaagatgcacactgtgaacggatatgtcaataggacgcttcctggcttgattgggtgtcatcggaaaagtgtctactggcacgtgatcggaatggggacaacaccagaggtccactccatatttctcgaaggccataccttccttgttcgaaaccacagacaggcatccttggggatctctcccattacctttctcactgcccaaacgctccttatggacttgggtcagttccttctcttttgccatatcccgtcacaccagcatgatggtatggaagcttatgtgaaagtcgacagttgtcctgaggagccacagttgcgcatgaagaataatgaagaagccgaggattacgacgacgatctcaccgattctgagatggacgtggtgaggtttgatgacgacaactctccctccatcattcaagctcggagcggggcgaagaaacaccccaagacttgggtccactatatagcggcggaagaggaggattgggattacgctcctcttgtattggcaccagatgaccgctcatacaaaagccagtacctcaacaacggaccgcagagaattggccggaagtataagaaagtgcgatttatggcctatacagacgaaacctttaagacaagggaggccatccagcatgagagtgggattttgggacctcttctttacggcgaagttggtgataccctcctcatcatcttcaagaatcaagcttctcgcccctataacatttacccacacgggatcactgacgttaggcctttgtatagcagaagacttcccaaaggcgtgaagcatctcaaagacttccccattttgccaggcgagatctttaagtacaaatggaccgtcacagtggaagatggaccgactaaatcagaccctcgatgccttacgcggtactattcctccttcgtgaatatggagagagatttggcaagcggactcataggaccactcctcatctgttacaaggaatctgtagaccagaggggtaaccagattatgagtgataaacgcaatgtgatcctttttagcgtcttcgacgagaaccggtcctggtacttgaccgagaatatacaaaggttccttcccaaccccgcaggcgttcagttggaagaccctgagtttcaggccagcaatattatgcactcaatcaacggctatgtgtttgatagtctccagctttctgtttgcctccatgaagtagcctattggtacatcttgtcaattggtgctcaaacagacttcctctccgtcttcttctccggctacacctttaagcacaagatggtgtatgaggacactctcacactctttccattttctggagaaaccgtgttcatgagcatggagaatccaggcctttggatcttgggttgccacaacagtgattttcgcaatcggggaatgactgctctcctcaaagtcagcagctgtgattggaacacaggcgactattacgaagattcttacgaggacataagtgcctactttgactccaagaataacgccattgagcccagatcattctcccagaatcctcccgtgcttaaaaggcatcagcgcgaaggtaccagaactactcttcagtctgatcaagaggagattgactatgacgacaccattagcgtggaaatgaagaaggaggatttcgatatctatgacgaagatgagaaccagtctccgcggagctttcagaagaagacgcgacactacttcattgcagcagtcgaaaggctttgggactacggtatgtcatcatcccctcatgtgttgcgcaatagagctcagagtggaagtgttccacagttcaagaaagtcgtctttcaagagtttacagatggcagcttcacacagcctctctatcggggcgagcttaacgaacatttgggactccttggtccctatatccgagccgaagtggaggacaacattatggttacctttaggaatcaagcctctcgcccctacagcttctactcctccctcatcagttatgaggaggatcagagacaaatggctgaaccacggaagaactttgtgaaaccgaatgagacgaagacctacttctggaaagtacagcaccacatggcccccacaaaagacgaattcgattgcaaagcatgggcgtatttttcagacgttgacttggagaaagatgtacattcaggacttattggtcctttgttggtgtgtcacactaacactctcaatccagcccatggcaggcaggtgacagtccaggaattcgctcttttctttaccatctttgatgagaccaagtcctggtacttcacggaaaacatggagcgcaattgcagagccccctgtaacatacagatggaggaccctacctttaaggaaaattatcggttccacgcaatcaacggatacattatggatacactccctggccttgtgatggctcaggaccaacgaatcaggtggtacctcctcagcatgggttctaatgagaacatacactccattcacttttcaggacatgtgttcactgtccggaagaaagaagagtataagatggccctctacaatttgtatccaggcgtgtttgagaccgttgaaatgcttccctctaaagctggcatctggagagtagagtgcttgatcggagaacatcttcacgcaggtatgagcaccttgttcctcgtgtacagcaacaaatgtcagaatccacttggcatggccagtggacacattcgcgactttcagatcacagcatctggccagtatggacaatgggccccaaagttggctcgcctccattactccggtagcataaatgcgtggtccactaaagaacctttcagctggattaaggtcgatcttcttgcccccatgatcatccacggcattaagacacagggagcgaggcagaaattctcctccctctacatctcacagttcattattatgtatagtttggacggcaagaagtggcaaacttatagaggtaacagtactggaacagacatggtgttcttcggcaacgttgatagctctggcatcaaacacaacatctttaatcctcccataatagctcggtacatcagattgcatccgacccactacagcattaggagtacactccgaatggagcttatgggttgcgacttgaattcctgttcaatgccactcggaatggagtctaaagccatctctgatgcacagataaccgccagtagctactttacgaacatgtttgctacgtggtcaccctctaaggcaaggcttcatttgcaaggccggtctaatgcctggagacctcaggtgaacaacccgaaagaatggctccaggtggactttcagaagaccatgaaagtaacaggtgtcactactcagggagttaagtccttggatactagcatgtatgtgaaggagttccttatttcctcatcacaagatggccaccagtggaccctcttctttcagaatggtaaggtcaaagtgtttcagggcaatcaagacagcttcacacccgtggtgaacagtcttgatcctccactcttgacacgataccttcgaatccatccacagtcttgggagcaccagattgcattgcgcatggaagtacttggatgcgaggctcaggacctctac

SEQ ID NO: 1340 - protein, 1457 aa, synthetic construct
  REGION 1..1457: note = Variant of human B-domain deleted Factor VIII
MQIELSTCFFLCLLRFCFSATRRYYLGAVELSWDYMQSDLGELPVDARFPPRVPKSFPFNTSQVYKKTLFVEFTDHLFNIAKPRPPWMGLLGPTIQAEVYDTVVITLKNMASHPVSLHAVGVSYWKASEGAEYDDQTSQREKEDDKVFPGGSHTYVWQVLKENGPMASDPPCLTYSYLSHVDLVKDLNSGLIGALLVCREGSLAKEKTQTLHKFILLFAVFDEGKSWHSETKNSLMQDRDAASARAWPKMHTVNGYVNRTLPGLIGCHRKSVYWHVIGMGTTPEVHSIFLEGHTFLVRNHRQASLGISPITFLTAQTLLMDLGQFLLFCHIPSHQHDGMEAYVKVDSCPEEPQLRMKNNEEAEDYDDDLTDSEMDVVRFDDDNSPSIIQARSGAKKHPKTWVHYIAAEEEDWDYAPLVLAPDDRSYKSQYLNNGPQRIGRKYKKVRFMAYTDETFKTREAIQHESGILGPLLYGEVGDTLLIIFKNQASRPYNIYPHGITDVRPLYSRRLPKGVKHLKDFPILPGEIFKYKWTVTVEDGPTKSDPRCLTRYYSSFVNMERDLASGLIGPLLICYKESVDQRGNQIMSDKRNVILFSVFDENRSWYLTENIQRFLPNPAGVQLEDPEFQASNIMHSINGYVFDSLQLSVCLHEVAYWYILSIGAQTDFLSVFFSGYTFKHKMVYEDTLTLFPFSGETVFMSMENPGLWILGCHNSDFRNRGMTALLKVSSCDWNTGDYYEDSYEDISAYFDSKNNAIEPRSFSQNPPVLKRHQREGTRTTLQSDQEEIDYDDTISVEMKKEDFDIYDEDENQSPRSFQKKTRHYFIAAVERLWDYGMSSSPHVLRNRAQSGSVPQFKKVVFQEFTDGSFTQPLYRGELNEHLGLLGPYIRAEVEDNIMVTFRNQASRPYSFYSSLISYEEDQRQMAEPRKNFVKPNETKTYFWKVQHHMAPTKDEFDCKAWAYFSDVDLEKDVHSGLIGPLLVCHTNTLNPAHGRQVTVQEFALFFTIFDETKSWYFTENMERNCRAPCNIQMEDPTFKENYRFHAINGYIMDTLPGLVMAQDQRIRWYLLSMGSNENIHSIHFSGHVFTVRKKEEYKMALYNLYPGVFETVEMLPSKAGIWRVECLIGEHLHAGMSTLFLVYSNKCQNPLGMASGHIRDFQITASGQYGQWAPKLARLHYSGSINAWSTKEPFSWIKVDLLAPMIIHGIKTQGARQKFSSLYISQFIIMYSLDGKKWQTYRGNSTGTDMVFFGNVDSSGIKHNIFNPPIIARYIRLHPTHYSIRSTLRMELMGCDLNSCSMPLGMESKAISDAQITASSYFTNMFATWSPSKARLHLQGRSNAWRPQVNNPKEWLQVDFQKTMKVTGVTTQGVKSLDTSMYVKEFLISSSQDGHQWTLFFQNGKVKVFQGNQDSFTPVVNSLDPPLLTRYLRIHPQSWEHQIALRMEVLGCEAQDLY

SEQ ID NO: 1341 - DNA, 4371 bp, synthetic construct
  misc_feature 1..4371: note = Variant of human B-domain deleted Factor VIII
  source 1..4371: mol_type = other DNA
atgcagattgaactgtctacctgcttcttcctctgtttgctgaggttctgctttagcgccactagacggtactaccttggcgctgtggagctgtcctgggactatatgcagagtgatttgggagagcttcccgtcgacgcacgatttcctcctcgcgttccaaagtcatttccctttaacacaagccaggtgtacaagaagacgctcttcgtcgaattcaccgatcacctgttcaatatcgccaaacccagaccaccatggatgggtcttttggggcctaccatacaagcggaggtgtatgacacagttgttatcactctcaagaacatggcttctcatccggtaagtcttcacgcagtgggcgtgtcctactggaaagcttcagaaggagccgagtatgatgatcagacatcccagagggagaaagaagacgacaaggtatttccaggtgggtctcatacctatgtgtggcaagtgctcaaagagaatggccctatggcaagcgatccgccgtgtttgacttacagctacctttcacacgttgacctcgtcaaggacctcaactccgggttgattggagccttgttggtatgcagggaaggatctcttgccaaagagaagacacagaccctccacaagtttatccttctctttgctgtgttcgatgagggcaaaagttggcatagcgaaacgaagaattccctcatgcaggatcgcgacgcagccagcgccagagcttggcccaagatgcacactgtgaacggatatgtcaataggacgcttcctggcttgattgggtgtcatcggaaaagtgtctactggcacgtgatcggaatggggacaacaccagaggtccactccatatttctcgaaggccataccttccttgttcgaaaccacagacaggcatccttggggatctctcccattacctttctcactgcccaaacgctccttatggacttgggtcagttccttctcttttgccatatcccgtcacaccagcatgatggtatggaagcttatgtgaaagtcgacagttgtcctgaggagccacagttgcgcatgaagaataatgaagaagccgaggattacgacgacgatctcaccgattctgagatggacgtggtgaggtttgatgacgacaactctccctccatcattcaagctcggagcggggcgaagaaacaccccaagacttgggtccactatatagcggcggaagaggaggattgggattacgctcctcttgtattggcaccagatgaccgctcatacaaaagccagtacctcaacaacggaccgcagagaattggccggaagtataagaaagtgcgatttatggcctatacagacgaaacctttaagacaagggaggccatccagcatgagagtgggattttgggacctcttctttacggcgaagttggtgataccctcctcatcatcttcaagaatcaagcttctcgcccctataacatttacccacacgggatcactgacgttaggcctttgtatagcagaagacttcccaaaggcgtgaagcatctcaaagacttccccattttgccaggcgagatctttaagtacaaatggaccgtcacagtggaagatggaccgactaaatcagaccctcgatgccttacgcggtactattcctccttcgtgaatatggagagagatttggcaagcggactcataggaccactcctcatctgttacaaggaatctgtagaccagaggggtaaccagattatgagtgataaacgcaatgtgatcctttttagcgtcttcgacgagaaccggtcctggtacttgaccgagaatatacaaaggttccttcccaaccccgcaggcgttcagttggaagaccctgagtttcaggccagcaatattatgcactcaatcaacggctatgtgtttgatagtctccagctttctgtttgcctccatgaagtagcctattggtacatcttgtcaattggtgctcaaacagacttcctctccgtcttcttctccggctacacctttaagcacaagatggtgtatgaggacactctcacactctttccattttctggagaaaccgtgttcatgagcatggagaatccaggcctttggatcttgggttgccacaacagtgattttcgcaatcggggaatgactgctctcctcaaagtcagcagctgtgattggaacacaggcgactattacgaagattcttacgaggacataagtgcctactttgactccaagaataacgccattgagcccagatcattctcccagaatcctcccgtgcttaaaaggcatcagcgcgaaggtaccagaactactcttcagtctgatcaagaggagattgactatgacgacaccattagcgtggaaatgaagaaggaggatttcgatatctatgacgaagatgagaaccagtctccgcggagctttcagaagaagacgcgacactacttcattgcagcagtcgaaaggctttgggactacggtatgtcatcatcccctcatgtgttgcgcaatagagctcagagtggaagtgttccacagttcaagaaagtcgtctttcaagagtttacagatggcagcttcacacagcctctctatcggggcgagcttaacgaacatttgggactccttggtccctatatccgagccgaagtggaggacaacattatggttacctttaggaatcaagcctctcgcccctacagcttctactcctccctcatcagttatgaggaggatcagagacaaggcgctgaaccacggaagaactttgtgaaaccgaatgagacgaagacctacttctggaaagtacagcaccacatggcccccacaaaagacgaattcgattgcaaagcatgggcgtatttttcagacgttgacttggagaaagatgtacattcaggacttattggtcctttgttggtgtgtcacactaacactctcaatccagcccatggcaggcaggtgacagtccaggaattcgctcttttctttaccatctttgatgagaccaagtcctggtacttcacggaaaacatggagcgcaattgcagagccccctgtaacatacagatggaggaccctacctttaaggaaaattatcggttccacgcaatcaacggatacattatggatacactccctggccttgtgatggctcaggaccaacgaatcaggtggtacctcctcagcatgggttctaatgagaacatacactccattcacttttcaggacatgtgttcactgtccggaagaaagaagagtataagatggccctctacaatttgtatccaggcgtgtttgagaccgttgaaatgatgccctctaaagctggcatctggagagtagagtgcttgatcggagaacatcttcacgcaggtatgagcaccttgttcctcgtgtacagcaacaaatgtcagaatccacttggcatggccagtggacacattcgcgactttcagatcacagcatctggccagtatggacaatgggccccaaagttggctcgcctccattactccggtagcataaatgcgtggtccactaaagaacctttcagctggattaaggtcgatcttcttgcccccatgatcatccacggcattaagacacagggagcgaggcagaaattctcctccctctacatctcacagttcattattatgtatagtttggacggcaagaagtggcaaacttatagaggtaacagtactggaacagacatggtgttcttcggcaacgttgatagctctggcatcaaacacaacatctttaatcctcccataatagctcggtacatcagattgcatccgacccactacagcattaggagtacactccgaatggagcttatgggttgcgacttgaattcctgttcaatgccactcggaatggagtctaaagccatctctgatgcacagataaccgccagtagctactttacgaacatgtttgctacgtggtcaccctctaaggcaaggcttcatttgcaaggccggtctaatgcctggagacctcaggtgaacaacccgaaagaatggctccaggtggactttcagaagaccatgaaagtaacaggtgtcactactcagggagttaagtccttggatactagcatgtatgtgaaggagttccttatttcctcatcacaagatggccaccagtggaccctcttctttcagaatggtaaggtcaaagtgtttcagggcaatcaagacagcttcacacccgtggtgaacagtcttgatcctccactcttgacacgataccttcgaatccatccacagtcttgggagcaccagattgcattgcgcatggaagtacttggatgcgaggctcaggacctctac

SEQ ID NO: 1342 - protein, 1457 aa, synthetic construct
  REGION 1..1457: note = Variant of human B-domain deleted Factor VIII
MQIELSTCFFLCLLRFCFSATRRYYLGAVELSWDYMQSDLGELPVDARFPPRVPKSFPFNTSQVYKKTLFVEFTDHLFNIAKPRPPWMGLLGPTIQAEVYDTVVITLKNMASHPVSLHAVGVSYWKASEGAEYDDQTSQREKEDDKVFPGGSHTYVWQVLKENGPMASDPPCLTYSYLSHVDLVKDLNSGLIGALLVCREGSLAKEKTQTLHKFILLFAVFDEGKSWHSETKNSLMQDRDAASARAWPKMHTVNGYVNRTLPGLIGCHRKSVYWHVIGMGTTPEVHSIFLEGHTFLVRNHRQASLGISPITFLTAQTLLMDLGQFLLFCHIPSHQHDGMEAYVKVDSCPEEPQLRMKNNEEAEDYDDDLTDSEMDVVRFDDDNSPSIIQARSGAKKHPKTWVHYIAAEEEDWDYAPLVLAPDDRSYKSQYLNNGPQRIGRKYKKVRFMAYTDETFKTREAIQHESGILGPLLYGEVGDTLLIIFKNQASRPYNIYPHGITDVRPLYSRRLPKGVKHLKDFPILPGEIFKYKWTVTVEDGPTKSDPRCLTRYYSSFVNMERDLASGLIGPLLICYKESVDQRGNQIMSDKRNVILFSVFDENRSWYLTENIQRFLPNPAGVQLEDPEFQASNIMHSINGYVFDSLQLSVCLHEVAYWYILSIGAQTDFLSVFFSGYTFKHKMVYEDTLTLFPFSGETVFMSMENPGLWILGCHNSDFRNRGMTALLKVSSCDWNTGDYYEDSYEDISAYFDSKNNAIEPRSFSQNPPVLKRHQREGTRTTLQSDQEEIDYDDTISVEMKKEDFDIYDEDENQSPRSFQKKTRHYFIAAVERLWDYGMSSSPHVLRNRAQSGSVPQFKKVVFQEFTDGSFTQPLYRGELNEHLGLLGPYIRAEVEDNIMVTFRNQASRPYSFYSSLISYEEDQRQGAEPRKNFVKPNETKTYFWKVQHHMAPTKDEFDCKAWAYFSDVDLEKDVHSGLIGPLLVCHTNTLNPAHGRQVTVQEFALFFTIFDETKSWYFTENMERNCRAPCNIQMEDPTFKENYRFHAINGYIMDTLPGLVMAQDQRIRWYLLSMGSNENIHSIHFSGHVFTVRKKEEYKMALYNLYPGVFETVEMMPSKAGIWRVECLIGEHLHAGMSTLFLVYSNKCQNPLGMASGHIRDFQITASGQYGQWAPKLARLHYSGSINAWSTKEPFSWIKVDLLAPMIIHGIKTQGARQKFSSLYISQFIIMYSLDGKKWQTYRGNSTGTDMVFFGNVDSSGIKHNIFNPPIIARYIRLHPTHYSIRSTLRMELMGCDLNSCSMPLGMESKAISDAQITASSYFTNMFATWSPSKARLHLQGRSNAWRPQVNNPKEWLQVDFQKTMKVTGVTTQGVKSLDTSMYVKEFLISSSQDGHQWTLFFQNGKVKVFQGNQDSFTPVVNSLDPPLLTRYLRIHPQSWEHQIALRMEVLGCEAQDLY

SEQ ID NO: 1343 - DNA, 4371 bp, synthetic construct
  misc_feature 1..4371: note = Variant of human B-domain deleted Factor VIII
  source 1..4371: mol_type = other DNA
atgcagattgaactgtctacctgcttcttcctctgtttgctgaggttctgctttagcgccactagacggtactaccttggcgctgtggagctgtcctgggactatatgcagagtgatttgggagagcttcccgtcgacgcacgatttcctcctcgcgttccaaagtcatttccctttaacacaagccaggtgtacaagaagacgctcttcgtcgaattcaccgatcacctgttcaatatcgccaaacccagaccaccatggatgggtcttttggggcctaccatacaagcggaggtgtatgacacagttgttatcactctcaagaacatggcttctcatccggtaagtcttcacgcagtgggcgtgtcctactggaaagcttcagaaggagccgagtatgatgatcagacatcccagagggagaaagaagacgacaaggtatttccaggtgggtctcatacctatgtgtggcaagtgctcaaagagaatggccctatggcaagcgatccgccgtgtttgacttacagctacctttcacacgttgacctcgtcaaggacctcaactccgggttgattggagccttgttggtatgcagggaaggatctcttgccaaagagaagacacagaccctccacaagtttatccttctctttgctgtgttcgatgagggcaaaagttggcatagcgaaacgaagaattccctcatgcaggatcgcgacgcagccagcgccagagcttggcccaagatgcacactgtgaacggatatgtcaataggacgcttcctggcttgattgggtgtcatcggaaaagtgtctactggcacgtgatcggaatggggacaacaccagaggtccactccatatttctcgaaggccataccttccttgttcgaaaccacagacaggcatccttggggatctctcccattggttttctcactgcccaaacgctccttatggacttgggtcagttccttctcttttgccatatcccgtcacaccagcatgatggtatggaagcttatgtgaaagtcgacagttgtcctgaggagccacagttgcgcatgaagaataatgaagaagccgaggattacgacgacgatctcaccgattctgagatggacgtggtgaggtttgatgacgacaactctccctccatcattcaagctcggagcggggcgaagaaacaccccaagacttgggtccactatatagcggcggaagaggaggattgggattacgctcctcttgtattggcaccagatgaccgctcatacaaaagccagtacctcaacaacggaccgcagagaattggccggaagtataagaaagtgcgatttatggcctatacagacgaaacctttaagacaagggaggccatccagcatgagagtgggattttgggacctcttctttacggcgaagttggtgataccctcctcatcatcttcaagaatcaagcttctcgcccctataacatttacccacacgggatcactgacgttaggcctttgtatagcagaagacttcccaaaggcgtgaagcatctcaaagacttccccattttgccaggcgagatctttaagtacaaatggaccgtcacagtggaagatggaccgactaaatcagaccctcgatgccttacgcggtactattcctccttcgtgaatatggagagagatttggcaagcggactcataggaccactcctcatctgttacaaggaatctgtagaccagaggggtaaccagattatgagtgataaacgcaatgtgatcctttttagcgtcttcgacgagaaccggtcctggtacttgaccgagaatatacaaaggttccttcccaaccccgcaggcgttcagttggaagaccctgagtttcaggccagcaatattatgcactcaatcaacggctatgtgtttgatagtctccagctttctgtttgcctccatgaagtagcctattggtacatcttgtcaattggtgctcaaacagacttcctctccgtcttcttctccggctacacctttaagcacaagatggtgtatgaggacactctcacactctttccattttctggagaaaccgtgttcatgagcatggagaatccaggcctttggatcttgggttgccacaacagtgattttcgcaatcggggaatgactgctctcctcaaagtcagcagctgtgattggaacacaggcgactattacgaagattcttacgaggacataagtgcctactttgactccaagaataacgccattgagcccagatcattctcccagaatcctcccgtgcttaaaaggcatcagcgcgaaggtaccagaactactcttcagtctgatcaagaggagattgactatgacgacaccattagcgtggaaatgaagaaggaggatttcgatatctatgacgaagatgagaaccagtctccgcggagctttcagaagaagacgcgacactacttcattgcagcagtcgaaaggctttgggactacggtatgtcatcatcccctcatgtgttgcgcaatagagctcagagtggaagtgttccacagttcaagaaagtcgtctttcaagagtttacagatggcagcttcacacagcctctctatcggggcgagcttaacgaacatttgggactccttggtccctatatccgagccgaagtggaggacaacattatggttacctttaggaatcaagcctctcgcccctacagcttctactcctccctcatcagttatgaggaggatcagagacaaggcgctgaaccacggaagaactttgtgaaaccgaatgagacgaagacctacttctggaaagtacagcaccacatggcccccacaaaagacgaattcgattgcaaagcatgggcgtatttttcagacgttgacttggagaaagatgtacattcaggacttattggtcctttgttggtgtgtcacactaacactctcaatccagcccatggcaggcaggtgacagtccaggaattcgctcttttctttaccatctttgatgagaccaagtcctggtacttcacggaaaacatggagcgcaattgcagagccccctgtaacatacagatggaggaccctacctttaaggaaaattatcggttccacgcaatcaacggatacattatggatacactccctggccttgtgatggctcaggaccaacgaatcaggtggtacctcctcagcatgggttctaatgagaacatacactccattcacttttcaggacatgtgttcactgtccggaagaaagaagagtataagatggccctctacaatttgtatccaggcgtgtttgagaccgttgaaatgcttccctctaaagctggcatctggagagtagagtgcttgatcggagaacatcttcacgcaggtatgagcaccttgttcctcgtgtacagcaacaaatgtcagaatccacttggcatggccagtggacacattcgcgactttcagatcacagcatctggccagtatggacaatgggccccaaagttggctcgcctccattactccggtagcataaatgcgtggtccactaaagaacctttcagctggattaaggtcgatcttcttgcccccatgatcatccacggcattaagacacagggagcgaggcagaaattctcctccctctacatctcacagttcattattatgtatagtttggacggcaagaagtggcaaacttatagaggtaacagtactggaacagacatggtgttcttcggcaacgttgatagctctggcatcaaacacaacatctttaatcctcccataatagctcggtacatcagattgcatccgacccactacagcattaggagtacactccgaatggagcttatgggttgcgacttgaattcctgttcaatgccactcggaatggagtctaaagccatctctgatgcacagataaccgccagtagctactttacgaacatgtttgctacgtggtcaccctctaaggcaaggcttcatttgcaaggccggtctaatgcctggagacctcaggtgaacaacccgaaagaatggctccaggtggactttcagaagaccatgaaagtaacaggtgtcactactcagggagttaagtccttggatactagcatgtatgtgaaggagttccttatttcctcatcacaagatggccaccagtggaccctcttctttcagaatggtaaggtcaaagtgtttcagggcaatcaagacagcttcacacccgtggtgaacagtcttgatcctccactcttgacacgataccttcgaatccatccacagtcttgggagcaccagattgcattgcgcatggaagtacttggatgcgaggctcaggacctctac

SEQ ID NO: 1344 - protein, 1457 aa, synthetic construct
  REGION 1..1457: note = Variant of human B-domain deleted Factor VIII
MQIELSTCFFLCLLRFCFSATRRYYLGAVELSWDYMQSDLGELPVDARFPPRVPKSFPFNTSQVYKKTLFVEFTDHLFNIAKPRPPWMGLLGPTIQAEVYDTVVITLKNMASHPVSLHAVGVSYWKASEGAEYDDQTSQREKEDDKVFPGGSHTYVWQVLKENGPMASDPPCLTYSYLSHVDLVKDLNSGLIGALLVCREGSLAKEKTQTLHKFILLFAVFDEGKSWHSETKNSLMQDRDAASARAWPKMHTVNGYVNRTLPGLIGCHRKSVYWHVIGMGTTPEVHSIFLEGHTFLVRNHRQASLGISPIGFLTAQTLLMDLGQFLLFCHIPSHQHDGMEAYVKVDSCPEEPQLRMKNNEEAEDYDDDLTDSEMDVVRFDDDNSPSIIQARSGAKKHPKTWVHYIAAEEEDWDYAPLVLAPDDRSYKSQYLNNGPQRIGRKYKKVRFMAYTDETFKTREAIQHESGILGPLLYGEVGDTLLIIFKNQASRPYNIYPHGITDVRPLYSRRLPKGVKHLKDFPILPGEIFKYKWTVTVEDGPTKSDPRCLTRYYSSFVNMERDLASGLIGPLLICYKESVDQRGNQIMSDKRNVILFSVFDENRSWYLTENIQRFLPNPAGVQLEDPEFQASNIMHSINGYVFDSLQLSVCLHEVAYWYILSIGAQTDFLSVFFSGYTFKHKMVYEDTLTLFPFSGETVFMSMENPGLWILGCHNSDFRNRGMTALLKVSSCDWNTGDYYEDSYEDISAYFDSKNNAIEPRSFSQNPPVLKRHQREGTRTTLQSDQEEIDYDDTISVEMKKEDFDIYDEDENQSPRSFQKKTRHYFIAAVERLWDYGMSSSPHVLRNRAQSGSVPQFKKVVFQEFTDGSFTQPLYRGELNEHLGLLGPYIRAEVEDNIMVTFRNQASRPYSFYSSLISYEEDQRQGAEPRKNFVKPNETKTYFWKVQHHMAPTKDEFDCKAWAYFSDVDLEKDVHSGLIGPLLVCHTNTLNPAHGRQVTVQEFALFFTIFDETKSWYFTENMERNCRAPCNIQMEDPTFKENYRFHAINGYIMDTLPGLVMAQDQRIRWYLLSMGSNENIHSIHFSGHVFTVRKKEEYKMALYNLYPGVFETVEMLPSKAGIWRVECLIGEHLHAGMSTLFLVYSNKCQNPLGMASGHIRDFQITASGQYGQWAPKLARLHYSGSINAWSTKEPFSWIKVDLLAPMIIHGIKTQGARQKFSSLYISQFIIMYSLDGKKWQTYRGNSTGTDMVFFGNVDSSGIKHNIFNPPIIARYIRLHPTHYSIRSTLRMELMGCDLNSCSMPLGMESKAISDAQITASSYFTNMFATWSPSKARLHLQGRSNAWRPQVNNPKEWLQVDFQKTMKVTGVTTQGVKSLDTSMYVKEFLISSSQDGHQWTLFFQNGKVKVFQGNQDSFTPVVNSLDPPLLTRYLRIHPQSWEHQIALRMEVLGCEAQDLY

SEQ ID NO: 1345 - DNA, 4371 bp, synthetic construct
  misc_feature 1..4371: note = Variant of human B-domain deleted Factor VIII
  source 1..4371: mol_type = other DNA
atgcagattgaactgtctacctgcttcttcctctgtttgctgaggttctgctttagcgccactagacggtactaccttggcgctgtggagctgtcctgggactatatgcagagtgatttgggagagcttcccgtcgacgcacgatttcctcctcgcgttccaaagtcatttccctttaacacaagccaggtgtacaagaagacgctcttcgtcgaattcaccgatcacctgttcaatatcgccaaacccagaccaccatggatgggtcttttggggcctaccatacaagcggaggtgtatgacacagttgttatcactctcaagaacatggcttctcatccggtaagtcttcacgcagtgggcgtgtcctactggaaagcttcagaaggagccgagtatgatgatcagacatcccagagggagaaagaagacgacaaggtatttccaggtgggtctcatacctatgtgtggcaagtgctcaaagagaatggccctatggcaagcgatccgccgtgtttgacttacagctacctttcacacgttgacctcgtcaaggacctcaactccgggttgattggagccttgttggtatgcagggaaggatctcttgccaaagagaagacacagaccctccacaagtttatccttctctttgctgtgttcgatgagggcaaaagttggcatagcgaaacgaagaattccctcatgcaggatcgcgacgcagccagcgccagagcttggcccaagatgcacactgtgaacggatatgtcaataggacgcttcctggcttgattgggtgtcatcggaaaagtgtctactggcacgtgatcggaatggggacaacaccagaggtccactccatatttctcgaaggccataccttccttgttcgaaaccacagacaggcatccttggggatctctcccattacctttctcactgcccaaacgctccttatggacttgggtcagttccttctcttttgccatatcccgtcacaccagcatgatggtatggaagcttatgtgaaagtcgacagttgtcctgaggagccacagttgcgcatgaagaataatgaagaagccgaggattacgacgacgatctcaccgattctgagatggacgtggtgaggtttgatgacgacaactctccctccatcattcaagctcggagcggggcgaagaaacaccccaagacttgggtccactatatagcggcggaagaggaggattgggattacgctcctcttgtattggcaccagatgaccgctcatacaaaagccagtacctcaacaacggaccgcagagaattggccggaagtataagaaagtgcgatttatggcctatacagacgaaacctttaagacaagggaggccatccagcatgagagtgggattttgggacctcttctttacggcgaagttggtgataccctcctcatcatcttcaagaatcaagcttctcgcccctataacatttacccacacgggatcactgacgttaggcctttgtatagcagaagacttcccaaaggcgtgaagcatctcaaagacttccccattttgccaggcgagatctttaagtacaaatggaccgtcacagtggaagatggaccgactaaatcagaccctcgatgccttacgcggtactattcctccttcgtgaatatggagagagatttggcaagcggactcataggaccactcctcatctgttacaaggaatctgtagaccagaggggtaaccagattatgagtgataaacgcaatgtgatcctttttagcgtcttcgacgagaaccggtcctggtacttgaccgagaatatacaaaggttccttcccaaccccgcaggcgttcagttggaagaccctgagtttcaggccagcaatattatgcactcaatcaacggctatgtgtttgatagtctccagctttctgtttgcctccatgaagtagcctattggtacatcttgtcaattggtgctcaaacagacttcctctccgtcttcttctccggctacacctttaagcacaagatggtgtatgaggacactctcacactctttccattttctggagaaaccgtgttcatgagcatggagaatccaggcctttggatcttgggttgccacaacagtgattttcgcaatcggggaatgactgctctcctcaaagtcagcagctgtgattggaacacaggcgacaattacgaagattcttacgaggacataagtgcctactttgactccaagaataacgccattgagcccagatcattctcccagaatcctcccgtgcttaaaaggcatcagcgcgaaggtaccagaactactcttcagtctgatcaagaggagattgactatgacgacaccattagcgtggaaatgaagaaggaggatttcgatatctatgacgaagatgagaaccagtctccgcggagctttcagaagaagacgcgacactacttcattgcagcagtcgaaaggctttgggactacggtatgtcatcatcccctcatgtgttgcgcaatagagctcagagtggaagtgttccacagttcaagaaagtcgtctttcaagagtttacagatggcagcttcacacagcctctctatcggggcgagcttaacgaacatttgggactccttggtccctatatccgagccgaagtggaggacaacattatggttacctttaggaatcaagcctctcgcccctacagcttctactcctccctcatcagttatgaggaggatcagagacaaggcgctgaaccacggaagaactttgtgaaaccgaatgagacgaagacctacttctggaaagtacagcaccacatggcccccacaaaagacgaattcgattgcaaagcatgggcgtatttttcagacgttgacttggagaaagatgtacattcaggacttattggtcctttgttggtgtgtcacactaacactctcaatccagcccatggcaggcaggtgacagtccaggaattcgctcttttctttaccatctttgatgagaccaagtcctggtacttcacggaaaacatggagcgcaattgcagagccccctgtaacatacagatggaggaccctacctttaaggaaaattatcggttccacgcaatcaacggatacattatggatacactccctggccttgtgatggctcaggaccaacgaatcaggtggtacctcctcagcatgggttctaatgagaacatacactccattcacttttcaggacatgtgttcactgtccggaagaaagaagagtataagatggccctctacaatttgtatccaggcgtgtttgagaccgttgaaatgcttccctctaaagctggcatctggagagtagagtgcttgatcggagaacatcttcacgcaggtatgagcaccttgttcctcgtgtacagcaacaaatgtcagaatccacttggcatggccagtggacacattcgcgactttcagatcacagcatctggccagtatggacaatgggccccaaagttggctcgcctccattactccggtagcataaatgcgtggtccactaaagaacctttcagctggattaaggtcgatcttcttgcccccatgatcatccacggcattaagacacagggagcgaggcagaaattctcctccctctacatctcacagttcattattatgtatagtttggacggcaagaagtggcaaacttatagaggtaacagtactggaacagacatggtgttcttcggcaacgttgatagctctggcatcaaacacaacatctttaatcctcccataatagctcggtacatcagattgcatccgacccactacagcattaggagtacactccgaatggagcttatgggttgcgacttgaattcctgttcaatgccactcggaatggagtctaaagccatctctgatgcacagataaccgccagtagctactttacgaacatgtttgctacgtggtcaccctctaaggcaaggcttcatttgcaaggccggtctaatgcctggagacctcaggtgaacaacccgaaagaatggctccaggtggactttcagaagaccatgaaagtaacaggtgtcactactcagggagttaagtccttggatactagcatgtatgtgaaggagttccttatttcctcatcacaagatggccaccagtggaccctcttctttcagaatggtaaggtcaaagtgtttcagggcaatcaagacagcttcacacccgtggtgaacagtcttgatcctccactcttgacacgataccttcgaatccatccacagtcttgggagcaccagattgcattgcgcatggaagtacttggatgcgaggctcaggacctctac

SEQ ID NO: 1346 - protein, 1457 aa, synthetic construct
  REGION 1..1457: note = Variant of human B-domain deleted Factor VIII
MQIELSTCFFLCLLRFCFSATRRYYLGAVELSWDYMQSDLGELPVDARFPPRVPKSFPFNTSQVYKKTLFVEFTDHLFNIAKPRPPWMGLLGPTIQAEVYDTVVITLKNMASHPVSLHAVGVSYWKASEGAEYDDQTSQREKEDDKVFPGGSHTYVWQVLKENGPMASDPPCLTYSYLSHVDLVKDLNSGLIGALLVCREGSLAKEKTQTLHKFILLFAVFDEGKSWHSETKNSLMQDRDAASARAWPKMHTVNGYVNRTLPGLIGCHRKSVYWHVIGMGTTPEVHSIFLEGHTFLVRNHRQASLGISPITFLTAQTLLMDLGQFLLFCHIPSHQHDGMEAYVKVDSCPEEPQLRMKNNEEAEDYDDDLTDSEMDVVRFDDDNSPSIIQARSGAKKHPKTWVHYIAAEEEDWDYAPLVLAPDDRSYKSQYLNNGPQRIGRKYKKVRFMAYTDETFKTREAIQHESGILGPLLYGEVGDTLLIIFKNQASRPYNIYPHGITDVRPLYSRRLPKGVKHLKDFPILPGEIFKYKWTVTVEDGPTKSDPRCLTRYYSSFVNMERDLASGLIGPLLICYKESVDQRGNQIMSDKRNVILFSVFDENRSWYLTENIQRFLPNPAGVQLEDPEFQASNIMHSINGYVFDSLQLSVCLHEVAYWYILSIGAQTDFLSVFFSGYTFKHKMVYEDTLTLFPFSGETVFMSMENPGLWILGCHNSDFRNRGMTALLKVSSCDWNTGDNYEDSYEDISAYFDSKNNAIEPRSFSQNPPVLKRHQREGTRTTLQSDQEEIDYDDTISVEMKKEDFDIYDEDENQSPRSFQKKTRHYFIAAVERLWDYGMSSSPHVLRNRAQSGSVPQFKKVVFQEFTDGSFTQPLYRGELNEHLGLLGPYIRAEVEDNIMVTFRNQASRPYSFYSSLISYEEDQRQGAEPRKNFVKPNETKTYFWKVQHHMAPTKDEFDCKAWAYFSDVDLEKDVHSGLIGPLLVCHTNTLNPAHGRQVTVQEFALFFTIFDETKSWYFTENMERNCRAPCNIQMEDPTFKENYRFHAINGYIMDTLPGLVMAQDQRIRWYLLSMGSNENIHSIHFSGHVFTVRKKEEYKMALYNLYPGVFETVEMLPSKAGIWRVECLIGEHLHAGMSTLFLVYSNKCQNPLGMASGHIRDFQITASGQYGQWAPKLARLHYSGSINAWSTKEPFSWIKVDLLAPMIIHGIKTQGARQKFSSLYISQFIIMYSLDGKKWQTYRGNSTGTDMVFFGNVDSSGIKHNIFNPPIIARYIRLHPTHYSIRSTLRMELMGCDLNSCSMPLGMESKAISDAQITASSYFTNMFATWSPSKARLHLQGRSNAWRPQVNNPKEWLQVDFQKTMKVTGVTTQGVKSLDTSMYVKEFLISSSQDGHQWTLFFQNGKVKVFQGNQDSFTPVVNSLDPPLLTRYLRIHPQSWEHQIALRMEVLGCEAQDLY

SEQ ID NO: 1347 - DNA, 4371 bp, synthetic construct
  misc_feature 1..4371: note = Variant of human B-domain deleted Factor VIII
  source 1..4371: mol_type = other DNA
atgcagattgaactgtctacctgcttcttcctctgtttgctgaggttctgctttagcgccactagacggtactaccttggcgctgtggagctgtcctgggactatatgcagagtgatttgggagagcttcccgtcgacgcacgatttcctcctcgcgttccaaagtcatttccctttaacacaagccaggtgtacaagaagacgctcttcgtcgaattcaccgatcacctgttcaatatcgccaaacccagaccaccatggatgggtcttttggggcctaccatacaagcggaggtgtatgacacagttgttatcactctcaagaacatggcttctcatccggtaagtcttcacgcagtgggcgtgtcctactggaaagcttcagaaggagccgagtatgatgatcagacatcccagagggagaaagaagacgacaaggtatttccaggtgggtctcatacctatgtgtggcaagtgctcaaagagaatggccctatggcaagcgatccgccgtgtttgacttacagctacctttcacacgttgacctcgtcaaggacctcaactccgggttgattggagccttgttggtatgcagggaaggatctcttgccaaagagaagacacagaccctccacaagtttatccttctctttgctgtgttcgatgagggcaaaagttggcatagcgaaacgaagaattccctcatgcaggatcgcgacgcagccagcgccagagcttggcccaagatgcacactgtgaacggatatgtcaataggacgcttcctggcttgattgggtgtcatcggaaaagtgtctactggcacgtgatcggaatggggacaacaccagaggtccactccatatttctcgaaggccataccttccttgttcgaaaccacagacaggcatccttggggatctctcccattacctttctcactgcccaaacgctccttatggacttgggtcagttccttctcttttgccatatcccgtcacaccagcatgatggtatggaagcttatgtgaaagtcgacagttgtcctgaggagccacagttgcgcatgaagaataatgaagaagccgaggattacgacgacgatctcaccgattctgagatggacgtggtgaggtttgatgacgacaactctccctccatcattcaagctcggagcggggcgaagaaacaccccaagacttgggtccactatatagcggcggaagaggaggattgggattacgctcctcttgtattggcaccagatgaccgctcatacaaaagccagtacctcaacaacggaccgcagagaattggccggaagtataagaaagtgcgatttatggcctatacagacgaaacctttaagacaagggaggccatccagcatgagagtgggattttgggacctcttctttacggcgaagttggtgataccctcctcatcatcttcaagaatcaagcttctcgcccctataacatttacccacacgggatcactgacgttaggcctttgtatagcagaagacttcccaaaggcgtgaagcatctcaaagacttccccattttgccaggcgagatctttaagtacaaatggaccgtcacagtggaagatggaccgactaaatcagaccctcgatgccttacgcggtactattcctccttcgtgaatatggagagagatttggcaagcggactcataggaccactcctcatctgttacaaggaatctgtagaccagaggggtaaccagattatgagtgataaacgcaatgtgatcctttttagcgtcttcgacgagaaccggtcctggtacttgaccgagaatatacaaaggttccttcccaaccccgcaggcgttcagttggaagaccctgagtttcaggccagcaatattatgcactcaatcaacggctatgtgtttgatagtctccagctttctgtttgcctccatgaagtagcctattggtacatcttgtcaattggtgctcaaacagacttcctctccgtcttcttctccggctacacctttaagcacaagatggtgtatgaggacactctcacactctttccattttctggagaaaccgtgttcatgagcatggagaatccaggcctttggatcttgggttgccacaacagtgattttcgcaatcggggaatgactgctctcctcaaagtcagcagctgtgattggaacacaggcgactattacgaagattcttacgaggacataagtgcctactttgactccaagaataacgccattgagcccagatcattctcccagaatcctcccgtgcttaaaaggcatcagcgcgaaggtaccagaactactcttcagtctgatcaagaggagattgactatgacgacaccattagcgtggaaatgaagaaggaggatttcgatatcgttgacgaagatgagaaccagtctccgcggagctttcagaagaagacgcgacactacttcattgcagcagtcgaaaggctttgggactacggtatgtcatcatcccctcatgtgttgcgcaatagagctcagagtggaagtgttccacagttcaagaaagtcgtctttcaagagtttacagatggcagcttcacacagcctctctatcggggcgagcttaacgaacatttgggactccttggtccctatatccgagccgaagtggaggacaacattatggttacctttaggaatcaagcctctcgcccctacagcttctactcctccctcatcagttatgaggaggatcagagacaaggcgctgaaccacggaagaactttgtgaaaccgaatgagacgaagacctacttctggaaagtacagcaccacatggcccccacaaaagacgaattcgattgcaaagcatgggcgtatttttcagacgttgacttggagaaagatgtacattcaggacttattggtcctttgttggtgtgtcacactaacactctcaatccagcccatggcaggcaggtgacagtccaggaattcgctcttttctttaccatctttgatgagaccaagtcctggtacttcacggaaaacatggagcgcaattgcagagccccctgtaacatacagatggaggaccctacctttaaggaaaattatcggttccacgcaatcaacggatacattatggatacactccctggccttgtgatggctcaggaccaacgaatcaggtggtacctcctcagcatgggttctaatgagaacatacactccattcacttttcaggacatgtgttcactgtccggaagaaagaagagtataagatggccctctacaatttgtatccaggcgtgtttgagaccgttgaaatgcttccctctaaagctggcatctggagagtagagtgcttgatcggagaacatcttcacgcaggtatgagcaccttgttcctcgtgtacagcaacaaatgtcagaatccacttggcatggccagtggacacattcgcgactttcagatcacagcatctggccagtatggacaatgggccccaaagttggctcgcctccattactccggtagcataaatgcgtggtccactaaagaacctttcagctggattaaggtcgatcttcttgcccccatgatcatccacggcattaagacacagggagcgaggcagaaattctcctccctctacatctcacagttcattattatgtatagtttggacggcaagaagtggcaaacttatagaggtaacagtactggaacagacatggtgttcttcggcaacgttgatagctctggcatcaaacacaacatctttaatcctcccataatagctcggtacatcagattgcatccgacccactacagcattaggagtacactccgaatggagcttatgggttgcgacttgaattcctgttcaatgccactcggaatggagtctaaagccatctctgatgcacagataaccgccagtagctactttacgaacatgtttgctacgtggtcaccctctaaggcaaggcttcatttgcaaggccggtctaatgcctggagacctcaggtgaacaacccgaaagaatggctccaggtggactttcagaagaccatgaaagtaacaggtgtcactactcagggagttaagtccttggatactagcatgtatgtgaaggagttccttatttcctcatcacaagatggccaccagtggaccctcttctttcagaatggtaaggtcaaagtgtttcagggcaatcaagacagcttcacacccgtggtgaacagtcttgatcctccactcttgacacgataccttcgaatccatccacagtcttgggagcaccagattgcattgcgcatggaagtacttggatgcgaggctcaggacctctac

SEQ ID NO: 1348 - protein, 1457 aa, synthetic construct
  REGION 1..1457: note = Variant of human B-domain deleted Factor VIII
MQIELSTCFFLCLLRFCFSATRRYYLGAVELSWDYMQSDLGELPVDARFPPRVPKSFPFNTSQVYKKTLFVEFTDHLFNIAKPRPPWMGLLGPTIQAEVYDTVVITLKNMASHPVSLHAVGVSYWKASEGAEYDDQTSQREKEDDKVFPGGSHTYVWQVLKENGPMASDPPCLTYSYLSHVDLVKDLNSGLIGALLVCREGSLAKEKTQTLHKFILLFAVFDEGKSWHSETKNSLMQDRDAASARAWPKMHTVNGYVNRTLPGLIGCHRKSVYWHVIGMGTTPEVHSIFLEGHTFLVRNHRQASLGISPITFLTAQTLLMDLGQFLLFCHIPSHQHDGMEAYVKVDSCPEEPQLRMKNNEEAEDYDDDLTDSEMDVVRFDDDNSPSIIQARSGAKKHPKTWVHYIAAEEEDWDYAPLVLAPDDRSYKSQYLNNGPQRIGRKYKKVRFMAYTDETFKTREAIQHESGILGPLLYGEVGDTLLIIFKNQASRPYNIYPHGITDVRPLYSRRLPKGVKHLKDFPILPGEIFKYKWTVTVEDGPTKSDPRCLTRYYSSFVNMERDLASGLIGPLLICYKESVDQRGNQIMSDKRNVILFSVFDENRSWYLTENIQRFLPNPAGVQLEDPEFQASNIMHSINGYVFDSLQLSVCLHEVAYWYILSIGAQTDFLSVFFSGYTFKHKMVYEDTLTLFPFSGETVFMSMENPGLWILGCHNSDFRNRGMTALLKVSSCDWNTGDYYEDSYEDISAYFDSKNNAIEPRSFSQNPPVLKRHQREGTRTTLQSDQEEIDYDDTISVEMKKEDFDIVDEDENQSPRSFQKKTRHYFIAAVERLWDYGMSSSPHVLRNRAQSGSVPQFKKVVFQEFTDGSFTQPLYRGELNEHLGLLGPYIRAEVEDNIMVTFRNQASRPYSFYSSLISYEEDQRQGAEPRKNFVKPNETKTYFWKVQHHMAPTKDEFDCKAWAYFSDVDLEKDVHSGLIGPLLVCHTNTLNPAHGRQVTVQEFALFFTIFDETKSWYFTENMERNCRAPCNIQMEDPTFKENYRFHAINGYIMDTLPGLVMAQDQRIRWYLLSMGSNENIHSIHFSGHVFTVRKKEEYKMALYNLYPGVFETVEMLPSKAGIWRVECLIGEHLHAGMSTLFLVYSNKCQNPLGMASGHIRDFQITASGQYGQWAPKLARLHYSGSINAWSTKEPFSWIKVDLLAPMIIHGIKTQGARQKFSSLYISQFIIMYSLDGKKWQTYRGNSTGTDMVFFGNVDSSGIKHNIFNPPIIARYIRLHPTHYSIRSTLRMELMGCDLNSCSMPLGMESKAISDAQITASSYFTNMFATWSPSKARLHLQGRSNAWRPQVNNPKEWLQVDFQKTMKVTGVTTQGVKSLDTSMYVKEFLISSSQDGHQWTLFFQNGKVKVFQGNQDSFTPVVNSLDPPLLTRYLRIHPQSWEHQIALRMEVLGCEAQDLY

SEQ ID NO: 1349 - DNA, 4371 bp, synthetic construct
  misc_feature 1..4371: note = Variant of human B-domain deleted Factor VIII
  source 1..4371: mol_type = other DNA
atgcagattgaactgtctacctgcttcttcctctgtttgctgaggttctgctttagcgccactagacggtactaccttggcgctgtggagctgtcctgggactatatgcagagtgatttgggagagcttcccgtcgacgcacgatttcctcctcgcgttccaaagtcatttccctttaacacaagccaggtgtacaagaagacgctcttcgtcgaattcaccgatcacctgttcaatatcgccaaacccagaccaccatggatgggtcttttggggcctaccatacaagcggaggtgtatgacacagttgttatcactctcaagaacatggcttctcatccggtaagtcttcacgcagtgggcgtgtcctactggaaagcttcagaaggagccgagtatgatgatcagacatcccagagggagaaagaagacgacaaggtatttccaggtgggtctcatacctatgtgtggcaagtgctcaaagagaatggccctatggcaagcgatccgccgtgtttgacttacagctacctttcacacgttgacctcgtcaaggacctcaactccgggttgattggagccttgttggtatgcagggaaggatctcttgccaaagagaagacacagaccctccacaagtttatccttctctttgctgtgttcgatgagggcaaaagttggcatagcgaaacgaagaattccctcatgcaggatcgcgacgcagccagcgccagagcttggcccaagatgcacactgtgaacggatatgtcaataggacgcttcctggcttgattgggtgtcatcggaaaagtgtctactggcacgtgatcggaatggggacaacaccagaggtccactccatatttctcgaaggccataccttccttgttcgaaaccacagacaggcatccttggggatctctcccattacctttctcactgcccaaacgctccttatggacttgggtcagttccttctcttttgccatatcccgtcacaccagcatgatggtatggaagcttatgtgaaagtcgacagttgtcctgaggagccacagttgcgcatgaagaataatgaagaagccgaggattacgacgacgatctcaccgattctgagatggacgtggtgaggtttgatgacgacaactctccctccatcattcaagctcggagcggggcgaagaaacaccccaagacttgggtccactatatagcggcggaagaggaggattgggattacgctcctcttgtattggcaccagatgaccgctcatacaaaagccagtacctcaacaacggaccgcagagaattggccggaagtataagaaagtgcgatttatggcctatacagacgaaacctttaagacaagggaggccatccagcatgagagtgggattttgggacctcttctttacggcgaagttggtgataccctcctcatcatcttcaagaatcaagcttctcgcccctataacatttacccacacgggatcactgacgttaggcctttgtatagcagaagacttcccaaaggcgtgaagcatctcaaagacttccccattttgccaggcgagatctttaagtacaaatggaccgtcacagtggaagatggaccgactaaatcagaccctcgatgccttacgcggtactattcctccttcgtgaatatggagagagatttggcaagcggactcataggaccactcctcatctgttacaaggaatctgtagaccagaggggtaaccagattatgagtgataaacgcaatgtgatcctttttagcgtcttcgacgagaaccggtcctggtacttgaccgagaatatacaaaggttccttcccaaccccgcaggcgttcagttggaagaccctgagtttcaggccagcaatattatgcactcaatcaacggctatgtgtttgatagtctccagctttctgtttgcctccatgaagtagcctattggtacatcttgtcaattggtgctcaaacagacttcctctccgtcttcttctccggctacacctttaagcacaagatggtgtatgaggacactctcacactctttccattttctggagaaaccgtgttcatgagcatggagaatccaggcctttggatcttgggttgccacaacagtgattttcgcaatcggggaatgactgctctcctcaaagtcagcagctgtgattggaacacaggcgactattacgaagattcttacgaggacataagtgcctactttgactccaagaataacgccattgagcccagatcattctcccagaatcctcccgtgcttaaaaggcatcagcgcgaaggtaccagaactactcttcagtctgatcaagaggagattgactatgacgacaccattagcgtggaaatgaagaaggagattttcgatatctatgacgaagatgagaaccagtctccgcggagctttcagaagaagacgcgacactacttcattgcagcagtcgaaaggctttgggactacggtatgtcatcatcccctcatgtgttgcgcaatagagctcagagtggaagtgttccacagttcaagaaagtcgtctttcaagagtttacagatggcagcttcacacagcctctctatcggggcgagcttaacgaacatttgggactccttggtccctatatccgagccgaagtggaggacaacattatggttacctttaggaatcaagcctctcgcccctacagcttctactcctccctcatcagttatgaggaggatcagagacaaggcgctgaaccacggaagaactttgtgaaaccgaatgagacgaagacctacttctggaaagtacagcaccacatggcccccacaaaagacgaattcgattgcaaagcatgggcgtatttttcagacgttgacttggagaaagatgtacattcaggacttattggtcctttgttggtgtgtcacactaacactctcaatccagcccatggcaggcaggtgacagtccaggaattcgctcttttctttaccatctttgatgagaccaagtcctggtacttcacggaaaacatggagcgcaattgcagagccccctgtaacatacagatggaggaccctacctttaaggaaaattatcggttccacgcaatcaacggatacattatggatacactccctggccttgtgatggctcaggaccaacgaatcaggtggtacctcctcagcatgggttctaatgagaacatacactccattcacttttcaggacatgtgttcactgtccggaagaaagaagagtataagatggccctctacaatttgtatccaggcgtgtttgagaccgttgaaatgcttccctctaaagctggcatctggagagtagagtgcttgatcggagaacatcttcacgcaggtatgagcaccttgttcctcgtgtacagcaacaaatgtcagaatccacttggcatggccagtggacacattcgcgactttcagatcacagcatctggccagtatggacaatgggccccaaagttggctcgcctccattactccggtagcataaatgcgtggtccactaaagaacctttcagctggattaaggtcgatcttcttgcccccatgatcatccacggcattaagacacagggagcgaggcagaaattctcctccctctacatctcacagttcattattatgtatagtttggacggcaagaagtggcaaacttatagaggtaacagtactggaacagacatggtgttcttcggcaacgttgatagctctggcatcaaacacaacatctttaatcctcccataatagctcggtacatcagattgcatccgacccactacagcattaggagtacactccgaatggagcttatgggttgcgacttgaattcctgttcaatgccactcggaatggagtctaaagccatctctgatgcacagataaccgccagtagctactttacgaacatgtttgctacgtggtcaccctctaaggcaaggcttcatttgcaaggccggtctaatgcctggagacctcaggtgaacaacccgaaagaatggctccaggtggactttcagaagaccatgaaagtaacaggtgtcactactcagggagttaagtccttggatactagcatgtatgtgaaggagttccttatttcctcatcacaagatggccaccagtggaccctcttctttcagaatggtaaggtcaaagtgtttcagggcaatcaagacagcttcacacccgtggtgaacagtcttgatcctccactcttgacacgataccttcgaatccatccacagtcttgggagcaccagattgcattgcgcatggaagtacttggatgcgaggctcaggacctctac

SEQ ID NO: 1350 - protein, 1457 aa, synthetic construct
  REGION 1..1457: note = Variant of human B-domain deleted Factor VIII
MQIELSTCFFLCLLRFCFSATRRYYLGAVELSWDYMQSDLGELPVDARFPPRVPKSFPFNTSQVYKKTLFVEFTDHLFNIAKPRPPWMGLLGPTIQAEVYDTVVITLKNMASHPVSLHAVGVSYWKASEGAEYDDQTSQREKEDDKVFPGGSHTYVWQVLKENGPMASDPPCLTYSYLSHVDLVKDLNSGLIGALLVCREGSLAKEKTQTLHKFILLFAVFDEGKSWHSETKNSLMQDRDAASARAWPKMHTVNGYVNRTLPGLIGCHRKSVYWHVIGMGTTPEVHSIFLEGHTFLVRNHRQASLGISPITFLTAQTLLMDLGQFLLFCHIPSHQHDGMEAYVKVDSCPEEPQLRMKNNEEAEDYDDDLTDSEMDVVRFDDDNSPSIIQARSGAKKHPKTWVHYIAAEEEDWDYAPLVLAPDDRSYKSQYLNNGPQRIGRKYKKVRFMAYTDETFKTREAIQHESGILGPLLYGEVGDTLLIIFKNQASRPYNIYPHGITDVRPLYSRRLPKGVKHLKDFPILPGEIFKYKWTVTVEDGPTKSDPRCLTRYYSSFVNMERDLASGLIGPLLICYKESVDQRGNQIMSDKRNVILFSVFDENRSWYLTENIQRFLPNPAGVQLEDPEFQASNIMHSINGYVFDSLQLSVCLHEVAYWYILSIGAQTDFLSVFFSGYTFKHKMVYEDTLTLFPFSGETVFMSMENPGLWILGCHNSDFRNRGMTALLKVSSCDWNTGDYYEDSYEDISAYFDSKNNAIEPRSFSQNPPVLKRHQREGTRTTLQSDQEEIDYDDTISVEMKKEIFDIYDEDENQSPRSFQKKTRHYFIAAVERLWDYGMSSSPHVLRNRAQSGSVPQFKKVVFQEFTDGSFTQPLYRGELNEHLGLLGPYIRAEVEDNIMVTFRNQASRPYSFYSSLISYEEDQRQGAEPRKNFVKPNETKTYFWKVQHHMAPTKDEFDCKAWAYFSDVDLEKDVHSGLIGPLLVCHTNTLNPAHGRQVTVQEFALFFTIFDETKSWYFTENMERNCRAPCNIQMEDPTFKENYRFHAINGYIMDTLPGLVMAQDQRIRWYLLSMGSNENIHSIHFSGHVFTVRKKEEYKMALYNLYPGVFETVEMLPSKAGIWRVECLIGEHLHAGMSTLFLVYSNKCQNPLGMASGHIRDFQITASGQYGQWAPKLARLHYSGSINAWSTKEPFSWIKVDLLAPMIIHGIKTQGARQKFSSLYISQFIIMYSLDGKKWQTYRGNSTGTDMVFFGNVDSSGIKHNIFNPPIIARYIRLHPTHYSIRSTLRMELMGCDLNSCSMPLGMESKAISDAQITASSYFTNMFATWSPSKARLHLQGRSNAWRPQVNNPKEWLQVDFQKTMKVTGVTTQGVKSLDTSMYVKEFLISSSQDGHQWTLFFQNGKVKVFQGNQDSFTPVVNSLDPPLLTRYLRIHPQSWEHQIALRMEVLGCEAQDLY

SEQ ID NO: 1351 - DNA, 4371 bp, synthetic construct
  misc_feature 1..4371: note = Variant of human B-domain deleted Factor VIII
  source 1..4371: mol_type = other DNA
atgcagattgaactgtctacctgcttcttcctctgtttgctgaggttctgctttagcgccactagacggtactaccttggcgctgtggagctgtcctgggactatatgcagagtgatttgggagagcttcccgtcgacgcacgatttcctcctcgcgttccaaagtcatttccctttaacacaagccaggtgtacaagaagacgctcttcgtcgaattcaccgatcacctgttcaatatcgccaaacccagaccaccatggatgggtcttttggggcctaccatacaagcggaggtgtatgacacagttgttatcactctcaagaacatggcttctcatccggtaagtcttcacgcagtgggcgtgtcctactggaaagcttcagaaggagccgagtatgatgatcagacatcccagagggagaaagaagacgacaaggtatttccaggtgggtctcatacctatgtgtggcaagtgctcaaagagaatggccctatggcaagcgatccgccgtgtttgacttacagctacctttcacacgttgacctcgtcaaggacctcaactccgggttgattggagccttgttggtatgcagggaaggatctcttgccaaagagaagacacagaccctccacaagtttatccttctctttgctgtgttcgatgagggcaaaagttggcatagcgaaacgaagaattccctcatgcaggatcgcgacgcagccagcgccagagcttggcccaagatgcacactgtgaacggatatgtcaataggacgcttcctggcttgattgggtgtcatcggaaaagtgtctactggcacgtgatcggaatggggacaacaccagaggtccactccatatttctcgaaggccataccttccttgttcgaaaccacagacaggcatccttggggatctctcccattacctttctcactgcccaaacgctccttatggacttgggtcagttccttctcttttgccatatcccgtcacaccagcatgatggtatggaagcttatgtgaaagtcgacagttgtcctgaggagccacagttgcgcatgaagaataatgaagaagccgaggattacgacgacgatctcaccgattctgagatggacgtggtgaggtttgatgacgacaactctccctccatcattcaagctcggagcggggcgaagaaacaccccaagacttgggtccactatatagcggcggaagaggaggattgggattacgctcctcttgtattggcaccagatgaccgctcatacaaaagccagtacctcaacaacggaccgcagagaattggccggaagtataagaaagtgcgatttatggcctatacagacgaaacctttaagacaagggaggccatccagcatgagagtgggattttgggacctcttctttacggcgaagttggtgataccctcctcatcatcttcaagaatcaagcttctcgcccctataacatttacccacacgggatcactgacgttaggcctttgtatagcagaagacttcccaaaggcgtgaagcatctcaaagacttccccattttgccaggcgagatctttaagtacaaatggaccgtcacagtggaagatggaccgactaaatcagaccctcgatgccttacgcggtactattcctccttcgtgaatatggagagagatttggcaagcggactcataggaccactcctcatctgttacaaggaatctgtagaccagaggggtaaccagattatgagtgataaacgcaatgtgatcctttttagcgtcttcgacgagaaccggtcctggtacttgaccgagaatatacaaaggttccttcccaaccccgcaggcgttcagttggaagaccctgagtttcaggccagcaatattatgcactcaatcaacggctatgtgtttgatagtctccagctttctgtttgcctccatgaagtagcctattggtacatcttgtcaattggtgctcaaacagacttcctctccgtcttcttctccggctacacctttaagcacaagatggtgtatgaggacactctcacactctttccattttctggagaaaccgtgttcatgagcatggagaatccaggcctttggatcttgggttgccacaacagtgattttcgcaatcggggaatgactgctctcctcaaagtcagcagctgtgattggaacacaggcgactattacgaagattcttacgaggacataagtgcctactttgacgataagaataacgccattgagcccagatcattctcccagaatcctcccgtgcttaaaaggcatcagcgcgaaggtaccagaactactcttcagtctgatcaagaggagattgactatgacgacaccattagcgtggaaatgaagaaggaggatttcgatatctatgacgaagatgagaaccagtctccgcggagctttcagaagaagacgcgacactacttcattgcagcagtcgaaaggctttgggactacggtatgtcatcatcccctcatgtgttgcgcaatagagctcagagtggaagtgttccacagttcaagaaagtcgtctttcaagagtttacagatggcagcttcacacagcctctctatcggggcgagcttaacgaacatttgggactccttggtccctatatccgagccgaagtggaggacaacattatggttacctttaggaatcaagcctctcgcccctacagcttctactcctccctcatcagttatgaggaggatcagagacaaggcgctgaaccacggaagaactttgtgaaaccgaatgagacgaagacctacttctggaaagtacagcaccacatggcccccacaaaagacgaattcgattgcaaagcatgggcgtatttttcagacgttgacttggagaaagatgtacattcaggacttattggtcctttgttggtgtgtcacactaacactctcaatccagcccatggcaggcaggtgacagtccaggaattcgctcttttctttaccatctttgatgagaccaagtcctggtacttcacggaaaacatggagcgcaattgcagagccccctgtaacatacagatggaggaccctacctttaaggaaaattatcggttccacgcaatcaacggatacattatggatacactccctggccttgtgatggctcaggaccaacgaatcaggtggtacctcctcagcatgggttctaatgagaacatacactccattcacttttcaggacatgtgttcactgtccggaagaaagaagagtataagatggccctctacaatttgtatccaggcgtgtttgagaccgttgaaatgcttccctctaaagctggcatctggagagtagagtgcttgatcggagaacatcttcacgcaggtatgagcaccttgttcctcgtgtacagcaacaaatgtcagaatccacttggcatggccagtggacacattcgcgactttcagatcacagcatctggccagtatggacaatgggccccaaagttggctcgcctccattactccggtagcataaatgcgtggtccactaaagaacctttcagctggattaaggtcgatcttcttgcccccatgatcatccacggcattaagacacagggagcgaggcagaaattctcctccctctacatctcacagttcattattatgtatagtttggacggcaagaagtggcaaacttatagaggtaacagtactggaacagacatggtgttcttcggcaacgttgatagctctggcatcaaacacaacatctttaatcctcccataatagctcggtacatcagattgcatccgacccactacagcattaggagtacactccgaatggagcttatgggttgcgacttgaattcctgttcaatgccactcggaatggagtctaaagccatctctgatgcacagataaccgccagtagctactttacgaacatgtttgctacgtggtcaccctctaaggcaaggcttcatttgcaaggccggtctaatgcctggagacctcaggtgaacaacccgaaagaatggctccaggtggactttcagaagaccatgaaagtaacaggtgtcactactcagggagttaagtccttggatactagcatgtatgtgaaggagttccttatttcctcatcacaagatggccaccagtggaccctcttctttcagaatggtaaggtcaaagtgtttcagggcaatcaagacagcttcacacccgtggtgaacagtcttgatcctccactcttgacacgataccttcgaatccatccacagtcttgggagcaccagattgcattgcgcatggaagtacttggatgcgaggctcaggacctctac

SEQ ID NO: 1352 - protein, 1457 aa, synthetic construct
  REGION 1..1457: note = Variant of human B-domain deleted Factor VIII
MQIELSTCFFLCLLRFCFSATRRYYLGAVELSWDYMQSDLGELPVDARFPPRVPKSFPFNTSQVYKKTLFVEFTDHLFNIAKPRPPWMGLLGPTIQAEVYDTVVITLKNMASHPVSLHAVGVSYWKASEGAEYDDQTSQREKEDDKVFPGGSHTYVWQVLKENGPMASDPPCLTYSYLSHVDLVKDLNSGLIGALLVCREGSLAKEKTQTLHKFILLFAVFDEGKSWHSETKNSLMQDRDAASARAWPKMHTVNGYVNRTLPGLIGCHRKSVYWHVIGMGTTPEVHSIFLEGHTFLVRNHRQASLGISPITFLTAQTLLMDLGQFLLFCHIPSHQHDGMEAYVKVDSCPEEPQLRMKNNEEAEDYDDDLTDSEMDVVRFDDDNSPSIIQARSGAKKHPKTWVHYIAAEEEDWDYAPLVLAPDDRSYKSQYLNNGPQRIGRKYKKVRFMAYTDETFKTREAIQHESGILGPLLYGEVGDTLLIIFKNQASRPYNIYPHGITDVRPLYSRRLPKGVKHLKDFPILPGEIFKYKWTVTVEDGPTKSDPRCLTRYYSSFVNMERDLASGLIGPLLICYKESVDQRGNQIMSDKRNVILFSVFDENRSWYLTENIQRFLPNPAGVQLEDPEFQASNIMHSINGYVFDSLQLSVCLHEVAYWYILSIGAQTDFLSVFFSGYTFKHKMVYEDTLTLFPFSGETVFMSMENPGLWILGCHNSDFRNRGMTALLKVSSCDWNTGDYYEDSYEDISAYFDDKNNAIEPRSFSQNPPVLKRHQREGTRTTLQSDQEEIDYDDTISVEMKKEDFDIYDEDENQSPRSFQKKTRHYFIAAVERLWDYGMSSSPHVLRNRAQSGSVPQFKKVVFQEFTDGSFTQPLYRGELNEHLGLLGPYIRAEVEDNIMVTFRNQASRPYSFYSSLISYEEDQRQGAEPRKNFVKPNETKTYFWKVQHHMAPTKDEFDCKAWAYFSDVDLEKDVHSGLIGPLLVCHTNTLNPAHGRQVTVQEFALFFTIFDETKSWYFTENMERNCRAPCNIQMEDPTFKENYRFHAINGYIMDTLPGLVMAQDQRIRWYLLSMGSNENIHSIHFSGHVFTVRKKEEYKMALYNLYPGVFETVEMLPSKAGIWRVECLIGEHLHAGMSTLFLVYSNKCQNPLGMASGHIRDFQITASGQYGQWAPKLARLHYSGSINAWSTKEPFSWIKVDLLAPMIIHGIKTQGARQKFSSLYISQFIIMYSLDGKKWQTYRGNSTGTDMVFFGNVDSSGIKHNIFNPPIIARYIRLHPTHYSIRSTLRMELMGCDLNSCSMPLGMESKAISDAQITASSYFTNMFATWSPSKARLHLQGRSNAWRPQVNNPKEWLQVDFQKTMKVTGVTTQGVKSLDTSMYVKEFLISSSQDGHQWTLFFQNGKVKVFQGNQDSFTPVVNSLDPPLLTRYLRIHPQSWEHQIALRMEVLGCEAQDLY

SEQ ID NO: 1353 - DNA, 4371 bp, synthetic construct
  misc_feature 1..4371: note = Variant of human B-domain deleted Factor VIII
  source 1..4371: mol_type = other DNA
atgcagattgaactgtctacctgcttcttcctctgtttgctgaggttctgctttagcgccactagacggtactaccttggcgctgtggagctgtcctgggactatatgcagagtgatttgggagagcttcccgtcgacgcacgatttcctcctcgcgttccaaagtcatttccctttaacacaagccaggtgtacaagaagacgctcttcgtcgaattcaccgatcacctgttcaatatcgccaaacccagaccaccatggatgggtcttttggggcctaccatacaagcggaggtgtatgacacagttgttatcactctcaagaacatggcttctcatccggtaagtcttcacgcagtgggcgtgtcctactggaaagcttcagaaggagccgagtatgatgatcagacatcccagagggagaaagaagacgacaaggtatttccaggtgggtctcatacctatgtgtggcaagtgctcaaagagaatggccctatggcaagcgatccgccgtgtttgacttacagctacctttcacacgttgacctcgtcaaggacctcaactccgggttgattggagccttgttggtatgcagggaaggatctcttgccaaagagaagacacagaccctccacaagtttatccttctctttgctgtgttcgatgagggcaaaagttggcatagcgaaacgaagaattccctcatgcaggatcgcgacgcagccagcgccagagcttggcccaagatgcacactgtgaacggatatgtcaataggacgcttcctggcttgattgggtgtcatcggaaaagtgtctactggcacgtgatcggaatggggacaacaccagaggtccactccatatttctcgaaggccataccttccttgttcgaaaccacagacaggcatccttggggatctctcccattacctttctcactgcccaaacgctccttatggacttgggtcagttccttctcttttgccatatcccgtcacaccagcatgatggtatggaagcttatgtgaaagtcgacagttgtcctgaggagccacagttgcgcatgaagaataatgaagaagccgaggattacgacgacgatctcaccgattctgagatggacgtggtgaggtttgatgacgacaactctccctccatcattcaagctcggagcggggcgaagaaacaccccaagacttgggtccactatatagcggcggaagaggaggattgggattacgctcctcttgtattggcaccagatgaccgctcatacaaaagccagtacctcaacaacggaccgcagagaattggccggaagtataagaaagtgcgatttatggcctatacagacgaaacctttaagacaagggaggccatccagcatgagagtgggattttgggacctcttctttacggcgaagttggtgataccctcctcatcatcttcaagaatcaagcttctcgcccctataacatttacccacacgggatcactgacgttaggcctttgtatagcagaagacttcccaaaggcgtgaagcatctcaaagacttccccattttgccaggcgagatctttaagtacaaatggaccgtcacagtggaagatggaccgactaaatcagaccctcgatgccttacgcggtactattcctccttcgtgaatatggagagagatttggcaagcggactcataggaccactcctcatctgttacaaggaatctgtagaccagaggggtaaccagattatgagtgataaacgcaatgtgatcctttttagcgtcttcgacgagaaccggtcctggtacttgaccgagaatatacaaaggttccttcccaaccccgcaggcgttcagttggaagaccctgagtttcaggccagcaatattatgcactcaatcaacggctatgtgtttgatagtctccagctttctgtttgcctccatgaagtagcctattggtacatcttgtcaattggtgctcaaacagacttcctctccgtcttcttctccggctacacctttaagcacaagatggtgtatgaggacactctcacactctttccatttactggagaaaccgtgttcatgagcatggagaatccaggcctttggatcttgggttgccacaacagtgattttcgcaatcggggaatgactgctctcctcaaagtcagcagctgtgattggaacacaggcgactattacgaagattcttacgaggacataagtgcctactttgactccaagaataacgccattgagcccagatcattctcccagaatcctcccgtgcttaaaaggcatcagcgcgaaggtaccagaactactcttcagtctgatcaagaggagattgactatgacgacaccattagcgtggaaatgaagaaggaggatttcgatatctatgacgaagatgagaaccagtctccgcggagctttcagaagaagacgcgacactacttcattgcagcagtcgaaaggctttgggactacggtatgtcatcatcccctcatgtgttgcgcaatagagctcagagtggaagtgttccacagttcaagaaagtcgtctttcaagagtttacagatggcagcttcacacagcctctctatcggggcgagcttaacgaacatttgggactccttggtccctatatccgagccgaagtggaggacaacattatggttacctttaggaatcaagcctctcgcccctacagcttctactcctccctcatcagttatgaggaggatcagagacaaggcgctgaaccacggaagaactttgtgaaaccgaatgagacgaagacctacttctggaaagtacagcaccacatggcccccacaaaagacgaattcgattgcaaagcatgggcgtatttttcagacgttgacttggagaaagatgtacattcaggacttattggtcctttgttggtgtgtcacactaacactctcaatccagcccatggcaggcaggtgacagtccaggaattcgctcttttctttaccatctttgatgagaccaagtcctggtacttcacggaaaacatggagcgcaattgcagagccccctgtaacatacagatggaggaccctacctttaaggaaaattatcggttccacgcaatcaacggatacattatggatacactccctggccttgtgatggctcaggaccaacgaatcaggtggtacctcctcagcatgggttctaatgagaacatacactccattcacttttcaggacatgtgttcactgtccggaagaaagaagagtataagatggccctctacaatttgtatccaggcgtgtttgagaccgttgaaatgcttccctctaaagctggcatctggagagtagagtgcttgatcggagaacatcttcacgcaggtatgagcaccttgttcctcgtgtacagcaacaaatgtcagaatccacttggcatggccagtggacacattcgcgactttcagatcacagcatctggccagtatggacaatgggccccaaagttggctcgcctccattactccggtagcataaatgcgtggtccactaaagaacctttcagctggattaaggtcgatcttcttgcccccatgatcatccacggcattaagacacagggagcgaggcagaaattctcctccctctacatctcacagttcattattatgtatagtttggacggcaagaagtggcaaacttatagaggtaacagtactggaacagacatggtgttcttcggcaacgttgatagctctggcatcaaacacaacatctttaatcctcccataatagctcggtacatcagattgcatccgacccactacagcattaggagtacactccgaatggagcttatgggttgcgacttgaattcctgttcaatgccactcggaatggagtctaaagccatctctgatgcacagataaccgccagtagctactttacgaacatgtttgctacgtggtcaccctctaaggcaaggcttcatttgcaaggccggtctaatgcctggagacctcaggtgaacaacccgaaagaatggctccaggtggactttcagaagaccatgaaagtaacaggtgtcactactcagggagttaagtccttggatactagcatgtatgtgaaggagttccttatttcctcatcacaagatggccaccagtggaccctcttctttcagaatggtaaggtcaaagtgtttcagggcaatcaagacagcttcacacccgtggtgaacagtcttgatcctccactcttgacacgataccttcgaatccatccacagtcttgggagcaccagattgcattgcgcatggaagtacttggatgcgaggctcaggacctctac

SEQ ID NO: 1354 - protein, 1457 aa, synthetic construct
  REGION 1..1457: note = Variant of human B-domain deleted Factor VIII
MQIELSTCFFLCLLRFCFSATRRYYLGAVELSWDYMQSDLGELPVDARFPPRVPKSFPFNTSQVYKKTLFVEFTDHLFNIAKPRPPWMGLLGPTIQAEVYDTVVITLKNMASHPVSLHAVGVSYWKASEGAEYDDQTSQREKEDDKVFPGGSHTYVWQVLKENGPMASDPPCLTYSYLSHVDLVKDLNSGLIGALLVCREGSLAKEKTQTLHKFILLFAVFDEGKSWHSETKNSLMQDRDAASARAWPKMHTVNGYVNRTLPGLIGCHRKSVYWHVIGMGTTPEVHSIFLEGHTFLVRNHRQASLGISPITFLTAQTLLMDLGQFLLFCHIPSHQHDGMEAYVKVDSCPEEPQLRMKNNEEAEDYDDDLTDSEMDVVRFDDDNSPSIIQARSGAKKHPKTWVHYIAAEEEDWDYAPLVLAPDDRSYKSQYLNNGPQRIGRKYKKVRFMAYTDETFKTREAIQHESGILGPLLYGEVGDTLLIIFKNQASRPYNIYPHGITDVRPLYSRRLPKGVKHLKDFPILPGEIFKYKWTVTVEDGPTKSDPRCLTRYYSSFVNMERDLASGLIGPLLICYKESVDQRGNQIMSDKRNVILFSVFDENRSWYLTENIQRFLPNPAGVQLEDPEFQASNIMHSINGYVFDSLQLSVCLHEVAYWYILSIGAQTDFLSVFFSGYTFKHKMVYEDTLTLFPFTGETVFMSMENPGLWILGCHNSDFRNRGMTALLKVSSCDWNTGDYYEDSYEDISAYFDSKNNAIEPRSFSQNPPVLKRHQREGTRTTLQSDQEEIDYDDTISVEMKKEDFDIYDEDENQSPRSFQKKTRHYFIAAVERLWDYGMSSSPHVLRNRAQSGSVPQFKKVVFQEFTDGSFTQPLYRGELNEHLGLLGPYIRAEVEDNIMVTFRNQASRPYSFYSSLISYEEDQRQGAEPRKNFVKPNETKTYFWKVQHHMAPTKDEFDCKAWAYFSDVDLEKDVHSGLIGPLLVCHTNTLNPAHGRQVTVQEFALFFTIFDETKSWYFTENMERNCRAPCNIQMEDPTFKENYRFHAINGYIMDTLPGLVMAQDQRIRWYLLSMGSNENIHSIHFSGHVFTVRKKEEYKMALYNLYPGVFETVEMLPSKAGIWRVECLIGEHLHAGMSTLFLVYSNKCQNPLGMASGHIRDFQITASGQYGQWAPKLARLHYSGSINAWSTKEPFSWIKVDLLAPMIIHGIKTQGARQKFSSLYISQFIIMYSLDGKKWQTYRGNSTGTDMVFFGNVDSSGIKHNIFNPPIIARYIRLHPTHYSIRSTLRMELMGCDLNSCSMPLGMESKAISDAQITASSYFTNMFATWSPSKARLHLQGRSNAWRPQVNNPKEWLQVDFQKTMKVTGVTTQGVKSLDTSMYVKEFLISSSQDGHQWTLFFQNGKVKVFQGNQDSFTPVVNSLDPPLLTRYLRIHPQSWEHQIALRMEVLGCEAQDLY

SEQ ID NO: 1355 - DNA, 4371 bp, synthetic construct
  misc_feature 1..4371: note = Variant of human B-domain deleted Factor VIII
  source 1..4371: mol_type = other DNA
atgcagattgaactgtctacctgcttcttcctctgtttgctgaggttctgctttagcgccactagacggtactaccttggcgctgtggagctgtcctgggactatatgcagagtgatttgggagagcttcccgtcgacgcacgatttcctcctcgcgttccaaagtcatttccctttaacacaagccaggtgtacaagaagacgctcttcgtcgaattcaccgatcacctgttcaatatcgccaaacccagaccaccatggatgggtcttttggggcctaccatacaagcggaggtgtatgacacagttgttatcactctcaagaacatggcttctcatccggtaagtcttcacgcagtgggcgtgtcctactggaaagcttcagaaggagccgagtatgatgatcagacatcccagagggagaaagaagacgacaaggtatttccaggtgggtctcatacctatgtgtggcaagtgctcaaagagaatggccctatggcaagcgatccgccgtgtttgacttacagctacctttcacacgttgacctcgtcaaggacctcaactccgggttgattggagccttgttggtatgcagggaaggatctcttgccaaagagaagacacagaccctccacaagtttatccttctctttgctgtgttcgatgagggcaaaagttggcatagcgaaacgaagaattccctcatgcaggatcgcgacgcagccagcgccagagcttggcccaagatgcacactgtgaacggatatgtcaataggacgcttcctggcttgattgggtgtcatcggaaaagtgtctactggcacgtgatcggaatggggacaacaccagaggtccactccatatttctcgaaggccataccttccttgttcgaaaccacagacaggcatccttggggatctctcccattacctttctcactgcccaaacgctccttatggacttgggtcagttccttctcttttgccatatcccgtcacaccagcatgatggtatggaagcttatgtgaaagtcgacagttgtcctgaggagccacagttgcgcatgaagaataatgaagaagccgaggattacgacgacgatctcaccgattctgagatggacgtggtgaggtttgatgacgacaactctccctccatcattcaagctcggagcggggcgaagaaacaccccaagacttgggtccactatatagcggcggaagaggaggattgggattacgctcctcttgtattggcaccagatgaccgctcatacaaaagccagtacctcaacaacggaccgcagagaattggccggaagtataagaaagtgcgatttatggcctatacagacgaaacctttaagacaagggaggccatccagcatgagagtgggattttgggacctcttctttacggcgaagttggtgataccctcctcatcatcttcaagaatcaagcttctcgcccctataacatttacccacacgggatcactgacgttaggcctttgtatagcagaagacttcccaaaggcgtgaagcatctcaaagacttccccattttgccaggcgagatctttaagtacaaatggaccgtcacagtggaagatggaccgactaaatcagaccctcgatgccttacgcggtactattcctccttcgtgaatatggagagagatttggcaagcggactcataggaccactcctcatctgttacaaggaatctgtagaccagaggggtaaccagattatgagtgataaacgcaatgtgatcctttttagcgtcttcgacgagaaccggtcctggtacttgaccgagaatatacaaaggttccttcccaaccccgcaggcgttcagttggaagaccctgagtttcaggccagcaatattatgcactcaatcaacggctatgtgtttgatagtctccagctttctgtttgcctccatgaagtagcctattggtacatcttgtcaattggtgctcaaacagacttcctctccgtcttcttctccggctacacctttaagcacaagatggtgtatgaggacactctcacactctttccattttctggagaaaccgtgttcatgagcatggagaatccaggcctttggatcttgggttgccacaacagtgattttcgcaatcggggaatgactgctctcctcaaagtcagcagctgtgattggaacacaggcgactattacgaagattcttacgaggacataagtgcctactttgactccaagaataacgccattgagcccagatcattctcccagaatcctcccgtgcttaaaaggcatcagcgcgaaggtaccagaactactcttcagtctgatcaagaggagattgactatgacgacaccattagcgtggaaatgaagaaggaggatttcgatatctatgacgaagatgagaaccagtctccgcggagctttcaggagaagacgcgacactacttcattgcagcagtcgaaaggctttgggactacggtatgtcatcatcccctcatgtgttgcgcaatagagctcagagtggaagtgttccacagttcaagaaagtcgtctttcaagagtttacagatggcagcttcacacagcctctctatcggggcgagcttaacgaacatttgggactccttggtccctatatccgagccgaagtggaggacaacattatggttacctttaggaatcaagcctctcgcccctacagcttctactcctccctcatcagttatgaggaggatcagagacaaggcgctgaaccacggaagaactttgtgaaaccgaatgagacgaagacctacttctggaaagtacagcaccacatggcccccacaaaagacgaattcgattgcaaagcatgggcgtatttttcagacgttgacttggagaaagatgtacattcaggacttattggtcctttgttggtgtgtcacactaacactctcaatccagcccatggcaggcaggtgacagtccaggaattcgctcttttctttaccatctttgatgagaccaagtcctggtacttcacggaaaacatggagcgcaattgcagagccccctgtaacatacagatggaggaccctacctttaaggaaaattatcggttccacgcaatcaacggatacattatggatacactccctggccttgtgatggctcaggaccaacgaatcaggtggtacctcctcagcatgggttctaatgagaacatacactccattcacttttcaggacatgtgttcactgtccggaagaaagaagagtataagatggccctctacaatttgtatccaggcgtgtttgagaccgttgaaatgcttccctctaaagctggcatctggagagtagagtgcttgatcggagaacatcttcacgcaggtatgagcaccttgttcctcgtgtacagcaacaaatgtcagaatccacttggcatggccagtggacacattcgcgactttcagatcacagcatctggccagtatggacaatgggccccaaagttggctcgcctccattactccggtagcataaatgcgtggtccactaaagaacctttcagctggattaaggtcgatcttcttgcccccatgatcatccacggcattaagacacagggagcgaggcagaaattctcctccctctacatctcacagttcattattatgtatagtttggacggcaagaagtggcaaacttatagaggtaacagtactggaacagacatggtgttcttcggcaacgttgatagctctggcatcaaacacaacatctttaatcctcccataatagctcggtacatcagattgcatccgacccactacagcattaggagtacactccgaatggagcttatgggttgcgacttgaattcctgttcaatgccactcggaatggagtctaaagccatctctgatgcacagataaccgccagtagctactttacgaacatgtttgctacgtggtcaccctctaaggcaaggcttcatttgcaaggccggtctaatgcctggagacctcaggtgaacaacccgaaagaatggctccaggtggactttcagaagaccatgaaagtaacaggtgtcactactcagggagttaagtccttggatactagcatgtatgtgaaggagttccttatttcctcatcacaagatggccaccagtggaccctcttctttcagaatggtaaggtcaaagtgtttcagggcaatcaagacagcttcacacccgtggtgaacagtcttgatcctccactcttgacacgataccttcgaatccatccacagtcttgggagcaccagattgcattgcgcatggaagtacttggatgcgaggctcaggacctctac

SEQ ID NO: 1356 - protein, 1457 aa, synthetic construct
  REGION 1..1457: note = Variant of human B-domain deleted Factor VIII
MQIELSTCFFLCLLRFCFSATRRYYLGAVELSWDYMQSDLGELPVDARFPPRVPKSFPFNTSQVYKKTLFVEFTDHLFNIAKPRPPWMGLLGPTIQAEVYDTVVITLKNMASHPVSLHAVGVSYWKASEGAEYDDQTSQREKEDDKVFPGGSHTYVWQVLKENGPMASDPPCLTYSYLSHVDLVKDLNSGLIGALLVCREGSLAKEKTQTLHKFILLFAVFDEGKSWHSETKNSLMQDRDAASARAWPKMHTVNGYVNRTLPGLIGCHRKSVYWHVIGMGTTPEVHSIFLEGHTFLVRNHRQASLGISPITFLTAQTLLMDLGQFLLFCHIPSHQHDGMEAYVKVDSCPEEPQLRMKNNEEAEDYDDDLTDSEMDVVRFDDDNSPSIIQARSGAKKHPKTWVHYIAAEEEDWDYAPLVLAPDDRSYKSQYLNNGPQRIGRKYKKVRFMAYTDETFKTREAIQHESGILGPLLYGEVGDTLLIIFKNQASRPYNIYPHGITDVRPLYSRRLPKGVKHLKDFPILPGEIFKYKWTVTVEDGPTKSDPRCLTRYYSSFVNMERDLASGLIGPLLICYKESVDQRGNQIMSDKRNVILFSVFDENRSWYLTENIQRFLPNPAGVQLEDPEFQASNIMHSINGYVFDSLQLSVCLHEVAYWYILSIGAQTDFLSVFFSGYTFKHKMVYEDTLTLFPFSGETVFMSMENPGLWILGCHNSDFRNRGMTALLKVSSCDWNTGDYYEDSYEDISAYFDSKNNAIEPRSFSQNPPVLKRHQREGTRTTLQSDQEEIDYDDTISVEMKKEDFDIYDEDENQSPRSFQEKTRHYFIAAVERLWDYGMSSSPHVLRNRAQSGSVPQFKKVVFQEFTDGSFTQPLYRGELNEHLGLLGPYIRAEVEDNIMVTFRNQASRPYSFYSSLISYEEDQRQGAEPRKNFVKPNETKTYFWKVQHHMAPTKDEFDCKAWAYFSDVDLEKDVHSGLIGPLLVCHTNTLNPAHGRQVTVQEFALFFTIFDETKSWYFTENMERNCRAPCNIQMEDPTFKENYRFHAINGYIMDTLPGLVMAQDQRIRWYLLSMGSNENIHSIHFSGHVFTVRKKEEYKMALYNLYPGVFETVEMLPSKAGIWRVECLIGEHLHAGMSTLFLVYSNKCQNPLGMASGHIRDFQITASGQYGQWAPKLARLHYSGSINAWSTKEPFSWIKVDLLAPMIIHGIKTQGARQKFSSLYISQFIIMYSLDGKKWQTYRGNSTGTDMVFFGNVDSSGIKHNIFNPPIIARYIRLHPTHYSIRSTLRMELMGCDLNSCSMPLGMESKAISDAQITASSYFTNMFATWSPSKARLHLQGRSNAWRPQVNNPKEWLQVDFQKTMKVTGVTTQGVKSLDTSMYVKEFLISSSQDGHQWTLFFQNGKVKVFQGNQDSFTPVVNSLDPPLLTRYLRIHPQSWEHQIALRMEVLGCEAQDLY

SEQ ID NO: 1357 - DNA, 4371 bp, synthetic construct
  misc_feature 1..4371: note = Variant of human B-domain deleted Factor VIII
  source 1..4371: mol_type = other DNA
atgcagattgaactgtctacctgcttcttcctctgtttgctgaggttctgctttagcgccactagacggtactaccttggcgctgtggagctgtcctgggactatatgcagagtgatttgggagagcttcccgtcgacgcacgatttcctcctcgcgttccaaagtcatttccctttaacacaagccaggtgtacaagaagacgctcttcgtcgaattcaccgatcacctgttcaatatcgccaaacccagaccaccatggatgggtcttttggggcctaccatacaagcggaggtgtatgacacagttgttatcactctcaagaacatggcttctcatccggtaagtcttcacgcagtgggcgtgtcctactggaaagcttcagaaggagccgagtatgatgatcagacatcccagagggagaaagaagacgacaaggtatttccaggtgggtctcatacctatgtgtggcaagtgctcaaagagaatggccctatggcaagcgatccgccgtgtttgacttacagctacctttcacacgttgacctcgtcaaggacctcaactccgggttgattggagccttgttggtatgcagggaaggatctcttgccaaagagaagacacagaccctccacaagtttatccttctctttgctgtgttcgatgagggcaaaagttggcatagcgaaacgaagaattccctcatgcaggatcgcgacgcagccagcgccagagcttggcccaagatgcacactgtgaacggatatgtcaataggacgcttcctggcttgattgggtgtcatcggaaaagtgtctactggcacgtgatcggaatggggacaacaccagaggtccactccatatttctcgaaggccataccttccttgttcgaaaccacagacaggcatccttggggatctctcccattacctttctcactgcccaaacgctccttatggacttgggtcagttccttctcttttgccatatcccgtcacaccagcatgatggtatggaagcttatgtgaaagtcgacagttgtcctgaggagccacagttgcgcatgaagaataatgaagaagccgaggattacgacgacgatctcaccgattctgagatggacgtggtgaggtttgatgacgacaactctccctccatcattcaagctcggagcggggcgaagaaacaccccaagacttgggtccactatatagcggcggaagaggaggattgggattacgctcctcttgtattggcaccagatgaccgctcatacaaaagccagtacctcaacaacggaccgcagagaattggccggaagtataagaaagtgcgatttatggcctatacagacgaaacctttaagacaagggaggccatccagcatgagagtgggattttgggacctcttctttacggcgaagttggtgataccctcctcatcatcttcaagaatcaagcttctcgcccctataacatttacccacacgggatcactgacgttaggcctttgtatagcagaagacttcccaaaggcgtgaagcatctcaaagacttccccattttgccaggcgagatctttaagtacaaatggaccgtcacagtggaagatggaccgactaaatcagaccctcgatgccttacgcggtactattcctccttcgtgaatatggagagagatttggcaagcggactcataggaccactcctcatctgttacaaggaatctgtagaccagaggggtaaccagattatgagtgataaacgcaatgtgatcctttttagcgtcttcgacgagaaccggtcctggtacttgaccgagaatatacaaaggttccttcccaaccccgcaggcgttcagttggaagaccctgagtttcaggccagcaatattatgcactcaatcaacggctatgtgtttgatagtctccagctttctgtttgcctccatgaagtagcctattggtacatcttgtcaattggtgctcaaacagacttcctctccgtcttcttctccggctacacctttaagcacaagatggtgtatgaggacactctcacactctttccattttctggagaaaccgtgttcatgagcatggagaatccaggcctttggatcttgggttgccacaacagtgattttcgcaatcggggaatgactgctctcctcaaagtcagcagctgtgattggaacacaggcgactattacgaagattcttacgaggacataagtgcctactttgactccaagaataacgccattgagcccagatcattctcccagaatcctcccgtgcttaaaaggcatcagcgcgaaggtaccagaactactcttcagtctgatcaagaggagattgactatgacgacaccattagcgtggaaatgaagaaggaggatttcgatatctatgacgaagatgagaaccagtctccgcggagctttcagaagaagacgcgacactacttcattgcagcagtcgaaaggctttgggactacggtatgtcatcatcccctcatgtgttgcgcaatagagctcagagtggaagtgttccacagttcaagaaagtcgtctttcaagagtttacagatggcagcttcacacagcctctctatcggggcgagcttaacgaacatttgggactccttggtccctatatccgagccgaagtggaggacaacattatggttacctttaggaatcaagcctctcgcccctacagcttctactcctccctcatcagttatgaggaggatcagagacaaggcgctgaaccacgggctaactttgtgaaaccgaatgagacgaagacctacttctggaaagtacagcaccacatggcccccacaaaagacgaattcgattgcaaagcatgggcgtatttttcagacgttgacttggagaaagatgtacattcaggacttattggtcctttgttggtgtgtcacactaacactctcaatccagcccatggcaggcaggtgacagtccaggaattcgctcttttctttaccatctttgatgagaccaagtcctggtacttcacggaaaacatggagcgcaattgcagagccccctgtaacatacagatggaggaccctacctttaaggaaaattatcggttccacgcaatcaacggatacattatggatacactccctggccttgtgatggctcaggaccaacgaatcaggtggtacctcctcagcatgggttctaatgagaacatacactccattcacttttcaggacatgtgttcactgtccggaagaaagaagagtataagatggccctctacaatttgtatccaggcgtgtttgagaccgttgaaatgcttccctctaaagctggcatctggagagtagagtgcttgatcggagaacatcttcacgcaggtatgagcaccttgttcctcgtgtacagcaacaaatgtcagaatccacttggcatggccagtggacacattcgcgactttcagatcacagcatctggccagtatggacaatgggccccaaagttggctcgcctccattactccggtagcataaatgcgtggtccactaaagaacctttcagctggattaaggtcgatcttcttgcccccatgatcatccacggcattaagacacagggagcgaggcagaaattctcctccctctacatctcacagttcattattatgtatagtttggacggcaagaagtggcaaacttatagaggtaacagtactggaacagacatggtgttcttcggcaacgttgatagctctggcatcaaacacaacatctttaatcctcccataatagctcggtacatcagattgcatccgacccactacagcattaggagtacactccgaatggagcttatgggttgcgacttgaattcctgttcaatgccactcggaatggagtctaaagccatctctgatgcacagataaccgccagtagctactttacgaacatgtttgctacgtggtcaccctctaaggcaaggcttcatttgcaaggccggtctaatgcctggagacctcaggtgaacaacccgaaagaatggctccaggtggactttcagaagaccatgaaagtaacaggtgtcactactcagggagttaagtccttggatactagcatgtatgtgaaggagttccttatttcctcatcacaagatggccaccagtggaccctcttctttcagaatggtaaggtcaaagtgtttcagggcaatcaagacagcttcacacccgtggtgaacagtcttgatcctccactcttgacacgataccttcgaatccatccacagtcttgggagcaccagattgcattgcgcatggaagtacttggatgcgaggctcaggacctctac

SEQ ID NO: 1358 - protein, 1457 aa, synthetic construct
  REGION 1..1457: note = Variant of human B-domain deleted Factor VIII
MQIELSTCFFLCLLRFCFSATRRYYLGAVELSWDYMQSDLGELPVDARFPPRVPKSFPFNTSQVYKKTLFVEFTDHLFNIAKPRPPWMGLLGPTIQAEVYDTVVITLKNMASHPVSLHAVGVSYWKASEGAEYDDQTSQREKEDDKVFPGGSHTYVWQVLKENGPMASDPPCLTYSYLSHVDLVKDLNSGLIGALLVCREGSLAKEKTQTLHKFILLFAVFDEGKSWHSETKNSLMQDRDAASARAWPKMHTVNGYVNRTLPGLIGCHRKSVYWHVIGMGTTPEVHSIFLEGHTFLVRNHRQASLGISPITFLTAQTLLMDLGQFLLFCHIPSHQHDGMEAYVKVDSCPEEPQLRMKNNEEAEDYDDDLTDSEMDVVRFDDDNSPSIIQARSGAKKHPKTWVHYIAAEEEDWDYAPLVLAPDDRSYKSQYLNNGPQRIGRKYKKVRFMAYTDETFKTREAIQHESGILGPLLYGEVGDTLLIIFKNQASRPYNIYPHGITDVRPLYSRRLPKGVKHLKDFPILPGEIFKYKWTVTVEDGPTKSDPRCLTRYYSSFVNMERDLASGLIGPLLICYKESVDQRGNQIMSDKRNVILFSVFDENRSWYLTENIQRFLPNPAGVQLEDPEFQASNIMHSINGYVFDSLQLSVCLHEVAYWYILSIGAQTDFLSVFFSGYTFKHKMVYEDTLTLFPFSGETVFMSMENPGLWILGCHNSDFRNRGMTALLKVSSCDWNTGDYYEDSYEDISAYFDSKNNAIEPRSFSQNPPVLKRHQREGTRTTLQSDQEEIDYDDTISVEMKKEDFDIYDEDENQSPRSFQKKTRHYFIAAVERLWDYGMSSSPHVLRNRAQSGSVPQFKKVVFQEFTDGSFTQPLYRGELNEHLGLLGPYIRAEVEDNIMVTFRNQASRPYSFYSSLISYEEDQRQGAEPRANFVKPNETKTYFWKVQHHMAPTKDEFDCKAWAYFSDVDLEKDVHSGLIGPLLVCHTNTLNPAHGRQVTVQEFALFFTIFDETKSWYFTENMERNCRAPCNIQMEDPTFKENYRFHAINGYIMDTLPGLVMAQDQRIRWYLLSMGSNENIHSIHFSGHVFTVRKKEEYKMALYNLYPGVFETVEMLPSKAGIWRVECLIGEHLHAGMSTLFLVYSNKCQNPLGMASGHIRDFQITASGQYGQWAPKLARLHYSGSINAWSTKEPFSWIKVDLLAPMIIHGIKTQGARQKFSSLYISQFIIMYSLDGKKWQTYRGNSTGTDMVFFGNVDSSGIKHNIFNPPIIARYIRLHPTHYSIRSTLRMELMGCDLNSCSMPLGMESKAISDAQITASSYFTNMFATWSPSKARLHLQGRSNAWRPQVNNPKEWLQVDFQKTMKVTGVTTQGVKSLDTSMYVKEFLISSSQDGHQWTLFFQNGKVKVFQGNQDSFTPVVNSLDPPLLTRYLRIHPQSWEHQIALRMEVLGCEAQDLY

SEQ ID NO: 1359 - DNA, 4371 bp, synthetic construct
  misc_feature 1..4371: note = Variant of human B-domain deleted Factor VIII
  source 1..4371: mol_type = other DNA
atgcagattgaactgtctacctgcttcttcctctgtttgctgaggttctgctttagcgccactagacggtactaccttggcgctgtggagctgtcctgggactatatgcagagtgatttgggagagcttcccgtcgacgcacgatttcctcctcgcgttccaaagtcatttccctttaacacaagccaggtgtacaagaagacgctcttcgtcgaattcaccgatcacctgttcaatatcgccaaacccagaccaccatggatgggtcttttggggcctaccatacaagcggaggtgtatgacacagttgttatcactctcaagaacatggcttctcatccggtaagtcttcacgcagtgggcgtgtcctactggaaagcttcagaaggagccgagtatgatgatcagacatcccagagggagaaagaagacgacaaggtatttccaggtgggtctcatacctatgtgtggcaagtgctcaaagagaatggccctatggcaagcgatccgccgtgtttgacttacagctacctttcacacgttgacctcgtcaaggacctcaactccgggttgattggagccttgttggtatgcagggaaggatctcttgccaaagagaagacacagaccctccacaagtttatccttctctttgctgtgttcgatgagggcaaaagttggcatagcgaaacgaagaattccctcatgcaggatcgcgacgcagccagcgccagagcttggcccaagatgcacactgtgaacggatatgtcaataggacgcttcctggcttgattgggtgtcatcggaaaagtgtctactggcacgtgatcggaatggggacaacaccagaggtccactccatatttctcgaaggccataccttccttgttcgaaaccacagacaggcatccttggggatctctcccattgagtttctcactgcccaaacgctccttatggacttgggtcagttccttctcttttgccatatcccgtcacaccagcatgatggtatggaagcttatgtgaaagtcgacagttgtcctgaggagccacagttgcgcatgaagaataatgaagaagccgaggattacgacgacgatctcaccgattctgagatggacgtggtgaggtttgatgacgacaactctccctccatcattcaagctcggagcggggcgaagaaacaccccaagacttgggtccactatatagcggcggaagaggaggattgggattacgctcctcttgtattggcaccagatgaccgctcatacaaaagccagtacctcaacaacggaccgcagagaattggccggaagtataagaaagtgcgatttatggcctatacagacgaaacctttaagacaagggaggccatccagcatgagagtgggattttgggacctcttctttacggcgaagttggtgataccctcctcatcatcttcaagaatcaagcttctcgcccctataacatttacccacacgggatcactgacgttaggcctttgtatagcagaagacttcccaaaggcgtgaagcatctcaaagacttccccattttgccaggcgagatctttaagtacaaatggaccgtcacagtggaagatggaccgactaaatcagaccctcgatgccttacgcggtactattcctccttcgtgaatatggagagagatttggcaagcggactcataggaccactcctcatctgttacaaggaatctgtagaccagaggggtaaccagattatgagtgataaacgcaatgtgatcctttttagcgtcttcgacgagaaccggtcctggtacttgaccgagaatatacaaaggttccttcccaaccccgcaggcgttcagttggaagaccctgagtttcaggccagcaatattatgcactcaatcaacggctatgtgtttgatagtctccagctttctgtttgcctccatgaagtagcctattggtacatcttgtcaattggtgctcaaacagacttcctctccgtcttcttctccggctacacctttaagcacaagatggtgtatgaggacactctcacactctttccattttctggagaaaccgtgttcatgagcatggagaatccaggcctttggatcttgggttgccacaacagtgattttcgcaatcggggaatgactgctctcctcaaagtcagcagctgtgattggaacacaggcgactattacgaagattcttacgaggacataagtgcctactttgactccaagaataacgccattgagcccagatcattctcccagaatcctcccgtgcttaaaaggcatcagcgcgaaggtaccagaactactcttcagtctgatcaagaggagattgactatgacgacaccattagcgtggaaatgaagaaggaggatttcgatatctatgacgaagatgagaaccagtctccgcggagctttcagaagaagacgcgacactacttcattgcagcagtcgaaaggctttgggactacggtatgtcatcatcccctcatgtgttgcgcaatagagctcagagtggaagtgttccacagttcaagaaagtcgtctttcaagagtttacagatggcagcttcacacagcctctctatcggggcgagcttaacgaacatttgggactccttggtccctatatccgagccgaagtggaggacaacattatggttacctttaggaatcaagcctctcgcccctacagcttctactcctccctcatcagttatgaggaggatcagagacaaggcgctgaaccacggaagaactttgtgaaaccgaatgagacgaagacctacttctggaaagtacagcaccacatggcccccacaaaagacgaattcgattgcaaagcatgggcgtatttttcagacgttgacttggagaaagatgtacattcaggacttattggtcctttgttggtgtgtcacactaacactctcaatccagcccatggcaggcaggtgacagtccaggaattcgctcttttctttaccatctttgatgagaccaagtcctggtacttcacggaaaacatggagcgcaattgcagagccccctgtaacatacagatggaggaccctacctttaaggaaaattatcggttccacgcaatcaacggatacattatggatacactccctggccttgtgatggctcaggaccaacgaatcaggtggtacctcctcagcatgggttctaatgagaacatacactccattcacttttcaggacatgtgttcactgtccggaagaaagaagagtataagatggccctctacaatttgtatccaggcgtgtttgagaccgttgaaatgcttccctctaaagctggcatctggagagtagagtgcttgatcggagaacatcttcacgcaggtatgagcaccttgttcctcgtgtacagcaacaaatgtcagaatccacttggcatggccagtggacacattcgcgactttcagatcacagcatctggccagtatggacaatgggccccaaagttggctcgcctccattactccggtagcataaatgcgtggtccactaaagaacctttcagctggattaaggtcgatcttcttgcccccatgatcatccacggcattaagacacagggagcgaggcagaaattctcctccctctacatctcacagttcattattatgtatagtttggacggcaagaagtggcaaacttatagaggtaacagtactggaacagacatggtgttcttcggcaacgttgatagctctggcatcaaacacaacatctttaatcctcccataatagctcggtacatcagattgcatccgacccactacagcattaggagtacactccgaatggagcttatgggttgcgacttgaattcctgttcaatgccactcggaatggagtctaaagccatctctgatgcacagataaccgccagtagctactttacgaacatgtttgctacgtggtcaccctctaaggcaaggcttcatttgcaaggccggtctaatgcctggagacctcaggtgaacaacccgaaagaatggctccaggtggactttcagaagaccatgaaagtaacaggtgtcactactcagggagttaagtccttggatactagcatgtatgtgaaggagttccttatttcctcatcacaagatggccaccagtggaccctcttctttcagaatggtaaggtcaaagtgtttcagggcaatcaagacagcttcacacccgtggtgaacagtcttgatcctccactcttgacacgataccttcgaatccatccacagtcttgggagcaccagattgcattgcgcatggaagtacttggatgcgaggctcaggacctctac

SEQ ID NO: 1360 - protein, 1457 aa, synthetic construct
  REGION 1..1457: note = Variant of human B-domain deleted Factor VIII
MQIELSTCFFLCLLRFCFSATRRYYLGAVELSWDYMQSDLGELPVDARFPPRVPKSFPFNTSQVYKKTLFVEFTDHLFNIAKPRPPWMGLLGPTIQAEVYDTVVITLKNMASHPVSLHAVGVSYWKASEGAEYDDQTSQREKEDDKVFPGGSHTYVWQVLKENGPMASDPPCLTYSYLSHVDLVKDLNSGLIGALLVCREGSLAKEKTQTLHKFILLFAVFDEGKSWHSETKNSLMQDRDAASARAWPKMHTVNGYVNRTLPGLIGCHRKSVYWHVIGMGTTPEVHSIFLEGHTFLVRNHRQASLGISPIEFLTAQTLLMDLGQFLLFCHIPSHQHDGMEAYVKVDSCPEEPQLRMKNNEEAEDYDDDLTDSEMDVVRFDDDNSPSIIQARSGAKKHPKTWVHYIAAEEEDWDYAPLVLAPDDRSYKSQYLNNGPQRIGRKYKKVRFMAYTDETFKTREAIQHESGILGPLLYGEVGDTLLIIFKNQASRPYNIYPHGITDVRPLYSRRLPKGVKHLKDFPILPGEIFKYKWTVTVEDGPTKSDPRCLTRYYSSFVNMERDLASGLIGPLLICYKESVDQRGNQIMSDKRNVILFSVFDENRSWYLTENIQRFLPNPAGVQLEDPEFQASNIMHSINGYVFDSLQLSVCLHEVAYWYILSIGAQTDFLSVFFSGYTFKHKMVYEDTLTLFPFSGETVFMSMENPGLWILGCHNSDFRNRGMTALLKVSSCDWNTGDYYEDSYEDISAYFDSKNNAIEPRSFSQNPPVLKRHQREGTRTTLQSDQEEIDYDDTISVEMKKEDFDIYDEDENQSPRSFQKKTRHYFIAAVERLWDYGMSSSPHVLRNRAQSGSVPQFKKVVFQEFTDGSFTQPLYRGELNEHLGLLGPYIRAEVEDNIMVTFRNQASRPYSFYSSLISYEEDQRQGAEPRKNFVKPNETKTYFWKVQHHMAPTKDEFDCKAWAYFSDVDLEKDVHSGLIGPLLVCHTNTLNPAHGRQVTVQEFALFFTIFDETKSWYFTENMERNCRAPCNIQMEDPTFKENYRFHAINGYIMDTLPGLVMAQDQRIRWYLLSMGSNENIHSIHFSGHVFTVRKKEEYKMALYNLYPGVFETVEMLPSKAGIWRVECLIGEHLHAGMSTLFLVYSNKCQNPLGMASGHIRDFQITASGQYGQWAPKLARLHYSGSINAWSTKEPFSWIKVDLLAPMIIHGIKTQGARQKFSSLYISQFIIMYSLDGKKWQTYRGNSTGTDMVFFGNVDSSGIKHNIFNPPIIARYIRLHPTHYSIRSTLRMELMGCDLNSCSMPLGMESKAISDAQITASSYFTNMFATWSPSKARLHLQGRSNAWRPQVNNPKEWLQVDFQKTMKVTGVTTQGVKSLDTSMYVKEFLISSSQDGHQWTLFFQNGKVKVFQGNQDSFTPVVNSLDPPLLTRYLRIHPQSWEHQIALRMEVLGCEAQDLY

SEQ ID NO: 1361 - DNA, 4371 bp, synthetic construct
  misc_feature 1..4371: note = Variant of human B-domain deleted Factor VIII
  source 1..4371: mol_type = other DNA
atgcagattgaactgtctacctgcttcttcctctgtttgctgaggttctgctttagcgccactagacggtactaccttggcgctgtggagctgtcctgggactatatgcagagtgatttgggagagcttcccgtcgacgcacgatttcctcctcgcgttccaaagtcatttccctttaacacaagccaggtgtacaagaagacgctcttcgtcgaattcaccgatcacctgttcaatatcgccaaacccagaccaccatggatgggtcttttggggcctaccatacaagcggaggtgtatgacacagttgttatcactctcaagaacatggcttctcatccggtaagtcttcacgcagtgggcgtgtcctactggaaagcttcagaaggagccgagtatgatgatcagacatcccagagggagaaagaagacgacaaggtatttccaggtgggtctcatacctatgtgtggcaagtgctcaaagagaatggccctatggcaagcgatccgccgtgtttgacttacagctacctttcacacgttgacctcgtcaaggacctcaactccgggttgattggagccttgttggtatgcagggaaggatctcttgccaaagagaagacacagaccctccacaagtttatccttctctttgctgtgttcgatgagggcaaaagttggcatagcgaaacgaagaattccctcatgcaggatcgcgacgcagccagcgccagagcttggcccaagatgcacactgtgaacggatatgtcaataggacgcttcctggcttgattgggtgtcatcggaaaagtgtctactggcacgtgatcggaatggggacaacaccagaggtccactccatatttctcgaaggccataccttccttgttcgaaaccacagacaggcatccttggggatctctcccattacctttctcactgcccaaacgctccttatggacttgggtcagttccttctcttttgccatatcccgtcacaccagcatgatggtatggaagcttatgtgaaagtcgacagttgtcctgaggagccacagttgcgcatgaagaataatgaagaagccgaggattacgacgacgatctcaccgattctgagatggacgtggtgaggtttgatgacgacaactctccctccatcattcaagctcggagcggggcgaagaaacaccccaagacttgggtccactatatagcggcggaagaggaggattgggattacgctcctcttgtattggcaccagatgaccgctcatacaaaagccagtacctcaacaacggaccgcagagaattggccggaagtataagaaagtgcgatttatggcctatacagacgaaacctttaagacaagggaggccatccagcatgagagtgggattttgggacctcttctttacggcgaagttggtgataccctcctcatcatcttcaagaatcaagcttctcgcccctataacatttacccacacgggatcactgacgttaggcctttgtatagcagaagacttcccaaaggcgtgaagcatctcaaagacttccccattttgccaggcgagatctttaagtacaaatggaccgtcacagtggaagatggaccgactaaatcagaccctcgatgccttacgcggtactattcctccttcgtgaatatggagagagatttggcaagcggactcataggaccactcctcatctgttacaaggaatctgtagaccagaggggtaaccagattatgagtgataaacgcaatgtgatcctttttagcgtcttcgacgagaaccggtcctggtacttgaccgagaatatacaaaggttccttcccaaccccgcaggcgttcagttggaagaccctgagtttcaggccagcaatattatgcactcaatcaacggctatgtgtttgatagtctccagctttctgtttgcctccatgaagtagcctattggtacatcttgtcaattggtgctcaaacagacttcctctccgtcttcttctccggctacacctttaagcacaagatggtgtatgaggacactctcacactctttccattttctggagaaaccgtgttcatgagcatggagaatccaggcctttggatcttgggttgccacaacagtgattttcgcaatcggggaatgactgctctcctcaaagtcagcagctgtgattggaacacaggcgacctttacgaagattcttacgaggacataagtgcctactttgactccaagaataacgccattgagcccagatcattctcccagaatcctcccgtgcttaaaaggcatcagcgcgaaggtaccagaactactcttcagtctgatcaagaggagattgactatgacgacaccattagcgtggaaatgaagaaggaggatttcgatatctatgacgaagatgagaaccagtctccgcggagctttcagaagaagacgcgacactacttcattgcagcagtcgaaaggctttgggactacggtatgtcatcatcccctcatgtgttgcgcaatagagctcagagtggaagtgttccacagttcaagaaagtcgtctttcaagagtttacagatggcagcttcacacagcctctctatcggggcgagcttaacgaacatttgggactccttggtccctatatccgagccgaagtggaggacaacattatggttacctttaggaatcaagcctctcgcccctacagcttctactcctccctcatcagttatgaggaggatcagagacaaggcgctgaaccacggaagaactttgtgaaaccgaatgagacgaagacctacttctggaaagtacagcaccacatggcccccacaaaagacgaattcgattgcaaagcatgggcgtatttttcagacgttgacttggagaaagatgtacattcaggacttattggtcctttgttggtgtgtcacactaacactctcaatccagcccatggcaggcaggtgacagtccaggaattcgctcttttctttaccatctttgatgagaccaagtcctggtacttcacggaaaacatggagcgcaattgcagagccccctgtaacatacagatggaggaccctacctttaaggaaaattatcggttccacgcaatcaacggatacattatggatacactccctggccttgtgatggctcaggaccaacgaatcaggtggtacctcctcagcatgggttctaatgagaacatacactccattcacttttcaggacatgtgttcactgtccggaagaaagaagagtataagatggccctctacaatttgtatccaggcgtgtttgagaccgttgaaatgcttccctctaaagctggcatctggagagtagagtgcttgatcggagaacatcttcacgcaggtatgagcaccttgttcctcgtgtacagcaacaaatgtcagaatccacttggcatggccagtggacacattcgcgactttcagatcacagcatctggccagtatggacaatgggccccaaagttggctcgcctccattactccggtagcataaatgcgtggtccactaaagaacctttcagctggattaaggtcgatcttcttgcccccatgatcatccacggcattaagacacagggagcgaggcagaaattctcctccctctacatctcacagttcattattatgtatagtttggacggcaagaagtggcaaacttatagaggtaacagtactggaacagacatggtgttcttcggcaacgttgatagctctggcatcaaacacaacatctttaatcctcccataatagctcggtacatcagattgcatccgacccactacagcattaggagtacactccgaatggagcttatgggttgcgacttgaattcctgttcaatgccactcggaatggagtctaaagccatctctgatgcacagataaccgccagtagctactttacgaacatgtttgctacgtggtcaccctctaaggcaaggcttcatttgcaaggccggtctaatgcctggagacctcaggtgaacaacccgaaagaatggctccaggtggactttcagaagaccatgaaagtaacaggtgtcactactcagggagttaagtccttggatactagcatgtatgtgaaggagttccttatttcctcatcacaagatggccaccagtggaccctcttctttcagaatggtaaggtcaaagtgtttcagggcaatcaagacagcttcacacccgtggtgaacagtcttgatcctccactcttgacacgataccttcgaatccatccacagtcttgggagcaccagattgcattgcgcatggaagtacttggatgcgaggctcaggacctctac

SEQ ID NO: 1362 - protein, 1457 aa, synthetic construct
  REGION 1..1457: note = Variant of human B-domain deleted Factor VIII
MQIELSTCFFLCLLRFCFSATRRYYLGAVELSWDYMQSDLGELPVDARFPPRVPKSFPFNTSQVYKKTLFVEFTDHLFNIAKPRPPWMGLLGPTIQAEVYDTVVITLKNMASHPVSLHAVGVSYWKASEGAEYDDQTSQREKEDDKVFPGGSHTYVWQVLKENGPMASDPPCLTYSYLSHVDLVKDLNSGLIGALLVCREGSLAKEKTQTLHKFILLFAVFDEGKSWHSETKNSLMQDRDAASARAWPKMHTVNGYVNRTLPGLIGCHRKSVYWHVIGMGTTPEVHSIFLEGHTFLVRNHRQASLGISPITFLTAQTLLMDLGQFLLFCHIPSHQHDGMEAYVKVDSCPEEPQLRMKNNEEAEDYDDDLTDSEMDVVRFDDDNSPSIIQARSGAKKHPKTWVHYIAAEEEDWDYAPLVLAPDDRSYKSQYLNNGPQRIGRKYKKVRFMAYTDETFKTREAIQHESGILGPLLYGEVGDTLLIIFKNQASRPYNIYPHGITDVRPLYSRRLPKGVKHLKDFPILPGEIFKYKWTVTVEDGPTKSDPRCLTRYYSSFVNMERDLASGLIGPLLICYKESVDQRGNQIMSDKRNVILFSVFDENRSWYLTENIQRFLPNPAGVQLEDPEFQASNIMHSINGYVFDSLQLSVCLHEVAYWYILSIGAQTDFLSVFFSGYTFKHKMVYEDTLTLFPFSGETVFMSMENPGLWILGCHNSDFRNRGMTALLKVSSCDWNTGDLYEDSYEDISAYFDSKNNAIEPRSFSQNPPVLKRHQREGTRTTLQSDQEEIDYDDTISVEMKKEDFDIYDEDENQSPRSFQKKTRHYFIAAVERLWDYGMSSSPHVLRNRAQSGSVPQFKKVVFQEFTDGSFTQPLYRGELNEHLGLLGPYIRAEVEDNIMVTFRNQASRPYSFYSSLISYEEDQRQGAEPRKNFVKPNETKTYFWKVQHHMAPTKDEFDCKAWAYFSDVDLEKDVHSGLIGPLLVCHTNTLNPAHGRQVTVQEFALFFTIFDETKSWYFTENMERNCRAPCNIQMEDPTFKENYRFHAINGYIMDTLPGLVMAQDQRIRWYLLSMGSNENIHSIHFSGHVFTVRKKEEYKMALYNLYPGVFETVEMLPSKAGIWRVECLIGEHLHAGMSTLFLVYSNKCQNPLGMASGHIRDFQITASGQYGQWAPKLARLHYSGSINAWSTKEPFSWIKVDLLAPMIIHGIKTQGARQKFSSLYISQFIIMYSLDGKKWQTYRGNSTGTDMVFFGNVDSSGIKHNIFNPPIIARYIRLHPTHYSIRSTLRMELMGCDLNSCSMPLGMESKAISDAQITASSYFTNMFATWSPSKARLHLQGRSNAWRPQVNNPKEWLQVDFQKTMKVTGVTTQGVKSLDTSMYVKEFLISSSQDGHQWTLFFQNGKVKVFQGNQDSFTPVVNSLDPPLLTRYLRIHPQSWEHQIALRMEVLGCEAQDLY

SEQ ID NO: 1363 - DNA, 4371 bp, synthetic construct
  misc_feature 1..4371: note = Variant of human B-domain deleted Factor VIII
  source 1..4371: mol_type = other DNA
atgcagattgaactgtctacctgcttcttcctctgtttgctgaggttctgctttagcgccactagacggtactaccttggcgctgtggagctgtcctgggactatatgcagagtgatttgggagagcttcccgtcgacgcacgatttcctcctcgcgttccaaagtcatttccctttaacacaagccaggtgtacaagaagacgctcttcgtcgaattcaccgatcacctgttcaatatcgccaaacccagaccaccatggatgggtcttttggggcctaccatacaagcggaggtgtatgacacagttgttatcactctcaagaacatggcttctcatccggtaagtcttcacgcagtgggcgtgtcctactggaaagcttcagaaggagccgagtatgatgatcagacatcccagagggagaaagaagacgacaaggtatttccaggtgggtctcatacctatgtgtggcaagtgctcaaagagaatggccctatggcaagcgatccgccgtgtttgacttacagctacctttcacacgttgacctcgtcaaggacctcaactccgggttgattggagccttgttggtatgcagggaaggatctcttgccaaagagaagacacagaccctccacaagtttatccttctctttgctgtgttcgatgagggcaaaagttggcatagcgaaacgaagaattccctcatgcaggatcgcgacgcagccagcgccagagcttggcccaagatgcacactgtgaacggatatgtcaataggacgcttcctggcttgattgggtgtcatcggaaaagtgtctactggcacgtgatcggaatggggacaacaccagaggtccactccatatttctcgaaggccataccttccttgttcgaaaccacagacaggcatccttggggatctctcccattacctttctcactgcccaaacgctccttatggacttgggtcagttccttctcttttgccatatcccgtcacaccagcatgatggtatggaagcttatgtgaaagtcgacagttgtcctgaggagccacagttgcgcatgaagaataatgaagaagccgaggattacgacgacgatctcaccgattctgagatggacgtggtgaggtttgatgacgacaactctccctccatcattcaagctcggagcggggcgaagaaacaccccaagacttgggtccactatatagcggcggaagaggaggattgggattacgctcctcttgtattggcaccagatgaccgctcatacaaaagccagtacctcaacaacggaccgcagagaattggccggaagtataagaaagtgcgatttatggcctatacagacgaaacctttaagacaagggaggccatccagcatgagagtgggattttgggacctcttctttacggcgaagttggtgataccctcctcatcatcttcaagaatcaagcttctcgcccctataacatttacccacacgggatcactgacgttaggcctttgtatagcagaagacttcccaaaggcgtgaagcatctcaaagacttccccattttgccaggcgagatctttaagtacaaatggaccgtcacagtggaagatggaccgactaaatcagaccctcgatgccttacgcggtactattcctccttcgtgaatatggagagagatttggcaagcggactcataggaccactcctcatctgttacaaggaatctgtagaccagaggggtaaccagattatgagtgataaacgcaatgtgatcctttttagcgtcttcgacgagaaccggtcctggtacttgaccgagaatatacaaaggttccttcccaaccccgcaggcgttcagttggaagaccctgagtttcaggccagcaatattatgcactcaatcaacggctatgtgtttgatagtctccagctttctgtttgcctccatgaagtagcctattggtacatcttgtcaattggtgctcaaacagacttcctctccgtcttcttctccggctacacctttaagcacaagatggtgtatgaggacactctcacactctttccattttctggagaaaccgtgttcatgagcatggagaatccaggcctttggatcttgggttgccacaacagtgattttcgcaatcggggaatgactgctctcctcaaagtcagcagctgtgattggaacacaggcgactattacgaagattcttacgaggacataagtgcctactttgactccaagaataacgccattgagcccagatcattctcccagaatcctcccgtgcttaaaaggcatcagcgcgaaggtaccagaactactcttcagtctgatcaagaggagattgactatgacgacaccattagcgtggaaatgaagaaggaggatttcgatatctatgacgaagattggaaccagtctccgcggagctttcagaagaagacgcgacactacttcattgcagcagtcgaaaggctttgggactacggtatgtcatcatcccctcatgtgttgcgcaatagagctcagagtggaagtgttccacagttcaagaaagtcgtctttcaagagtttacagatggcagcttcacacagcctctctatcggggcgagcttaacgaacatttgggactccttggtccctatatccgagccgaagtggaggacaacattatggttacctttaggaatcaagcctctcgcccctacagcttctactcctccctcatcagttatgaggaggatcagagacaaggcgctgaaccacggaagaactttgtgaaaccgaatgagacgaagacctacttctggaaagtacagcaccacatggcccccacaaaagacgaattcgattgcaaagcatgggcgtatttttcagacgttgacttggagaaagatgtacattcaggacttattggtcctttgttggtgtgtcacactaacactctcaatccagcccatggcaggcaggtgacagtccaggaattcgctcttttctttaccatctttgatgagaccaagtcctggtacttcacggaaaacatggagcgcaattgcagagccccctgtaacatacagatggaggaccctacctttaaggaaaattatcggttccacgcaatcaacggatacattatggatacactccctggccttgtgatggctcaggaccaacgaatcaggtggtacctcctcagcatgggttctaatgagaacatacactccattcacttttcaggacatgtgttcactgtccggaagaaagaagagtataagatggccctctacaatttgtatccaggcgtgtttgagaccgttgaaatgcttccctctaaagctggcatctggagagtagagtgcttgatcggagaacatcttcacgcaggtatgagcaccttgttcctcgtgtacagcaacaaatgtcagaatccacttggcatggccagtggacacattcgcgactttcagatcacagcatctggccagtatggacaatgggccccaaagttggctcgcctccattactccggtagcataaatgcgtggtccactaaagaacctttcagctggattaaggtcgatcttcttgcccccatgatcatccacggcattaagacacagggagcgaggcagaaattctcctccctctacatctcacagttcattattatgtatagtttggacggcaagaagtggcaaacttatagaggtaacagtactggaacagacatggtgttcttcggcaacgttgatagctctggcatcaaacacaacatctttaatcctcccataatagctcggtacatcagattgcatccgacccactacagcattaggagtacactccgaatggagcttatgggttgcgacttgaattcctgttcaatgccactcggaatggagtctaaagccatctctgatgcacagataaccgccagtagctactttacgaacatgtttgctacgtggtcaccctctaaggcaaggcttcatttgcaaggccggtctaatgcctggagacctcaggtgaacaacccgaaagaatggctccaggtggactttcagaagaccatgaaagtaacaggtgtcactactcagggagttaagtccttggatactagcatgtatgtgaaggagttccttatttcctcatcacaagatggccaccagtggaccctcttctttcagaatggtaaggtcaaagtgtttcagggcaatcaagacagcttcacacccgtggtgaacagtcttgatcctccactcttgacacgataccttcgaatccatccacagtcttgggagcaccagattgcattgcgcatggaagtacttggatgcgaggctcaggacctctac

SEQ ID NO: 1364 - protein, 1457 aa, synthetic construct
  REGION 1..1457: note = Variant of human B-domain deleted Factor VIII
MQIELSTCFFLCLLRFCFSATRRYYLGAVELSWDYMQSDLGELPVDARFPPRVPKSFPFNTSQVYKKTLFVEFTDHLFNIAKPRPPWMGLLGPTIQAEVYDTVVITLKNMASHPVSLHAVGVSYWKASEGAEYDDQTSQREKEDDKVFPGGSHTYVWQVLKENGPMASDPPCLTYSYLSHVDLVKDLNSGLIGALLVCREGSLAKEKTQTLHKFILLFAVFDEGKSWHSETKNSLMQDRDAASARAWPKMHTVNGYVNRTLPGLIGCHRKSVYWHVIGMGTTPEVHSIFLEGHTFLVRNHRQASLGISPITFLTAQTLLMDLGQFLLFCHIPSHQHDGMEAYVKVDSCPEEPQLRMKNNEEAEDYDDDLTDSEMDVVRFDDDNSPSIIQARSGAKKHPKTWVHYIAAEEEDWDYAPLVLAPDDRSYKSQYLNNGPQRIGRKYKKVRFMAYTDETFKTREAIQHESGILGPLLYGEVGDTLLIIFKNQASRPYNIYPHGITDVRPLYSRRLPKGVKHLKDFPILPGEIFKYKWTVTVEDGPTKSDPRCLTRYYSSFVNMERDLASGLIGPLLICYKESVDQRGNQIMSDKRNVILFSVFDENRSWYLTENIQRFLPNPAGVQLEDPEFQASNIMHSINGYVFDSLQLSVCLHEVAYWYILSIGAQTDFLSVFFSGYTFKHKMVYEDTLTLFPFSGETVFMSMENPGLWILGCHNSDFRNRGMTALLKVSSCDWNTGDYYEDSYEDISAYFDSKNNAIEPRSFSQNPPVLKRHQREGTRTTLQSDQEEIDYDDTISVEMKKEDFDIYDEDWNQSPRSFQKKTRHYFIAAVERLWDYGMSSSPHVLRNRAQSGSVPQFKKVVFQEFTDGSFTQPLYRGELNEHLGLLGPYIRAEVEDNIMVTFRNQASRPYSFYSSLISYEEDQRQGAEPRKNFVKPNETKTYFWKVQHHMAPTKDEFDCKAWAYFSDVDLEKDVHSGLIGPLLVCHTNTLNPAHGRQVTVQEFALFFTIFDETKSWYFTENMERNCRAPCNIQMEDPTFKENYRFHAINGYIMDTLPGLVMAQDQRIRWYLLSMGSNENIHSIHFSGHVFTVRKKEEYKMALYNLYPGVFETVEMLPSKAGIWRVECLIGEHLHAGMSTLFLVYSNKCQNPLGMASGHIRDFQITASGQYGQWAPKLARLHYSGSINAWSTKEPFSWIKVDLLAPMIIHGIKTQGARQKFSSLYISQFIIMYSLDGKKWQTYRGNSTGTDMVFFGNVDSSGIKHNIFNPPIIARYIRLHPTHYSIRSTLRMELMGCDLNSCSMPLGMESKAISDAQITASSYFTNMFATWSPSKARLHLQGRSNAWRPQVNNPKEWLQVDFQKTMKVTGVTTQGVKSLDTSMYVKEFLISSSQDGHQWTLFFQNGKVKVFQGNQDSFTPVVNSLDPPLLTRYLRIHPQSWEHQIALRMEVLGCEAQDLY

SEQ ID NO: 1365 - DNA, 4371 bp, synthetic construct
  misc_feature 1..4371: note = Variant of human B-domain deleted Factor VIII
  source 1..4371: mol_type = other DNA
atgcagattgaactgtctacctgcttcttcctctgtttgctgaggttctgctttagcgccactagacggtactaccttggcgctgtggagctgtcctgggactatatgcagagtgatttgggagagcttcccgtcgacgcacgatttcctcctcgcgttccaaagtcatttccctttaacacaagccaggtgtacaagaagacgctcttcgtcgaattcaccgatcacctgttcaatatcgccaaacccagaccaccatggatgggtcttttggggcctaccatacaagcggaggtgtatgacacagttgttatcactctcaagaacatggcttctcatccggtaagtcttcacgcagtgggcgtgtcctactggaaagcttcagaaggagccgagtatgatgatcagacatcccagagggagaaagaagacgacaaggtatttccaggtgggtctcatacctatgtgtggcaagtgctcaaagagaatggccctatggcaagcgatccgccgtgtttgacttacagctacctttcacacgttgacctcgtcaaggacctcaactccgggttgattggagccttgttggtatgcagggaaggatctcttgccaaagagaagacacagaccctccacaagtttatccttctctttgctgtgttcgatgagggcaaaagttggcatagcgaaacgaagaattccctcatgcaggatcgcgacgcagccagcgccagagcttggcccaagatgcacactgtgaacggatatgtcaataggacgcttcctggcttgattgggtgtcatcggaaaagtgtctactggcacgtgatcggaatggggacaacaccagaggtccactccatatttctcgaaggccataccttccttgttcgaaaccacagacaggcatccttggggatctctcccattacctttctcactgcccaaacgctccttatggacttgggtcagttccttctcttttgccatatcccgtcacaccagcatgatggtatggaagcttatgtgaaagtcgacagttgtcctgaggagccacagttgcgcatgaagaataatgaagaagccgaggattacgacgacgatctcaccgattctgagatggacgtggtgaggtttgatgacgacaactctccctccatcattcaagctcggagcggggcgaagaaacaccccaagacttgggtccactatatagcggcggaagaggaggattgggattacgctcctcttgtattggcaccagatgaccgctcatacaaaagccagtacctcaacaacggaccgcagagaattggccggaagtataagaaagtgcgatttatggcctatacagacgaaacctttaagacaagggaggccatccagcatgagagtgggattttgggacctcttctttacggcgaagttggtgataccctcctcatcatcttcaagaatcaagcttctcgcccctataacatttacccacacgggatcactgacgttaggcctttgtatagcagaagacttcccaaaggcgtgaagcatctcaaagacttccccattttgccaggcgagatctttaagtacaaatggaccgtcacagtggaagatggaccgactaaatcagaccctcgatgccttacgcggtactattcctccttcgtgaatatggagagagatttggcaagcggactcataggaccactcctcatctgttacaaggaatctgtagaccagaggggtaaccagattatgagtgataaacgcaatgtgatcctttttagcgtcttcgacgagaaccggtcctggtacttgaccgagaatatacaaaggttccttcccaaccccgcaggcgttcagttggaagaccctgagtttcaggccagcaatattatgcactcaatcaacggctatgtgtttgatagtctccagctttctgtttgcctccatgaagtagcctattggtacatcttgtcaattggtgctcaaacagacttcctctccgtcttcttctccggctacacctttaagcacaagatggtgtatgaggacactctcacactctttccattttctggagaaaccgtgttcatgagcatggagaatccaggcctttggatcttgggttgccacaacagtgattttcgcaatcggggaatgactgctctcctcaaagtcagcagctgtgattggaacacaggcgactattacgaagattcttacgaggacataagtgcctactttgactccaagaataacgccattgcgcccagatcattctcccagaatcctcccgtgcttaaaaggcatcagcgcgaaggtaccagaactactcttcagtctgatcaagaggagattgactatgacgacaccattagcgtggaaatgaagaaggaggatttcgatatctatgacgaagatgagaaccagtctccgcggagctttcagaagaagacgcgacactacttcattgcagcagtcgaaaggctttgggactacggtatgtcatcatcccctcatgtgttgcgcaatagagctcagagtggaagtgttccacagttcaagaaagtcgtctttcaagagtttacagatggcagcttcacacagcctctctatcggggcgagcttaacgaacatttgggactccttggtccctatatccgagccgaagtggaggacaacattatggttacctttaggaatcaagcctctcgcccctacagcttctactcctccctcatcagttatgaggaggatcagagacaaggcgctgaaccacggaagaactttgtgaaaccgaatgagacgaagacctacttctggaaagtacagcaccacatggcccccacaaaagacgaattcgattgcaaagcatgggcgtatttttcagacgttgacttggagaaagatgtacattcaggacttattggtcctttgttggtgtgtcacactaacactctcaatccagcccatggcaggcaggtgacagtccaggaattcgctcttttctttaccatctttgatgagaccaagtcctggtacttcacggaaaacatggagcgcaattgcagagccccctgtaacatacagatggaggaccctacctttaaggaaaattatcggttccacgcaatcaacggatacattatggatacactccctggccttgtgatggctcaggaccaacgaatcaggtggtacctcctcagcatgggttctaatgagaacatacactccattcacttttcaggacatgtgttcactgtccggaagaaagaagagtataagatggccctctacaatttgtatccaggcgtgtttgagaccgttgaaatgcttccctctaaagctggcatctggagagtagagtgcttgatcggagaacatcttcacgcaggtatgagcaccttgttcctcgtgtacagcaacaaatgtcagaatccacttggcatggccagtggacacattcgcgactttcagatcacagcatctggccagtatggacaatgggccccaaagttggctcgcctccattactccggtagcataaatgcgtggtccactaaagaacctttcagctggattaaggtcgatcttcttgcccccatgatcatccacggcattaagacacagggagcgaggcagaaattctcctccctctacatctcacagttcattattatgtatagtttggacggcaagaagtggcaaacttatagaggtaacagtactggaacagacatggtgttcttcggcaacgttgatagctctggcatcaaacacaacatctttaatcctcccataatagctcggtacatcagattgcatccgacccactacagcattaggagtacactccgaatggagcttatgggttgcgacttgaattcctgttcaatgccactcggaatggagtctaaagccatctctgatgcacagataaccgccagtagctactttacgaacatgtttgctacgtggtcaccctctaaggcaaggcttcatttgcaaggccggtctaatgcctggagacctcaggtgaacaacccgaaagaatggctccaggtggactttcagaagaccatgaaagtaacaggtgtcactactcagggagttaagtccttggatactagcatgtatgtgaaggagttccttatttcctcatcacaagatggccaccagtggaccctcttctttcagaatggtaaggtcaaagtgtttcagggcaatcaagacagcttcacacccgtggtgaacagtcttgatcctccactcttgacacgataccttcgaatccatccacagtcttgggagcaccagattgcattgcgcatggaagtacttggatgcgaggctcaggacctctac

SEQ ID NO: 1366 - protein, 1457 aa, synthetic construct
  REGION 1..1457: note = Variant of human B-domain deleted Factor VIII
MQIELSTCFFLCLLRFCFSATRRYYLGAVELSWDYMQSDLGELPVDARFPPRVPKSFPFNTSQVYKKTLFVEFTDHLFNIAKPRPPWMGLLGPTIQAEVYDTVVITLKNMASHPVSLHAVGVSYWKASEGAEYDDQTSQREKEDDKVFPGGSHTYVWQVLKENGPMASDPPCLTYSYLSHVDLVKDLNSGLIGALLVCREGSLAKEKTQTLHKFILLFAVFDEGKSWHSETKNSLMQDRDAASARAWPKMHTVNGYVNRTLPGLIGCHRKSVYWHVIGMGTTPEVHSIFLEGHTFLVRNHRQASLGISPITFLTAQTLLMDLGQFLLFCHIPSHQHDGMEAYVKVDSCPEEPQLRMKNNEEAEDYDDDLTDSEMDVVRFDDDNSPSIIQARSGAKKHPKTWVHYIAAEEEDWDYAPLVLAPDDRSYKSQYLNNGPQRIGRKYKKVRFMAYTDETFKTREAIQHESGILGPLLYGEVGDTLLIIFKNQASRPYNIYPHGITDVRPLYSRRLPKGVKHLKDFPILPGEIFKYKWTVTVEDGPTKSDPRCLTRYYSSFVNMERDLASGLIGPLLICYKESVDQRGNQIMSDKRNVILFSVFDENRSWYLTENIQRFLPNPAGVQLEDPEFQASNIMHSINGYVFDSLQLSVCLHEVAYWYILSIGAQTDFLSVFFSGYTFKHKMVYEDTLTLFPFSGETVFMSMENPGLWILGCHNSDFRNRGMTALLKVSSCDWNTGDYYEDSYEDISAYFDSKNNAIAPRSFSQNPPVLKRHQREGTRTTLQSDQEEIDYDDTISVEMKKEDFDIYDEDENQSPRSFQKKTRHYFIAAVERLWDYGMSSSPHVLRNRAQSGSVPQFKKVVFQEFTDGSFTQPLYRGELNEHLGLLGPYIRAEVEDNIMVTFRNQASRPYSFYSSLISYEEDQRQGAEPRKNFVKPNETKTYFWKVQHHMAPTKDEFDCKAWAYFSDVDLEKDVHSGLIGPLLVCHTNTLNPAHGRQVTVQEFALFFTIFDETKSWYFTENMERNCRAPCNIQMEDPTFKENYRFHAINGYIMDTLPGLVMAQDQRIRWYLLSMGSNENIHSIHFSGHVFTVRKKEEYKMALYNLYPGVFETVEMLPSKAGIWRVECLIGEHLHAGMSTLFLVYSNKCQNPLGMASGHIRDFQITASGQYGQWAPKLARLHYSGSINAWSTKEPFSWIKVDLLAPMIIHGIKTQGARQKFSSLYISQFIIMYSLDGKKWQTYRGNSTGTDMVFFGNVDSSGIKHNIFNPPIIARYIRLHPTHYSIRSTLRMELMGCDLNSCSMPLGMESKAISDAQITASSYFTNMFATWSPSKARLHLQGRSNAWRPQVNNPKEWLQVDFQKTMKVTGVTTQGVKSLDTSMYVKEFLISSSQDGHQWTLFFQNGKVKVFQGNQDSFTPVVNSLDPPLLTRYLRIHPQSWEHQIALRMEVLGCEAQDLY

SEQ ID NO: 1367 - DNA, 4371 bp, synthetic construct
  misc_feature 1..4371: note = Variant of human B-domain deleted Factor VIII
  source 1..4371: mol_type = other DNA
atgcagattgaactgtctacctgcttcttcctctgtttgctgaggttctgctttagcgccactagacggtactaccttggcgctgtggagctgtcctgggactatatgcagagtgatttgggagagcttcccgtcgacgcacgatttcctcctcgcgttccaaagtcatttccctttaacacaagccaggtgtacaagaagacgctcttcgtcgaattcaccgatcacctgttcaatatcgccaaacccagaccaccatggatgggtcttttggggcctaccatacaagcggaggtgtatgacacagttgttatcactctcaagaacatggcttctcatccggtaagtcttcacgcagtgggcgtgtcctactggaaagcttcagaaggagccgagtatgatgatcagacatcccagagggagaaagaagacgacaaggtatttccaggtgggtctcatacctatgtgtggcaagtgctcaaagagaatggccctatggcaagcgatccgccgtgtttgacttacagctacctttcacacgttgacctcgtcaaggacctcaactccgggttgattggagccttgttggtatgcagggaaggatctcttgccaaagagaagacacagaccctccacaagtttatccttctctttgctgtgttcgatgagggcaaaagttggcatagcgaaacgaagaattccctcatgcaggatcgcgacgcagccagcgccagagcttggcccaagatgcacactgtgaacggatatgtcaataggacgcttcctggcttgattgggtgtcatcggaaaagtgtctactggcacgtgatcggaatggggacaacaccagaggtccactccatatttctcgaaggccataccttccttgttcgaaaccacagacaggcatccttggggatctctcccattacctttctcactgcccaaacgctccttatggacttgggtcagttccttctcttttgccatatcccgtcacaccagcatgatggtatggaagcttatgtgaaagtcgacagttgtcctgaggagccacagttgcgcatgaagaataatgaagaagccgaggattacgacgacgatctcaccgattctgagatggacgtggtgaggtttgatgacgacaactctccctccatcattcaagctcggagcggggcgaagaaacaccccaagacttgggtccactatatagcggcggaagaggaggattgggattacgctcctcttgtattggcaccagatgaccgctcatacaaaagccagtacctcaacaacggaccgcagagaattggccggaagtataagaaagtgcgatttatggcctatacagacgaaacctttaagacaagggaggccatccagcatgagagtgggattttgggacctcttctttacggcgaagttggtgataccctcctcatcatcttcaagaatcaagcttctcgcccctataacatttacccacacgggatcactgacgttaggcctttgtatagcagaagacttcccaaaggcgtgaagcatctcaaagacttccccattttgccaggcgagatctttaagtacaaatggaccgtcacagtggaagatggaccgactaaatcagaccctcgatgccttacgcggtactattcctccttcgtgaatatggagagagatttggcaagcggactcataggaccactcctcatctgttacaaggaatctgtagaccagaggggtaaccagattatgagtgataaacgcaatgtgatcctttttagcgtcttcgacgagaaccggtcctggtacttgaccgagaatatacaaaggttccttcccaaccccgcaggcgttcagttggaagaccctgagtttcaggccagcaatattatgcactcaatcaacggctatgtgtttgatagtctccagctttctgtttgcctccatgaagtagcctattggtacatcttgtcaattggtgctcaaacagacttcctctccgtcttcttctccggctacacctttaagcacaagatggtgtatgaggacactctcacactctttccattttctggagaaaccgtgttcatgagcatggagaatccaggcctttggatcttgggttgccacaacagtgattttcgcaatcggggaatgactgctctcctcaaagtcagcagctgtgattggaacacaggcgactattacgaagattcttacgaggacataagtgcctactttgactccaagaataacgccattgagcccagatcattctcccagaatcctcccgtgcttaaaaggcatcagcgcgaaggtaccagaactactcttcagtctgatcaagaggagattgactatgacgacaccattagcgtggaaatgaagaaggaggatttcgatatctatgacgaagatgagaaccagtctccgcggagctttcagaagaagacgcgacactacttcattgcagcagtcgaaaggctttgggactacggtatgtcatcatcccctcatgtgttgcgcaatagagctcagagtggaagtgttccacagttcaagaaagtcgtctttcaagagtttacagatggcagcttcacacagcctctctatcggggcgagcttaacgaacatttgggactccttggtccctatatccgagccgaagtggaggacaacattatggttacctttaggaatcaagcctctcgcccctacagcttctactcctccctcatcagttatgaggaggatcagagacaaggcgctgaaccacggaagaactttgtgaaaccgaatgagacgaagacctacttctggaaagtacagcaccacatggcccccacaaaagacgaattcgattgcaaagcatgggcgtatttttcagacgttgacttggagaaagatgtacattcaggacttattggtcctttgttggtgtgtcacactaacactctcaatccagcccatggcaggcaggtgacagtccaggaattcgctcttttctttaccatctttgatgagaccaagtcctggtacttcacggaaaacatggagcgcaattgcagagccccctgtaacatacagatggaggaccctacctttaaggaaaattatcggttccacgcaatcaacggatacattatggatacactccctggccttgtgatggctcaggaccaacgaatcaggtggtacctcctcagcatgggttctaatgagaacatacactccattcacttttcaggacatgtgttcactgtccggaagaaagaagagtataagatgggtctctacaatttgtatccaggcgtgtttgagaccgttgaaatgcttccctctaaagctggcatctggagagtagagtgcttgatcggagaacatcttcacgcaggtatgagcaccttgttcctcgtgtacagcaacaaatgtcagaatccacttggcatggccagtggacacattcgcgactttcagatcacagcatctggccagtatggacaatgggccccaaagttggctcgcctccattactccggtagcataaatgcgtggtccactaaagaacctttcagctggattaaggtcgatcttcttgcccccatgatcatccacggcattaagacacagggagcgaggcagaaattctcctccctctacatctcacagttcattattatgtatagtttggacggcaagaagtggcaaacttatagaggtaacagtactggaacagacatggtgttcttcggcaacgttgatagctctggcatcaaacacaacatctttaatcctcccataatagctcggtacatcagattgcatccgacccactacagcattaggagtacactccgaatggagcttatgggttgcgacttgaattcctgttcaatgccactcggaatggagtctaaagccatctctgatgcacagataaccgccagtagctactttacgaacatgtttgctacgtggtcaccctctaaggcaaggcttcatttgcaaggccggtctaatgcctggagacctcaggtgaacaacccgaaagaatggctccaggtggactttcagaagaccatgaaagtaacaggtgtcactactcagggagttaagtccttggatactagcatgtatgtgaaggagttccttatttcctcatcacaagatggccaccagtggaccctcttctttcagaatggtaaggtcaaagtgtttcagggcaatcaagacagcttcacacccgtggtgaacagtcttgatcctccactcttgacacgataccttcgaatccatccacagtcttgggagcaccagattgcattgcgcatggaagtacttggatgcgaggctcaggacctctac

SEQ ID NO: 1368 - protein, 1457 aa, synthetic construct
  REGION 1..1457: note = Variant of human B-domain deleted Factor VIII
MQIELSTCFFLCLLRFCFSATRRYYLGAVELSWDYMQSDLGELPVDARFPPRVPKSFPFNTSQVYKKTLFVEFTDHLFNIAKPRPPWMGLLGPTIQAEVYDTVVITLKNMASHPVSLHAVGVSYWKASEGAEYDDQTSQREKEDDKVFPGGSHTYVWQVLKENGPMASDPPCLTYSYLSHVDLVKDLNSGLIGALLVCREGSLAKEKTQTLHKFILLFAVFDEGKSWHSETKNSLMQDRDAASARAWPKMHTVNGYVNRTLPGLIGCHRKSVYWHVIGMGTTPEVHSIFLEGHTFLVRNHRQASLGISPITFLTAQTLLMDLGQFLLFCHIPSHQHDGMEAYVKVDSCPEEPQLRMKNNEEAEDYDDDLTDSEMDVVRFDDDNSPSIIQARSGAKKHPKTWVHYIAAEEEDWDYAPLVLAPDDRSYKSQYLNNGPQRIGRKYKKVRFMAYTDETFKTREAIQHESGILGPLLYGEVGDTLLIIFKNQASRPYNIYPHGITDVRPLYSRRLPKGVKHLKDFPILPGEIFKYKWTVTVEDGPTKSDPRCLTRYYSSFVNMERDLASGLIGPLLICYKESVDQRGNQIMSDKRNVILFSVFDENRSWYLTENIQRFLPNPAGVQLEDPEFQASNIMHSINGYVFDSLQLSVCLHEVAYWYILSIGAQTDFLSVFFSGYTFKHKMVYEDTLTLFPFSGETVFMSMENPGLWILGCHNSDFRNRGMTALLKVSSCDWNTGDYYEDSYEDISAYFDSKNNAIEPRSFSQNPPVLKRHQREGTRTTLQSDQEEIDYDDTISVEMKKEDFDIYDEDENQSPRSFQKKTRHYFIAAVERLWDYGMSSSPHVLRNRAQSGSVPQFKKVVFQEFTDGSFTQPLYRGELNEHLGLLGPYIRAEVEDNIMVTFRNQASRPYSFYSSLISYEEDQRQGAEPRKNFVKPNETKTYFWKVQHHMAPTKDEFDCKAWAYFSDVDLEKDVHSGLIGPLLVCHTNTLNPAHGRQVTVQEFALFFTIFDETKSWYFTENMERNCRAPCNIQMEDPTFKENYRFHAINGYIMDTLPGLVMAQDQRIRWYLLSMGSNENIHSIHFSGHVFTVRKKEEYKMGLYNLYPGVFETVEMLPSKAGIWRVECLIGEHLHAGMSTLFLVYSNKCQNPLGMASGHIRDFQITASGQYGQWAPKLARLHYSGSINAWSTKEPFSWIKVDLLAPMIIHGIKTQGARQKFSSLYISQFIIMYSLDGKKWQTYRGNSTGTDMVFFGNVDSSGIKHNIFNPPIIARYIRLHPTHYSIRSTLRMELMGCDLNSCSMPLGMESKAISDAQITASSYFTNMFATWSPSKARLHLQGRSNAWRPQVNNPKEWLQVDFQKTMKVTGVTTQGVKSLDTSMYVKEFLISSSQDGHQWTLFFQNGKVKVFQGNQDSFTPVVNSLDPPLLTRYLRIHPQSWEHQIALRMEVLGCEAQDLY

SEQ ID NO: 1369 - DNA, 4371 bp, synthetic construct
  misc_feature 1..4371: note = Variant of human B-domain deleted Factor VIII
  source 1..4371: mol_type = other DNA
atgcagattgaactgtctacctgcttcttcctctgtttgctgaggttctgctttagcgccactagacggtactaccttggcgctgtggagctgtcctgggactatatgcagagtgatttgggagagcttcccgtcgacgcacgatttcctcctcgcgttccaaagtcatttccctttaacacaagccaggtgtacaagaagacgctcttcgtcgaattcaccgatcacctgttcaatatcgccaaacccagaccaccatggatgggtcttttggggcctaccatacaagcggaggtgtatgacacagttgttatcactctcaagaacatggcttctcatccggtaagtcttcacgcagtgggcgtgtcctactggaaagcttcagaaggagccgagtatgatgatcagacatcccagagggagaaagaagacgacaaggtatttccaggtgggtctcatacctatgtgtggcaagtgctcaaagagaatggccctatggcaagcgatccgccgtgtttgacttacagctacctttcacacgttgacctcgtcaaggacctcaactccgggttgattggagccttgttggtatgcagggaaggatctcttgccaaagagaagacacagaccctccacaagtttatccttctctttgctgtgttcgatgagggcaaaagttggcatagcgaaacgaagaattccctcatgcaggatcgcgacgcagccagcgccagagcttggcccaagatgcacactgtgaacggatatgtcaataggacgcttcctggcttgattgggtgtcatcggaaaagtgtctactggcacgtgatcggaatggggacaacaccagaggtccactccatatttctcgaaggccataccttccttgttcgaaaccacagacaggcatccttggggatctctcccattacctttctcactgcccaaacgctccttatggacttgggtcagttccttctcttttgccatatcccgtcacaccagcatgatggtatggaagcttatgtgaaagtcgacagttgtcctgaggagccacagttgcgcatgaagaataatgaagaagccgaggattacgacgacgatctcaccgattctgagatggacgtggtgaggtttgatgacgacaactctccctccatcattcaagctcggagcggggcgaagaaacaccccaagacttgggtccactatatagcggcggaagaggaggattgggattacgctcctcttgtattggcaccagatgaccgctcatacaaaagccagtacctcaacaacggaccgcagagaattggccggaagtataagaaagtgcgatttatggcctatacagacgaaacctttaagacaagggaggccatccagcatgagagtgggattttgggacctcttctttacggcgaagttggtgataccctcctcatcatcttcaagaatcaagcttctcgcccctataacatttacccacacgggatcactgacgttaggcctttgtatagcagaagacttcccaaaggcgtgaagcatctcaaagacttccccattttgccaggcgagatctttaagtacaaatggaccgtcacagtggaagatggaccgactaaatcagaccctcgatgccttacgcggtactattcctccttcgtgaatatggagagagatttggcaagcggactcataggaccactcctcatctgttacaaggaatctgtagaccagaggggtaaccagattatgagtgataaacgcaatgtgatcctttttagcgtcttcgacgagaaccggtcctggtacttgaccgagaatatacaaaggttccttcccaaccccgcaggcgttcagttggaagaccctgagtttcaggccagcaatattatgcactcaatcaacggctatgtgtttgatagtctccagctttctgtttgcctccatgaagtagcctattggtacatcttgtcaattggtgctcaaacagacttcctctccgtcttcttctccggctacacctttaagcacaagatggtgtatgaggacactctcacactctttccattttctggagaaaccgtgttcatgagcatggagaatccaggcctttggatcttgggttgccacaacagtgattttcgcaatcggggaatgactgctctcctcaaagtcagcagctgtgattggaacacaggcgactattacgaagattcttacgaggacataagtgcctactttgactccaagaataacgccattgagcccagatcattctcccagaatcctcccgtgcttaaaaggcatcagcgcgaaggtaccagaactactcttcagtctgatcaagaggagattgactatgacgacaccattagcgtggaaatgaagggtgaggatttcgatatctatgacgaagatgagaaccagtctccgcggagctttcagaagaagacgcgacactacttcattgcagcagtcgaaaggctttgggactacggtatgtcatcatcccctcatgtgttgcgcaatagagctcagagtggaagtgttccacagttcaagaaagtcgtctttcaagagtttacagatggcagcttcacacagcctctctatcggggcgagcttaacgaacatttgggactccttggtccctatatccgagccgaagtggaggacaacattatggttacctttaggaatcaagcctctcgcccctacagcttctactcctccctcatcagttatgaggaggatcagagacaaggcgctgaaccacggaagaactttgtgaaaccgaatgagacgaagacctacttctggaaagtacagcaccacatggcccccacaaaagacgaattcgattgcaaagcatgggcgtatttttcagacgttgacttggagaaagatgtacattcaggacttattggtcctttgttggtgtgtcacactaacactctcaatccagcccatggcaggcaggtgacagtccaggaattcgctcttttctttaccatctttgatgagaccaagtcctggtacttcacggaaaacatggagcgcaattgcagagccccctgtaacatacagatggaggaccctacctttaaggaaaattatcggttccacgcaatcaacggatacattatggatacactccctggccttgtgatggctcaggaccaacgaatcaggtggtacctcctcagcatgggttctaatgagaacatacactccattcacttttcaggacatgtgttcactgtccggaagaaagaagagtataagatggccctctacaatttgtatccaggcgtgtttgagaccgttgaaatgcttccctctaaagctggcatctggagagtagagtgcttgatcggagaacatcttcacgcaggtatgagcaccttgttcctcgtgtacagcaacaaatgtcagaatccacttggcatggccagtggacacattcgcgactttcagatcacagcatctggccagtatggacaatgggccccaaagttggctcgcctccattactccggtagcataaatgcgtggtccactaaagaacctttcagctggattaaggtcgatcttcttgcccccatgatcatccacggcattaagacacagggagcgaggcagaaattctcctccctctacatctcacagttcattattatgtatagtttggacggcaagaagtggcaaacttatagaggtaacagtactggaacagacatggtgttcttcggcaacgttgatagctctggcatcaaacacaacatctttaatcctcccataatagctcggtacatcagattgcatccgacccactacagcattaggagtacactccgaatggagcttatgggttgcgacttgaattcctgttcaatgccactcggaatggagtctaaagccatctctgatgcacagataaccgccagtagctactttacgaacatgtttgctacgtggtcaccctctaaggcaaggcttcatttgcaaggccggtctaatgcctggagacctcaggtgaacaacccgaaagaatggctccaggtggactttcagaagaccatgaaagtaacaggtgtcactactcagggagttaagtccttggatactagcatgtatgtgaaggagttccttatttcctcatcacaagatggccaccagtggaccctcttctttcagaatggtaaggtcaaagtgtttcagggcaatcaagacagcttcacacccgtggtgaacagtcttgatcctccactcttgacacgataccttcgaatccatccacagtcttgggagcaccagattgcattgcgcatggaagtacttggatgcgaggctcaggacctctac

SEQ ID NO: 1370 - protein, 1457 aa, synthetic construct
  REGION 1..1457: note = Variant of human B-domain deleted Factor VIII
MQIELSTCFFLCLLRFCFSATRRYYLGAVELSWDYMQSDLGELPVDARFPPRVPKSFPFNTSQVYKKTLFVEFTDHLFNIAKPRPPWMGLLGPTIQAEVYDTVVITLKNMASHPVSLHAVGVSYWKASEGAEYDDQTSQREKEDDKVFPGGSHTYVWQVLKENGPMASDPPCLTYSYLSHVDLVKDLNSGLIGALLVCREGSLAKEKTQTLHKFILLFAVFDEGKSWHSETKNSLMQDRDAASARAWPKMHTVNGYVNRTLPGLIGCHRKSVYWHVIGMGTTPEVHSIFLEGHTFLVRNHRQASLGISPITFLTAQTLLMDLGQFLLFCHIPSHQHDGMEAYVKVDSCPEEPQLRMKNNEEAEDYDDDLTDSEMDVVRFDDDNSPSIIQARSGAKKHPKTWVHYIAAEEEDWDYAPLVLAPDDRSYKSQYLNNGPQRIGRKYKKVRFMAYTDETFKTREAIQHESGILGPLLYGEVGDTLLIIFKNQASRPYNIYPHGITDVRPLYSRRLPKGVKHLKDFPILPGEIFKYKWTVTVEDGPTKSDPRCLTRYYSSFVNMERDLASGLIGPLLICYKESVDQRGNQIMSDKRNVILFSVFDENRSWYLTENIQRFLPNPAGVQLEDPEFQASNIMHSINGYVFDSLQLSVCLHEVAYWYILSIGAQTDFLSVFFSGYTFKHKMVYEDTLTLFPFSGETVFMSMENPGLWILGCHNSDFRNRGMTALLKVSSCDWNTGDYYEDSYEDISAYFDSKNNAIEPRSFSQNPPVLKRHQREGTRTTLQSDQEEIDYDDTISVEMKGEDFDIYDEDENQSPRSFQKKTRHYFIAAVERLWDYGMSSSPHVLRNRAQSGSVPQFKKVVFQEFTDGSFTQPLYRGELNEHLGLLGPYIRAEVEDNIMVTFRNQASRPYSFYSSLISYEEDQRQGAEPRKNFVKPNETKTYFWKVQHHMAPTKDEFDCKAWAYFSDVDLEKDVHSGLIGPLLVCHTNTLNPAHGRQVTVQEFALFFTIFDETKSWYFTENMERNCRAPCNIQMEDPTFKENYRFHAINGYIMDTLPGLVMAQDQRIRWYLLSMGSNENIHSIHFSGHVFTVRKKEEYKMALYNLYPGVFETVEMLPSKAGIWRVECLIGEHLHAGMSTLFLVYSNKCQNPLGMASGHIRDFQITASGQYGQWAPKLARLHYSGSINAWSTKEPFSWIKVDLLAPMIIHGIKTQGARQKFSSLYISQFIIMYSLDGKKWQTYRGNSTGTDMVFFGNVDSSGIKHNIFNPPIIARYIRLHPTHYSIRSTLRMELMGCDLNSCSMPLGMESKAISDAQITASSYFTNMFATWSPSKARLHLQGRSNAWRPQVNNPKEWLQVDFQKTMKVTGVTTQGVKSLDTSMYVKEFLISSSQDGHQWTLFFQNGKVKVFQGNQDSFTPVVNSLDPPLLTRYLRIHPQSWEHQIALRMEVLGCEAQDLY

SEQ ID NO: 1371 - DNA, 4371 bp, synthetic construct
  misc_feature 1..4371: note = Variant of human B-domain deleted Factor VIII
  source 1..4371: mol_type = other DNA
atgcagattgaactgtctacctgcttcttcctctgtttgctgaggttctgctttagcgccactagacggtactaccttggcgctgtggagctgtcctgggactatatgcagagtgatttgggagagcttcccgtcgacgcacgatttcctcctcgcgttccaaagtcatttccctttaacacaagccaggtgtacaagaagacgctcttcgtcgaattcaccgatcacctgttcaatatcgccaaacccagaccaccatggatgggtcttttggggcctaccatacaagcggaggtgtatgacacagttgttatcactctcaagaacatggcttctcatccggtaagtcttcacgcagtgggcgtgtcctactggaaagcttcagaaggagccgagtatgatgatcagacatcccagagggagaaagaagacgacaaggtatttccaggtgggtctcatacctatgtgtggcaagtgctcaaagagaatggccctatggcaagcgatccgccgtgtttgacttacagctacctttcacacgttgacctcgtcaaggacctcaactccgggttgattggagccttgttggtatgcagggaaggatctcttgccaaagagaagacacagaccctccacaagtttatccttctctttgctgtgttcgatgagggcaaaagttggcatagcgaaacgaagaattccctcatgcaggatcgcgacgcagccagcgccagagcttggcccaagatgcacactgtgaacggatatgtcaataggacgcttcctggcttgattgggtgtcatcggaaaagtgtctactggcacgtgatcggaatggggacaacaccagaggtccactccatatttctcgaaggccataccttccttgttcgaaaccacagacaggcatccttggggatctctcccattacctttctcactgcccaaacgctccttatggacttgggtcagttccttctcttttgccatatcccgtcacaccagcatgatggtatggaagcttatgtgaaagtcgacagttgtcctgaggagccacagttgcgcatgaagaataatgaagaagccgaggattacgacgacgatctcaccgattctgagatggacgtggtgaggtttgatgacgacaactctccctccatcattcaagctcggagcggggcgaagaaacaccccaagacttgggtccactatatagcggcggaagaggaggattgggattacgctcctcttgtattggcaccagatgaccgctcatacaaaagccagtacctcaacaacggaccgcagagaattggccggaagtataagaaagtgcgatttatggcctatacagacgaaacctttaagacaagggaggccatccagcatgagagtgggattttgggacctcttctttacggcgaagttggtgataccctcctcatcatcttcaagaatcaagcttctcgcccctataacatttacccacacgggatcactgacgttaggcctttgtatagcagaagacttcccaaaggcgtgaagcatctcaaagacttccccattttgccaggcgagatctttaagtacaaatggaccgtcacagtggaagatggaccgactaaatcagaccctcgatgccttacgcggtactattcctccttcgtgaatatggagagagatttggcaagcggactcataggaccactcctcatctgttacaaggaatctgtagaccagaggggtaaccagattatgagtgataaacgcaatgtgatcctttttagcgtcttcgacgagaaccggtcctggtacttgaccgagaatatacaaaggttccttcccaaccccgcaggcgttcagttggaagaccctgagtttcaggccagcaatattatgcactcaatcaacggctatgtgtttgatagtctccagctttctgtttgcctccatgaagtagcctattggtacatcttgtcaattggtgctcaaacagacttcctctccgtcttcttctccggctacacctttaagcacaagatggtgtatgaggacactctcacactctttccattttctggagaaaccgtgttcatgagcatggagaatccaggcctttggatcttgggttgccacaacagtgattttcgcaatcggggaatgactgctctcctcaaagtcagcagctgtgattggaacacaggcgactattacgaagattcttacgaggacataagtgcctactttgactccaagaataacgccattgagcccagatcattctcccagaatcctcccgtgcttaaaaggcatcagcgcgaaggtaccagaactactcttcagtctgatcaagaggagattgactatgacgacaccattagcgtggaaatgaagaaggaggatttcgatatctatgacgaagatgagaaccagtctccgcggagctttcagaagaagacgcgacactacttcattgcagcagtcgaaaggctttgggactacggtatgtcatcatcccctcatgtgttgcgcaatagagctcagagtggaagtgttccacagttcaagaaagtcgtctttcaagagtttacagatggcagcttcacacagcctctctatcggggcgagcttaacgaacatttgggactccttggtccctatatccgagccgaagtggaggacaacattatggttacctttaggaatcaagcctctcgcccctacagcttctactcctccctcatcatttatgaggaggatcagagacaaggcgctgaaccacggaagaactttgtgaaaccgaatgagacgaagacctacttctggaaagtacagcaccacatggcccccacaaaagacgaattcgattgcaaagcatgggcgtatttttcagacgttgacttggagaaagatgtacattcaggacttattggtcctttgttggtgtgtcacactaacactctcaatccagcccatggcaggcaggtgacagtccaggaattcgctcttttctttaccatctttgatgagaccaagtcctggtacttcacggaaaacatggagcgcaattgcagagccccctgtaacatacagatggaggaccctacctttaaggaaaattatcggttccacgcaatcaacggatacattatggatacactccctggccttgtgatggctcaggaccaacgaatcaggtggtacctcctcagcatgggttctaatgagaacatacactccattcacttttcaggacatgtgttcactgtccggaagaaagaagagtataagatggccctctacaatttgtatccaggcgtgtttgagaccgttgaaatgcttccctctaaagctggcatctggagagtagagtgcttgatcggagaacatcttcacgcaggtatgagcaccttgttcctcgtgtacagcaacaaatgtcagaatccacttggcatggccagtggacacattcgcgactttcagatcacagcatctggccagtatggacaatgggccccaaagttggctcgcctccattactccggtagcataaatgcgtggtccactaaagaacctttcagctggattaaggtcgatcttcttgcccccatgatcatccacggcattaagacacagggagcgaggcagaaattctcctccctctacatctcacagttcattattatgtatagtttggacggcaagaagtggcaaacttatagaggtaacagtactggaacagacatggtgttcttcggcaacgttgatagctctggcatcaaacacaacatctttaatcctcccataatagctcggtacatcagattgcatccgacccactacagcattaggagtacactccgaatggagcttatgggttgcgacttgaattcctgttcaatgccactcggaatggagtctaaagccatctctgatgcacagataaccgccagtagctactttacgaacatgtttgctacgtggtcaccctctaaggcaaggcttcatttgcaaggccggtctaatgcctggagacctcaggtgaacaacccgaaagaatggctccaggtggactttcagaagaccatgaaagtaacaggtgtcactactcagggagttaagtccttggatactagcatgtatgtgaaggagttccttatttcctcatcacaagatggccaccagtggaccctcttctttcagaatggtaaggtcaaagtgtttcagggcaatcaagacagcttcacacccgtggtgaacagtcttgatcctccactcttgacacgataccttcgaatccatccacagtcttgggagcaccagattgcattgcgcatggaagtacttggatgcgaggctcaggacctctac

SEQ ID NO: 1372 - protein, 1457 aa, synthetic construct
  REGION 1..1457: note = Variant of human B-domain deleted Factor VIII
MQIELSTCFFLCLLRFCFSATRRYYLGAVELSWDYMQSDLGELPVDARFPPRVPKSFPFNTSQVYKKTLFVEFTDHLFNIAKPRPPWMGLLGPTIQAEVYDTVVITLKNMASHPVSLHAVGVSYWKASEGAEYDDQTSQREKEDDKVFPGGSHTYVWQVLKENGPMASDPPCLTYSYLSHVDLVKDLNSGLIGALLVCREGSLAKEKTQTLHKFILLFAVFDEGKSWHSETKNSLMQDRDAASARAWPKMHTVNGYVNRTLPGLIGCHRKSVYWHVIGMGTTPEVHSIFLEGHTFLVRNHRQASLGISPITFLTAQTLLMDLGQFLLFCHIPSHQHDGMEAYVKVDSCPEEPQLRMKNNEEAEDYDDDLTDSEMDVVRFDDDNSPSIIQARSGAKKHPKTWVHYIAAEEEDWDYAPLVLAPDDRSYKSQYLNNGPQRIGRKYKKVRFMAYTDETFKTREAIQHESGILGPLLYGEVGDTLLIIFKNQASRPYNIYPHGITDVRPLYSRRLPKGVKHLKDFPILPGEIFKYKWTVTVEDGPTKSDPRCLTRYYSSFVNMERDLASGLIGPLLICYKESVDQRGNQIMSDKRNVILFSVFDENRSWYLTENIQRFLPNPAGVQLEDPEFQASNIMHSINGYVFDSLQLSVCLHEVAYWYILSIGAQTDFLSVFFSGYTFKHKMVYEDTLTLFPFSGETVFMSMENPGLWILGCHNSDFRNRGMTALLKVSSCDWNTGDYYEDSYEDISAYFDSKNNAIEPRSFSQNPPVLKRHQREGTRTTLQSDQEEIDYDDTISVEMKKEDFDIYDEDENQSPRSFQKKTRHYFIAAVERLWDYGMSSSPHVLRNRAQSGSVPQFKKVVFQEFTDGSFTQPLYRGELNEHLGLLGPYIRAEVEDNIMVTFRNQASRPYSFYSSLIIYEEDQRQGAEPRKNFVKPNETKTYFWKVQHHMAPTKDEFDCKAWAYFSDVDLEKDVHSGLIGPLLVCHTNTLNPAHGRQVTVQEFALFFTIFDETKSWYFTENMERNCRAPCNIQMEDPTFKENYRFHAINGYIMDTLPGLVMAQDQRIRWYLLSMGSNENIHSIHFSGHVFTVRKKEEYKMALYNLYPGVFETVEMLPSKAGIWRVECLIGEHLHAGMSTLFLVYSNKCQNPLGMASGHIRDFQITASGQYGQWAPKLARLHYSGSINAWSTKEPFSWIKVDLLAPMIIHGIKTQGARQKFSSLYISQFIIMYSLDGKKWQTYRGNSTGTDMVFFGNVDSSGIKHNIFNPPIIARYIRLHPTHYSIRSTLRMELMGCDLNSCSMPLGMESKAISDAQITASSYFTNMFATWSPSKARLHLQGRSNAWRPQVNNPKEWLQVDFQKTMKVTGVTTQGVKSLDTSMYVKEFLISSSQDGHQWTLFFQNGKVKVFQGNQDSFTPVVNSLDPPLLTRYLRIHPQSWEHQIALRMEVLGCEAQDLY

SEQ ID NO: 1373 - DNA, 4371 bp, synthetic construct
  misc_feature 1..4371: note = Variant of human B-domain deleted Factor VIII
  source 1..4371: mol_type = other DNA
atgcagattgaactgtctacctgcttcttcctctgtttgctgaggttctgctttagcgccactagacggtactaccttggcgctgtggagctgtcctgggactatatgcagagtgatttgggagagcttcccgtcgacgcacgatttcctcctcgcgttccaaagtcatttccctttaacacaagccaggtgtacaagaagacgctcttcgtcgaattcaccgatcacctgttcaatatcgccaaacccagaccaccatggatgggtcttttggggcctaccatacaagcggaggtgtatgacacagttgttatcactctcaagaacatggcttctcatccggtaagtcttcacgcagtgggcgtgtcctactggaaagcttcagaaggagccgagtatgatgatcagacatcccagagggagaaagaagacgacaaggtatttccaggtgggtctcatacctatgtgtggcaagtgctcaaagagaatggccctatggcaagcgatccgccgtgtttgacttacagctacctttcacacgttgacctcgtcaaggacctcaactccgggttgattggagccttgttggtatgcagggaaggatctcttgccaaagagaagacacagaccctccacaagtttatccttctctttgctgtgttcgatgagggcaaaagttggcatagcgaaacgaagaattccctcatgcaggatcgcgacgcagccagcgccagagcttggcccaagatgcacactgtgaacggatatgtcaataggacgcttcctggcttgattgggtgtcatcggaaaagtgtctactggcacgtgatcggaatggggacaacaccagaggtccactccatatttctcgaaggccataccttccttgttcgaaaccacagacaggcatccttggggatctctcccattacctttctcactgcccaaacgctccttatggacttgggtcagttccttctcttttgccatatcccgtcacaccagcatgatggtatggaagcttatgtgaaagtcgacagttgtcctgaggagccacagttgcgcatgaagaataatgaagaagccgaggattacgacgacgatctcaccgattctgagatggacgtggtgaggtttgatgacgacaactctccctccatcattcaagctcggagcggggcgaagaaacaccccaagacttgggtccactatatagcggcggaagaggaggattgggattacgctcctcttgtattggcaccagatgaccgctcatacaaaagccagtacctcaacaacggaccgcagagaattggccggaagtataagaaagtgcgatttatggcctatacagacgaaacctttaagacaagggaggccatccagcatgagagtgggattttgggacctcttctttacggcgaagttggtgataccctcctcatcatcttcaagaatcaagcttctcgcccctataacatttacccacacgggatcactgacgttaggcctttgtatagcagaagacttcccaaaggcgtgaagcatctcaaagacttccccattttgccaggcgagatctttaagtacaaatggaccgtcacagtggaagatggaccgactaaatcagaccctcgatgccttacgcggtactattcctccttcgtgaatatggagagagatttggcaagcggactcataggaccactcctcatctgttacaaggaatctgtagaccagaggggtaaccagattatgagtgataaacgcaatgtgatcctttttagcgtcttcgacgagaaccggtcctggtacttgaccgagaatatacaaaggttccttcccaaccccgcaggcgttcagttggaagaccctgagtttcaggccagcaatattatgcactcaatcaacggctatgtgtttgatagtctccagctttctgtttgcctccatgaagtagcctattggtacatcttgtcaattggtgctcaaacagacttcctctccgtcttcttctccggctacacctttaagcacaagatggtgtatgaggacactctcacactctttccattttctggagaaaccgtgttcatgagcatggagaatccaggcctttggatcttgggttgccacaacagtgattttcgcaatcggggaatgactgctctcctcaaagtcagcagctgtgattggaacacaggcgactattacgaagattcttacgaggacataagtgcctactttgactccaagaataacgccattgagcccagatcattctcccagaatcctcccgtgcttaaaaggcatcagcgcgaaggtaccagaactactcttcagtctgatcaagaggagattgactatgacgacaccattagcgtggaaatgaagaaggaggatttcgatatcggggacgaagatgagaaccagtctccgcggagctttcagaagaagacgcgacactacttcattgcagcagtcgaaaggctttgggactacggtatgtcatcatcccctcatgtgttgcgcaatagagctcagagtggaagtgttccacagttcaagaaagtcgtctttcaagagtttacagatggcagcttcacacagcctctctatcggggcgagcttaacgaacatttgggactccttggtccctatatccgagccgaagtggaggacaacattatggttacctttaggaatcaagcctctcgcccctacagcttctactcctccctcatcagttatgaggaggatcagagacaaggcgctgaaccacggaagaactttgtgaaaccgaatgagacgaagacctacttctggaaagtacagcaccacatggcccccacaaaagacgaattcgattgcaaagcatgggcgtatttttcagacgttgacttggagaaagatgtacattcaggacttattggtcctttgttggtgtgtcacactaacactctcaatccagcccatggcaggcaggtgacagtccaggaattcgctcttttctttaccatctttgatgagaccaagtcctggtacttcacggaaaacatggagcgcaattgcagagccccctgtaacatacagatggaggaccctacctttaaggaaaattatcggttccacgcaatcaacggatacattatggatacactccctggccttgtgatggctcaggaccaacgaatcaggtggtacctcctcagcatgggttctaatgagaacatacactccattcacttttcaggacatgtgttcactgtccggaagaaagaagagtataagatggccctctacaatttgtatccaggcgtgtttgagaccgttgaaatgcttccctctaaagctggcatctggagagtagagtgcttgatcggagaacatcttcacgcaggtatgagcaccttgttcctcgtgtacagcaacaaatgtcagaatccacttggcatggccagtggacacattcgcgactttcagatcacagcatctggccagtatggacaatgggccccaaagttggctcgcctccattactccggtagcataaatgcgtggtccactaaagaacctttcagctggattaaggtcgatcttcttgcccccatgatcatccacggcattaagacacagggagcgaggcagaaattctcctccctctacatctcacagttcattattatgtatagtttggacggcaagaagtggcaaacttatagaggtaacagtactggaacagacatggtgttcttcggcaacgttgatagctctggcatcaaacacaacatctttaatcctcccataatagctcggtacatcagattgcatccgacccactacagcattaggagtacactccgaatggagcttatgggttgcgacttgaattcctgttcaatgccactcggaatggagtctaaagccatctctgatgcacagataaccgccagtagctactttacgaacatgtttgctacgtggtcaccctctaaggcaaggcttcatttgcaaggccggtctaatgcctggagacctcaggtgaacaacccgaaagaatggctccaggtggactttcagaagaccatgaaagtaacaggtgtcactactcagggagttaagtccttggatactagcatgtatgtgaaggagttccttatttcctcatcacaagatggccaccagtggaccctcttctttcagaatggtaaggtcaaagtgtttcagggcaatcaagacagcttcacacccgtggtgaacagtcttgatcctccactcttgacacgataccttcgaatccatccacagtcttgggagcaccagattgcattgcgcatggaagtacttggatgcgaggctcaggacctctac

SEQ ID NO: 1374 - protein, 1457 aa, synthetic construct
  REGION 1..1457: note = Variant of human B-domain deleted Factor VIII
MQIELSTCFFLCLLRFCFSATRRYYLGAVELSWDYMQSDLGELPVDARFPPRVPKSFPFNTSQVYKKTLFVEFTDHLFNIAKPRPPWMGLLGPTIQAEVYDTVVITLKNMASHPVSLHAVGVSYWKASEGAEYDDQTSQREKEDDKVFPGGSHTYVWQVLKENGPMASDPPCLTYSYLSHVDLVKDLNSGLIGALLVCREGSLAKEKTQTLHKFILLFAVFDEGKSWHSETKNSLMQDRDAASARAWPKMHTVNGYVNRTLPGLIGCHRKSVYWHVIGMGTTPEVHSIFLEGHTFLVRNHRQASLGISPITFLTAQTLLMDLGQFLLFCHIPSHQHDGMEAYVKVDSCPEEPQLRMKNNEEAEDYDDDLTDSEMDVVRFDDDNSPSIIQARSGAKKHPKTWVHYIAAEEEDWDYAPLVLAPDDRSYKSQYLNNGPQRIGRKYKKVRFMAYTDETFKTREAIQHESGILGPLLYGEVGDTLLIIFKNQASRPYNIYPHGITDVRPLYSRRLPKGVKHLKDFPILPGEIFKYKWTVTVEDGPTKSDPRCLTRYYSSFVNMERDLASGLIGPLLICYKESVDQRGNQIMSDKRNVILFSVFDENRSWYLTENIQRFLPNPAGVQLEDPEFQASNIMHSINGYVFDSLQLSVCLHEVAYWYILSIGAQTDFLSVFFSGYTFKHKMVYEDTLTLFPFSGETVFMSMENPGLWILGCHNSDFRNRGMTALLKVSSCDWNTGDYYEDSYEDISAYFDSKNNAIEPRSFSQNPPVLKRHQREGTRTTLQSDQEEIDYDDTISVEMKKEDFDIGDEDENQSPRSFQKKTRHYFIAAVERLWDYGMSSSPHVLRNRAQSGSVPQFKKVVFQEFTDGSFTQPLYRGELNEHLGLLGPYIRAEVEDNIMVTFRNQASRPYSFYSSLISYEEDQRQGAEPRKNFVKPNETKTYFWKVQHHMAPTKDEFDCKAWAYFSDVDLEKDVHSGLIGPLLVCHTNTLNPAHGRQVTVQEFALFFTIFDETKSWYFTENMERNCRAPCNIQMEDPTFKENYRFHAINGYIMDTLPGLVMAQDQRIRWYLLSMGSNENIHSIHFSGHVFTVRKKEEYKMALYNLYPGVFETVEMLPSKAGIWRVECLIGEHLHAGMSTLFLVYSNKCQNPLGMASGHIRDFQITASGQYGQWAPKLARLHYSGSINAWSTKEPFSWIKVDLLAPMIIHGIKTQGARQKFSSLYISQFIIMYSLDGKKWQTYRGNSTGTDMVFFGNVDSSGIKHNIFNPPIIARYIRLHPTHYSIRSTLRMELMGCDLNSCSMPLGMESKAISDAQITASSYFTNMFATWSPSKARLHLQGRSNAWRPQVNNPKEWLQVDFQKTMKVTGVTTQGVKSLDTSMYVKEFLISSSQDGHQWTLFFQNGKVKVFQGNQDSFTPVVNSLDPPLLTRYLRIHPQSWEHQIALRMEVLGCEAQDLY

SEQ ID NO: 1375 - DNA, 4371 bp, synthetic construct
  misc_feature 1..4371: note = Variant of human B-domain deleted Factor VIII
  source 1..4371: mol_type = other DNA
atgcagattgaactgtctacctgcttcttcctctgtttgctgaggttctgctttagcgccactagacggtactaccttggcgctgtggagctgtcctgggactatatgcagagtgatttgggagagcttcccgtcgacgcacgatttcctcctcgcgttccaaagtcatttccctttaacacaagccaggtgtacaagaagacgctcttcgtcgaattcaccgatcacctgttcaatatcgccaaacccagaccaccatggatgggtcttttggggcctaccatacaagcggaggtgtatgacacagttgttatcactctcaagaacatggcttctcatccggtaagtcttcacgcagtgggcgtgtcctactggaaagcttcagaaggagccgagtatgatgatcagacatcccagagggagaaagaagacgacaaggtatttccaggtgggtctcatacctatgtgtggcaagtgctcaaagagaatggccctatggcaagcgatccgccgtgtttgacttacagctacctttcacacgttgacctcgtcaaggacctcaactccgggttgattggagccttgttggtatgcagggaaggatctcttgccaaagagaagacacagaccctccacaagtttatccttctctttgctgtgttcgatgagggcaaaagttggcatagcgaaacgaagaattccctcatgcaggatcgcgacgcagccagcgccagagcttggcccaagatgcacactgtgaacggatatgtcaataggacgcttcctggcttgattgggtgtcatcggaaaagtgtctactggcacgtgatcggaatggggacaacaccagaggtccactccatatttctcgaaggccataccttccttgttcgaaaccacagacaggcatccttggggatctctcccattacctttctcactgcccaaacgctccttatggacttgggtcagttccttctcttttgccatatcccgtcacaccagcatgatggtatggaagcttatgtgaaagtcgacagttgtcctgaggagccacagttgcgcatgaagaataatgaagaagccgaggattacgacgacgatctcaccgattctgagatggacgtggtgaggtttgatgacgacaactctccctccatcattcaagctcggagcggggcgaagaaacaccccaagacttgggtccactatatagcggcggaagaggaggattgggattacgctcctcttgtattggcaccagatgaccgctcatacaaaagccagtacctcaacaacggaccgcagagaattggccggaagtataagaaagtgcgatttatggcctatacagacgaaacctttaagacaagggaggccatccagcatgagagtgggattttgggacctcttctttacggcgaagttggtgataccctcctcatcatcttcaagaatcaagcttctcgcccctataacatttacccacacgggatcactgacgttaggcctttgtatagcagaagacttcccaaaggcgtgaagcatctcaaagacttccccattttgccaggcgagatctttaagtacaaatggaccgtcacagtggaagatggaccgactaaatcagaccctcgatgccttacgcggtactattcctccttcgtgaatatggagagagatttggcaagcggactcataggaccactcctcatctgttacaaggaatctgtagaccagaggggtaaccagattatgagtgataaacgcaatgtgatcctttttagcgtcttcgacgagaaccggtcctggtacttgaccgagaatatacaaaggttccttcccaaccccgcaggcgttcagttggaagaccctgagtttcaggccagcaatattatgcactcaatcaacggctatgtgtttgatagtctccagctttctgtttgcctccatgaagtagcctattggtacatcttgtcaattggtgctcaaacagacttcctctccgtcttcttctccggctacacctttaagcacaagatggtgtatgaggacactctcacactctttccattttctggagaaaccgtgttcatgagcatggagaatccaggcctttggatcttgggttgccacaacagtgattttcgcaatcggggaatgactgctctcctcaaagtcagcagctgtgattggaacacaggcgacttttacgaagattcttacgaggacataagtgcctactttgactccaagaataacgccattgagcccagatcattctcccagaatcctcccgtgcttaaaaggcatcagcgcgaaggtaccagaactactcttcagtctgatcaagaggagattgactatgacgacaccattagcgtggaaatgaagaaggaggatttcgatatctatgacgaagatgagaaccagtctccgcggagctttcagaagaagacgcgacactacttcattgcagcagtcgaaaggctttgggactacggtatgtcatcatcccctcatgtgttgcgcaatagagctcagagtggaagtgttccacagttcaagaaagtcgtctttcaagagtttacagatggcagcttcacacagcctctctatcggggcgagcttaacgaacatttgggactccttggtccctatatccgagccgaagtggaggacaacattatggttacctttaggaatcaagcctctcgcccctacagcttctactcctccctcatcagttatgaggaggatcagagacaaggcgctgaaccacggaagaactttgtgaaaccgaatgagacgaagacctacttctggaaagtacagcaccacatggcccccacaaaagacgaattcgattgcaaagcatgggcgtatttttcagacgttgacttggagaaagatgtacattcaggacttattggtcctttgttggtgtgtcacactaacactctcaatccagcccatggcaggcaggtgacagtccaggaattcgctcttttctttaccatctttgatgagaccaagtcctggtacttcacggaaaacatggagcgcaattgcagagccccctgtaacatacagatggaggaccctacctttaaggaaaattatcggttccacgcaatcaacggatacattatggatacactccctggccttgtgatggctcaggaccaacgaatcaggtggtacctcctcagcatgggttctaatgagaacatacactccattcacttttcaggacatgtgttcactgtccggaagaaagaagagtataagatggccctctacaatttgtatccaggcgtgtttgagaccgttgaaatgcttccctctaaagctggcatctggagagtagagtgcttgatcggagaacatcttcacgcaggtatgagcaccttgttcctcgtgtacagcaacaaatgtcagaatccacttggcatggccagtggacacattcgcgactttcagatcacagcatctggccagtatggacaatgggccccaaagttggctcgcctccattactccggtagcataaatgcgtggtccactaaagaacctttcagctggattaaggtcgatcttcttgcccccatgatcatccacggcattaagacacagggagcgaggcagaaattctcctccctctacatctcacagttcattattatgtatagtttggacggcaagaagtggcaaacttatagaggtaacagtactggaacagacatggtgttcttcggcaacgttgatagctctggcatcaaacacaacatctttaatcctcccataatagctcggtacatcagattgcatccgacccactacagcattaggagtacactccgaatggagcttatgggttgcgacttgaattcctgttcaatgccactcggaatggagtctaaagccatctctgatgcacagataaccgccagtagctactttacgaacatgtttgctacgtggtcaccctctaaggcaaggcttcatttgcaaggccggtctaatgcctggagacctcaggtgaacaacccgaaagaatggctccaggtggactttcagaagaccatgaaagtaacaggtgtcactactcagggagttaagtccttggatactagcatgtatgtgaaggagttccttatttcctcatcacaagatggccaccagtggaccctcttctttcagaatggtaaggtcaaagtgtttcagggcaatcaagacagcttcacacccgtggtgaacagtcttgatcctccactcttgacacgataccttcgaatccatccacagtcttgggagcaccagattgcattgcgcatggaagtacttggatgcgaggctcaggacctctac

SEQ ID NO: 1376 - protein, 1457 aa, synthetic construct
  REGION 1..1457: note = Variant of human B-domain deleted Factor VIII
MQIELSTCFFLCLLRFCFSATRRYYLGAVELSWDYMQSDLGELPVDARFPPRVPKSFPFNTSQVYKKTLFVEFTDHLFNIAKPRPPWMGLLGPTIQAEVYDTVVITLKNMASHPVSLHAVGVSYWKASEGAEYDDQTSQREKEDDKVFPGGSHTYVWQVLKENGPMASDPPCLTYSYLSHVDLVKDLNSGLIGALLVCREGSLAKEKTQTLHKFILLFAVFDEGKSWHSETKNSLMQDRDAASARAWPKMHTVNGYVNRTLPGLIGCHRKSVYWHVIGMGTTPEVHSIFLEGHTFLVRNHRQASLGISPITFLTAQTLLMDLGQFLLFCHIPSHQHDGMEAYVKVDSCPEEPQLRMKNNEEAEDYDDDLTDSEMDVVRFDDDNSPSIIQARSGAKKHPKTWVHYIAAEEEDWDYAPLVLAPDDRSYKSQYLNNGPQRIGRKYKKVRFMAYTDETFKTREAIQHESGILGPLLYGEVGDTLLIIFKNQASRPYNIYPHGITDVRPLYSRRLPKGVKHLKDFPILPGEIFKYKWTVTVEDGPTKSDPRCLTRYYSSFVNMERDLASGLIGPLLICYKESVDQRGNQIMSDKRNVILFSVFDENRSWYLTENIQRFLPNPAGVQLEDPEFQASNIMHSINGYVFDSLQLSVCLHEVAYWYILSIGAQTDFLSVFFSGYTFKHKMVYEDTLTLFPFSGETVFMSMENPGLWILGCHNSDFRNRGMTALLKVSSCDWNTGDFYEDSYEDISAYFDSKNNAIEPRSFSQNPPVLKRHQREGTRTTLQSDQEEIDYDDTISVEMKKEDFDIYDEDENQSPRSFQKKTRHYFIAAVERLWDYGMSSSPHVLRNRAQSGSVPQFKKVVFQEFTDGSFTQPLYRGELNEHLGLLGPYIRAEVEDNIMVTFRNQASRPYSFYSSLISYEEDQRQGAEPRKNFVKPNETKTYFWKVQHHMAPTKDEFDCKAWAYFSDVDLEKDVHSGLIGPLLVCHTNTLNPAHGRQVTVQEFALFFTIFDETKSWYFTENMERNCRAPCNIQMEDPTFKENYRFHAINGYIMDTLPGLVMAQDQRIRWYLLSMGSNENIHSIHFSGHVFTVRKKEEYKMALYNLYPGVFETVEMLPSKAGIWRVECLIGEHLHAGMSTLFLVYSNKCQNPLGMASGHIRDFQITASGQYGQWAPKLARLHYSGSINAWSTKEPFSWIKVDLLAPMIIHGIKTQGARQKFSSLYISQFIIMYSLDGKKWQTYRGNSTGTDMVFFGNVDSSGIKHNIFNPPIIARYIRLHPTHYSIRSTLRMELMGCDLNSCSMPLGMESKAISDAQITASSYFTNMFATWSPSKARLHLQGRSNAWRPQVNNPKEWLQVDFQKTMKVTGVTTQGVKSLDTSMYVKEFLISSSQDGHQWTLFFQNGKVKVFQGNQDSFTPVVNSLDPPLLTRYLRIHPQSWEHQIALRMEVLGCEAQDLY

SEQ ID NO: 1377 - DNA, 4371 bp, synthetic construct
  misc_feature 1..4371: note = Variant of human B-domain deleted Factor VIII
  source 1..4371: mol_type = other DNA
atgcagattgaactgtctacctgcttcttcctctgtttgctgaggttctgctttagcgccactagacggtactaccttggcgctgtggagctgtcctgggactatatgcagagtgatttgggagagcttcccgtcgacgcacgatttcctcctcgcgttccaaagtcatttccctttaacacaagccaggtgtacaagaagacgctcttcgtcgaattcaccgatcacctgttcaatatcgccaaacccagaccaccatggatgggtcttttggggcctaccatacaagcggaggtgtatgacacagttgttatcactctcaagaacatggcttctcatccggtaagtcttcacgcagtgggcgtgtcctactggaaagcttcagaaggagccgagtatgatgatcagacatcccagagggagaaagaagacgacaaggtatttccaggtgggtctcatacctatgtgtggcaagtgctcaaagagaatggccctatggcaagcgatccgccgtgtttgacttacagctacctttcacacgttgacctcgtcaaggacctcaactccgggttgattggagccttgttggtatgcagggaaggatctcttgccaaagagaagacacagaccctccacaagtttatccttctctttgctgtgttcgatgagggcaaaagttggcatagcgaaacgaagaattccctcatgcaggatcgcgacgcagccagcgccagagcttggcccaagatgcacactgtgaacggatatgtcaataggacgcttcctggcttgattgggtgtcatcggaaaagtgtctactggcacgtgatcggaatggggacaacaccagaggtccactccatatttctcgaaggccataccttccttgttcgaaaccacagacaggcatccttggggatctctcccattacctttctcactgcccaaacgctccttatggacttgggtcagttccttctcttttgccatatcccgtcacaccagcatgatggtatggaagcttatgtgaaagtcgacagttgtcctgaggagccacagttgcgcatgaagaataatgaagaagccgaggattacgacgacgatctcaccgattctgagatggacgtggtgaggtttgatgacgacaactctccctccatcattcaagctcggagcggggcgaagaaacaccccaagacttgggtccactatatagcggcggaagaggaggattgggattacgctcctcttgtattggcaccagatgaccgctcatacaaaagccagtacctcaacaacggaccgcagagaattggccggaagtataagaaagtgcgatttatggcctatacagacgaaacctttaagacaagggaggccatccagcatgagagtgggattttgggacctcttctttacggcgaagttggtgataccctcctcatcatcttcaagaatcaagcttctcgcccctataacatttacccacacgggatcactgacgttaggcctttgtatagcagaagacttcccaaaggcgtgaagcatctcaaagacttccccattttgccaggcgagatctttaagtacaaatggaccgtcacagtggaagatggaccgactaaatcagaccctcgatgccttacgcggtactattcctccttcgtgaatatggagagagatttggcaagcggactcataggaccactcctcatctgttacaaggaatctgtagaccagaggggtaaccagattatgagtgataaacgcaatgtgatcctttttagcgtcttcgacgagaaccggtcctggtacttgaccgagaatatacaaaggttccttcccaaccccgcaggcgttcagttggaagaccctgagtttcaggccagcaatattatgcactcaatcaacggctatgtgtttgatagtctccagctttctgtttgcctccatgaagtagcctattggtacatcttgtcaattggtgctcaaacagacttcctctccgtcttcttctccggctacacctttaagcacaagatggtgtatgaggacactctcacactctttccattttctggagaaaccgtgttcatgagcatggagaatccaggcctttggatcttgggttgccacaacagtgattttcgcaatcggggaatgactgctctcctcaaagtcagcagctgtgattggaacacaggcgacatgtacgaagattcttacgaggacataagtgcctactttgactccaagaataacgccattgagcccagatcattctcccagaatcctcccgtgcttaaaaggcatcagcgcgaaggtaccagaactactcttcagtctgatcaagaggagattgactatgacgacaccattagcgtggaaatgaagaaggaggatttcgatatctatgacgaagatgagaaccagtctccgcggagctttcagaagaagacgcgacactacttcattgcagcagtcgaaaggctttgggactacggtatgtcatcatcccctcatgtgttgcgcaatagagctcagagtggaagtgttccacagttcaagaaagtcgtctttcaagagtttacagatggcagcttcacacagcctctctatcggggcgagcttaacgaacatttgggactccttggtccctatatccgagccgaagtggaggacaacattatggttacctttaggaatcaagcctctcgcccctacagcttctactcctccctcatcagttatgaggaggatcagagacaaggcgctgaaccacggaagaactttgtgaaaccgaatgagacgaagacctacttctggaaagtacagcaccacatggcccccacaaaagacgaattcgattgcaaagcatgggcgtatttttcagacgttgacttggagaaagatgtacattcaggacttattggtcctttgttggtgtgtcacactaacactctcaatccagcccatggcaggcaggtgacagtccaggaattcgctcttttctttaccatctttgatgagaccaagtcctggtacttcacggaaaacatggagcgcaattgcagagccccctgtaacatacagatggaggaccctacctttaaggaaaattatcggttccacgcaatcaacggatacattatggatacactccctggccttgtgatggctcaggaccaacgaatcaggtggtacctcctcagcatgggttctaatgagaacatacactccattcacttttcaggacatgtgttcactgtccggaagaaagaagagtataagatggccctctacaatttgtatccaggcgtgtttgagaccgttgaaatgcttccctctaaagctggcatctggagagtagagtgcttgatcggagaacatcttcacgcaggtatgagcaccttgttcctcgtgtacagcaacaaatgtcagaatccacttggcatggccagtggacacattcgcgactttcagatcacagcatctggccagtatggacaatgggccccaaagttggctcgcctccattactccggtagcataaatgcgtggtccactaaagaacctttcagctggattaaggtcgatcttcttgcccccatgatcatccacggcattaagacacagggagcgaggcagaaattctcctccctctacatctcacagttcattattatgtatagtttggacggcaagaagtggcaaacttatagaggtaacagtactggaacagacatggtgttcttcggcaacgttgatagctctggcatcaaacacaacatctttaatcctcccataatagctcggtacatcagattgcatccgacccactacagcattaggagtacactccgaatggagcttatgggttgcgacttgaattcctgttcaatgccactcggaatggagtctaaagccatctctgatgcacagataaccgccagtagctactttacgaacatgtttgctacgtggtcaccctctaaggcaaggcttcatttgcaaggccggtctaatgcctggagacctcaggtgaacaacccgaaagaatggctccaggtggactttcagaagaccatgaaagtaacaggtgtcactactcagggagttaagtccttggatactagcatgtatgtgaaggagttccttatttcctcatcacaagatggccaccagtggaccctcttctttcagaatggtaaggtcaaagtgtttcagggcaatcaagacagcttcacacccgtggtgaacagtcttgatcctccactcttgacacgataccttcgaatccatccacagtcttgggagcaccagattgcattgcgcatggaagtacttggatgcgaggctcaggacctctac

SEQ ID NO: 1378 - protein, 1457 aa, synthetic construct
  REGION 1..1457: note = Variant of human B-domain deleted Factor VIII
MQIELSTCFFLCLLRFCFSATRRYYLGAVELSWDYMQSDLGELPVDARFPPRVPKSFPFNTSQVYKKTLFVEFTDHLFNIAKPRPPWMGLLGPTIQAEVYDTVVITLKNMASHPVSLHAVGVSYWKASEGAEYDDQTSQREKEDDKVFPGGSHTYVWQVLKENGPMASDPPCLTYSYLSHVDLVKDLNSGLIGALLVCREGSLAKEKTQTLHKFILLFAVFDEGKSWHSETKNSLMQDRDAASARAWPKMHTVNGYVNRTLPGLIGCHRKSVYWHVIGMGTTPEVHSIFLEGHTFLVRNHRQASLGISPITFLTAQTLLMDLGQFLLFCHIPSHQHDGMEAYVKVDSCPEEPQLRMKNNEEAEDYDDDLTDSEMDVVRFDDDNSPSIIQARSGAKKHPKTWVHYIAAEEEDWDYAPLVLAPDDRSYKSQYLNNGPQRIGRKYKKVRFMAYTDETFKTREAIQHESGILGPLLYGEVGDTLLIIFKNQASRPYNIYPHGITDVRPLYSRRLPKGVKHLKDFPILPGEIFKYKWTVTVEDGPTKSDPRCLTRYYSSFVNMERDLASGLIGPLLICYKESVDQRGNQIMSDKRNVILFSVFDENRSWYLTENIQRFLPNPAGVQLEDPEFQASNIMHSINGYVFDSLQLSVCLHEVAYWYILSIGAQTDFLSVFFSGYTFKHKMVYEDTLTLFPFSGETVFMSMENPGLWILGCHNSDFRNRGMTALLKVSSCDWNTGDMYEDSYEDISAYFDSKNNAIEPRSFSQNPPVLKRHQREGTRTTLQSDQEEIDYDDTISVEMKKEDFDIYDEDENQSPRSFQKKTRHYFIAAVERLWDYGMSSSPHVLRNRAQSGSVPQFKKVVFQEFTDGSFTQPLYRGELNEHLGLLGPYIRAEVEDNIMVTFRNQASRPYSFYSSLISYEEDQRQGAEPRKNFVKPNETKTYFWKVQHHMAPTKDEFDCKAWAYFSDVDLEKDVHSGLIGPLLVCHTNTLNPAHGRQVTVQEFALFFTIFDETKSWYFTENMERNCRAPCNIQMEDPTFKENYRFHAINGYIMDTLPGLVMAQDQRIRWYLLSMGSNENIHSIHFSGHVFTVRKKEEYKMALYNLYPGVFETVEMLPSKAGIWRVECLIGEHLHAGMSTLFLVYSNKCQNPLGMASGHIRDFQITASGQYGQWAPKLARLHYSGSINAWSTKEPFSWIKVDLLAPMIIHGIKTQGARQKFSSLYISQFIIMYSLDGKKWQTYRGNSTGTDMVFFGNVDSSGIKHNIFNPPIIARYIRLHPTHYSIRSTLRMELMGCDLNSCSMPLGMESKAISDAQITASSYFTNMFATWSPSKARLHLQGRSNAWRPQVNNPKEWLQVDFQKTMKVTGVTTQGVKSLDTSMYVKEFLISSSQDGHQWTLFFQNGKVKVFQGNQDSFTPVVNSLDPPLLTRYLRIHPQSWEHQIALRMEVLGCEAQDLY

SEQ ID NO: 1379 - DNA, 4371 bp, synthetic construct
  misc_feature 1..4371: note = Variant of human B-domain deleted Factor VIII
  source 1..4371: mol_type = other DNA
atgcagattgaactgtctacctgcttcttcctctgtttgctgaggttctgctttagcgccactagacggtactaccttggcgctgtggagctgtcctgggactatatgcagagtgatttgggagagcttcccgtcgacgcacgatttcctcctcgcgttccaaagtcatttccctttaacacaagccaggtgtacaagaagacgctcttcgtcgaattcaccgatcacctgttcaatatcgccaaacccagaccaccatggatgggtcttttggggcctaccatacaagcggaggtgtatgacacagttgttatcactctcaagaacatggcttctcatccggtaagtcttcacgcagtgggcgtgtcctactggaaagcttcagaaggagccgagtatgatgatcagacatcccagagggagaaagaagacgacaaggtatttccaggtgggtctcatacctatgtgtggcaagtgctcaaagagaatggccctatggcaagcgatccgccgtgtttgacttacagctacctttcacacgttgacctcgtcaaggacctcaactccgggttgattggagccttgttggtatgcagggaaggatctcttgccaaagagaagacacagaccctccacaagtttatccttctctttgctgtgttcgatgagggcaaaagttggcatagcgaaacgaagaattccctcatgcaggatcgcgacgcagccagcgccagagcttggcccaagatgcacactgtgaacggatatgtcaataggacgcttcctggcttgattgggtgtcatcggaaaagtgtctactggcacgtgatcggaatggggacaacaccagaggtccactccatatttctcgaaggccataccttccttgttcgaaaccacagacaggcatccttggggatctctcccattacctttctcactgcccaaacgctccttatggacttgggtcagttccttctcttttgccatatcccgtcacaccagcatgatggtatggaagcttatgtgaaagtcgacagttgtcctgaggagccacagttgcgcatgaagaataatgaagaagccgaggattacgacgacgatctcaccgattctgagatggacgtggtgaggtttgatgacgacaactctccctccatcattcaagctcggagcggggcgaagaaacaccccaagacttgggtccactatatagcggcggaagaggaggattgggattacgctcctcttgtattggcaccagatgaccgctcatacaaaagccagtacctcaacaacggaccgcagagaattggccggaagtataagaaagtgcgatttatggcctatacagacgaaacctttaagacaagggaggccatccagcatgagagtgggattttgggacctcttctttacggcgaagttggtgataccctcctcatcatcttcaagaatcaagcttctcgcccctataacatttacccacacgggatcactgacgttaggcctttgtatagcagaagacttcccaaaggcgtgaagcatctcaaagacttccccattttgccaggcgagatctttaagtacaaatggaccgtcacagtggaagatggaccgactaaatcagaccctcgatgccttacgcggtactattcctccttcgtgaatatggagagagatttggcaagcggactcataggaccactcctcatctgttacaaggaatctgtagaccagaggggtaaccagattatgagtgataaacgcaatgtgatcctttttagcgtcttcgacgagaaccggtcctggtacttgaccgagaatatacaaaggttccttcccaaccccgcaggcgttcagttggaagaccctgagtttcaggccagcaatattatgcactcaatcaacggctatgtgtttgatagtctccagctttctgtttgcctccatgaagtagcctattggtacatcttgtcaattggtgctcaaacagacttcctctccgtcttcttctccggctacacctttaagcacaagatggtgtatgaggacactctcacactctttccattttctggagaaaccgtgttcatgagcatggagaatccaggcctttggatcttgggttgccacaacagtgattttcgcaatcggggaatgactgctctcctcaaagtcagcagctgtgattggaacacaggcgactattacgaagattcttacgaggacataagtgcctactttgactccaagaataacgccattgagcccagatcattctcccagaatcctcccgtgcttaaaaggcatcagcgcgaaggtaccagaactactcttcagtctgatcaagaggagattgactatgacgacaccattagcgtggaaatgaagccggaggatttcgatatctatgacgaagatgagaaccagtctccgcggagctttcagaagaagacgcgacactacttcattgcagcagtcgaaaggctttgggactacggtatgtcatcatcccctcatgtgttgcgcaatagagctcagagtggaagtgttccacagttcaagaaagtcgtctttcaagagtttacagatggcagcttcacacagcctctctatcggggcgagcttaacgaacatttgggactccttggtccctatatccgagccgaagtggaggacaacattatggttacctttaggaatcaagcctctcgcccctacagcttctactcctccctcatcagttatgaggaggatcagagacaaggcgctgaaccacggaagaactttgtgaaaccgaatgagacgaagacctacttctggaaagtacagcaccacatggcccccacaaaagacgaattcgattgcaaagcatgggcgtatttttcagacgttgacttggagaaagatgtacattcaggacttattggtcctttgttggtgtgtcacactaacactctcaatccagcccatggcaggcaggtgacagtccaggaattcgctcttttctttaccatctttgatgagaccaagtcctggtacttcacggaaaacatggagcgcaattgcagagccccctgtaacatacagatggaggaccctacctttaaggaaaattatcggttccacgcaatcaacggatacattatggatacactccctggccttgtgatggctcaggaccaacgaatcaggtggtacctcctcagcatgggttctaatgagaacatacactccattcacttttcaggacatgtgttcactgtccggaagaaagaagagtataagatggccctctacaatttgtatccaggcgtgtttgagaccgttgaaatgcttccctctaaagctggcatctggagagtagagtgcttgatcggagaacatcttcacgcaggtatgagcaccttgttcctcgtgtacagcaacaaatgtcagaatccacttggcatggccagtggacacattcgcgactttcagatcacagcatctggccagtatggacaatgggccccaaagttggctcgcctccattactccggtagcataaatgcgtggtccactaaagaacctttcagctggattaaggtcgatcttcttgcccccatgatcatccacggcattaagacacagggagcgaggcagaaattctcctccctctacatctcacagttcattattatgtatagtttggacggcaagaagtggcaaacttatagaggtaacagtactggaacagacatggtgttcttcggcaacgttgatagctctggcatcaaacacaacatctttaatcctcccataatagctcggtacatcagattgcatccgacccactacagcattaggagtacactccgaatggagcttatgggttgcgacttgaattcctgttcaatgccactcggaatggagtctaaagccatctctgatgcacagataaccgccagtagctactttacgaacatgtttgctacgtggtcaccctctaaggcaaggcttcatttgcaaggccggtctaatgcctggagacctcaggtgaacaacccgaaagaatggctccaggtggactttcagaagaccatgaaagtaacaggtgtcactactcagggagttaagtccttggatactagcatgtatgtgaaggagttccttatttcctcatcacaagatggccaccagtggaccctcttctttcagaatggtaaggtcaaagtgtttcagggcaatcaagacagcttcacacccgtggtgaacagtcttgatcctccactcttgacacgataccttcgaatccatccacagtcttgggagcaccagattgcattgcgcatggaagtacttggatgcgaggctcaggacctctac

SEQ ID NO: 1380 - protein, 1457 aa, synthetic construct
  REGION 1..1457: note = Variant of human B-domain deleted Factor VIII
MQIELSTCFFLCLLRFCFSATRRYYLGAVELSWDYMQSDLGELPVDARFPPRVPKSFPFNTSQVYKKTLFVEFTDHLFNIAKPRPPWMGLLGPTIQAEVYDTVVITLKNMASHPVSLHAVGVSYWKASEGAEYDDQTSQREKEDDKVFPGGSHTYVWQVLKENGPMASDPPCLTYSYLSHVDLVKDLNSGLIGALLVCREGSLAKEKTQTLHKFILLFAVFDEGKSWHSETKNSLMQDRDAASARAWPKMHTVNGYVNRTLPGLIGCHRKSVYWHVIGMGTTPEVHSIFLEGHTFLVRNHRQASLGISPITFLTAQTLLMDLGQFLLFCHIPSHQHDGMEAYVKVDSCPEEPQLRMKNNEEAEDYDDDLTDSEMDVVRFDDDNSPSIIQARSGAKKHPKTWVHYIAAEEEDWDYAPLVLAPDDRSYKSQYLNNGPQRIGRKYKKVRFMAYTDETFKTREAIQHESGILGPLLYGEVGDTLLIIFKNQASRPYNIYPHGITDVRPLYSRRLPKGVKHLKDFPILPGEIFKYKWTVTVEDGPTKSDPRCLTRYYSSFVNMERDLASGLIGPLLICYKESVDQRGNQIMSDKRNVILFSVFDENRSWYLTENIQRFLPNPAGVQLEDPEFQASNIMHSINGYVFDSLQLSVCLHEVAYWYILSIGAQTDFLSVFFSGYTFKHKMVYEDTLTLFPFSGETVFMSMENPGLWILGCHNSDFRNRGMTALLKVSSCDWNTGDYYEDSYEDISAYFDSKNNAIEPRSFSQNPPVLKRHQREGTRTTLQSDQEEIDYDDTISVEMKPEDFDIYDEDENQSPRSFQKKTRHYFIAAVERLWDYGMSSSPHVLRNRAQSGSVPQFKKVVFQEFTDGSFTQPLYRGELNEHLGLLGPYIRAEVEDNIMVTFRNQASRPYSFYSSLISYEEDQRQGAEPRKNFVKPNETKTYFWKVQHHMAPTKDEFDCKAWAYFSDVDLEKDVHSGLIGPLLVCHTNTLNPAHGRQVTVQEFALFFTIFDETKSWYFTENMERNCRAPCNIQMEDPTFKENYRFHAINGYIMDTLPGLVMAQDQRIRWYLLSMGSNENIHSIHFSGHVFTVRKKEEYKMALYNLYPGVFETVEMLPSKAGIWRVECLIGEHLHAGMSTLFLVYSNKCQNPLGMASGHIRDFQITASGQYGQWAPKLARLHYSGSINAWSTKEPFSWIKVDLLAPMIIHGIKTQGARQKFSSLYISQFIIMYSLDGKKWQTYRGNSTGTDMVFFGNVDSSGIKHNIFNPPIIARYIRLHPTHYSIRSTLRMELMGCDLNSCSMPLGMESKAISDAQITASSYFTNMFATWSPSKARLHLQGRSNAWRPQVNNPKEWLQVDFQKTMKVTGVTTQGVKSLDTSMYVKEFLISSSQDGHQWTLFFQNGKVKVFQGNQDSFTPVVNSLDPPLLTRYLRIHPQSWEHQIALRMEVLGCEAQDLY

SEQ ID NO: 1381 - DNA, 4371 bp, synthetic construct
  misc_feature 1..4371: note = Variant of human B-domain deleted Factor VIII
  source 1..4371: mol_type = other DNA
atgcagattgaactgtctacctgcttcttcctctgtttgctgaggttctgctttagcgccactagacggtactaccttggcgctgtggagctgtcctgggactatatgcagagtgatttgggagagcttcccgtcgacgcacgatttcctcctcgcgttccaaagtcatttccctttaacacaagccaggtgtacaagaagacgctcttcgtcgaattcaccgatcacctgttcaatatcgccaaacccagaccaccatggatgggtcttttggggcctaccatacaagcggaggtgtatgacacagttgttatcactctcaagaacatggcttctcatccggtaagtcttcacgcagtgggcgtgtcctactggaaagcttcagaaggagccgagtatgatgatcagacatcccagagggagaaagaagacgacaaggtatttccaggtgggtctcatacctatgtgtggcaagtgctcaaagagaatggccctatggcaagcgatccgccgtgtttgacttacagctacctttcacacgttgacctcgtcaaggacctcaactccgggttgattggagccttgttggtatgcagggaaggatctcttgccaaagagaagacacagaccctccacaagtttatccttctctttgctgtgttcgatgagggcaaaagttggcatagcgaaacgaagaattccctcatgcaggatcgcgacgcagccagcgccagagcttggcccaagatgcacactgtgaacggatatgtcaataggacgcttcctggcttgattgggtgtcatcggaaaagtgtctactggcacgtgatcggaatggggacaacaccagaggtccactccatatttctcgaaggccataccttccttgttcgaaaccacagacaggcatccttggggatctctcccattacctttctcactgcccaaacgctccttatggacttgggtcagttccttctcttttgccatatcccgtcacaccagcatgatggtatggaagcttatgtgaaagtcgacagttgtcctgaggagccacagttgcgcatgaagaataatgaagaagccgaggattacgacgacgatctcaccgattctgagatggacgtggtgaggtttgatgacgacaactctccctccatcattcaagctcggagcggggcgaagaaacaccccaagacttgggtccactatatagcggcggaagaggaggattgggattacgctcctcttgtattggcaccagatgaccgctcatacaaaagccagtacctcaacaacggaccgcagagaattggccggaagtataagaaagtgcgatttatggcctatacagacgaaacctttaagacaagggaggccatccagcatgagagtgggattttgggacctcttctttacggcgaagttggtgataccctcctcatcatcttcaagaatcaagcttctcgcccctataacatttacccacacgggatcactgacgttaggcctttgtatagcagaagacttcccaaaggcgtgaagcatctcaaagacttccccattttgccaggcgagatctttaagtacaaatggaccgtcacagtggaagatggaccgactaaatcagaccctcgatgccttacgcggtactattcctccttcgtgaatatggagagagatttggcaagcggactcataggaccactcctcatctgttacaaggaatctgtagaccagaggggtaaccagattatgagtgataaacgcaatgtgatcctttttagcgtcttcgacgagaaccggtcctggtacttgaccgagaatatacaaaggttccttcccaaccccgcaggcgttcagttggaagaccctgagtttcaggccagcaatattatgcactcaatcaacggctatgtgtttgatagtctccagctttctgtttgcctccatgaagtagcctattggtacatcttgtcaattggtgctcaaacagacttcctctccgtcttcttctccggctacacctttaagcacaagatggtgtatgaggacactctcacactctttccattttctggagaaaccgtgttcatgagcatggagaatccaggcctttggatcttgggttgccacaacagtgattttcgcaatcggggaatgactgctctcctcaaagtcagcagctgtgattggaacacaggcgactattacgaagattcttacgaggacataagtgcctactttgactccaagaataacgccattgagcccagatcattctcccagaatcctcccgtgcttaaaaggcatcagcgcgaaggtaccagaactactcttcagtctgatcaagaggagattgactatgacgacaccattagcgtggaaatgaagaaggaggatttcgatatctatgactgtgatgagaaccagtctccgcggagctttcagaagaagacgcgacactacttcattgcagcagtcgaaaggctttgggactacggtatgtcatcatcccctcatgtgttgcgcaatagagctcagagtggaagtgttccacagttcaagaaagtcgtctttcaagagtttacagatggcagcttcacacagcctctctatcggggcgagcttaacgaacatttgggactccttggtccctatatccgagccgaagtggaggacaacattatggttacctttaggaatcaagcctctcgcccctacagcttctactcctccctcatcagttatgaggaggatcagagacaaggcgctgaaccacggaagaactttgtgaaaccgaatgagacgaagacctacttctggaaagtacagcaccacatggcccccacaaaagacgaattcgattgcaaagcatgggcgtatttttcagacgttgacttggagaaagatgtacattcaggacttattggtcctttgttggtgtgtcacactaacactctcaatccagcccatggcaggcaggtgacagtccaggaattcgctcttttctttaccatctttgatgagaccaagtcctggtacttcacggaaaacatggagcgcaattgcagagccccctgtaacatacagatggaggaccctacctttaaggaaaattatcggttccacgcaatcaacggatacattatggatacactccctggccttgtgatggctcaggaccaacgaatcaggtggtacctcctcagcatgggttctaatgagaacatacactccattcacttttcaggacatgtgttcactgtccggaagaaagaagagtataagatggccctctacaatttgtatccaggcgtgtttgagaccgttgaaatgcttccctctaaagctggcatctggagagtagagtgcttgatcggagaacatcttcacgcaggtatgagcaccttgttcctcgtgtacagcaacaaatgtcagaatccacttggcatggccagtggacacattcgcgactttcagatcacagcatctggccagtatggacaatgggccccaaagttggctcgcctccattactccggtagcataaatgcgtggtccactaaagaacctttcagctggattaaggtcgatcttcttgcccccatgatcatccacggcattaagacacagggagcgaggcagaaattctcctccctctacatctcacagttcattattatgtatagtttggacggcaagaagtggcaaacttatagaggtaacagtactggaacagacatggtgttcttcggcaacgttgatagctctggcatcaaacacaacatctttaatcctcccataatagctcggtacatcagattgcatccgacccactacagcattaggagtacactccgaatggagcttatgggttgcgacttgaattcctgttcaatgccactcggaatggagtctaaagccatctctgatgcacagataaccgccagtagctactttacgaacatgtttgctacgtggtcaccctctaaggcaaggcttcatttgcaaggccggtctaatgcctggagacctcaggtgaacaacccgaaagaatggctccaggtggactttcagaagaccatgaaagtaacaggtgtcactactcagggagttaagtccttggatactagcatgtatgtgaaggagttccttatttcctcatcacaagatggccaccagtggaccctcttctttcagaatggtaaggtcaaagtgtttcagggcaatcaagacagcttcacacccgtggtgaacagtcttgatcctccactcttgacacgataccttcgaatccatccacagtcttgggagcaccagattgcattgcgcatggaagtacttggatgcgaggctcaggacctctac

SEQ ID NO: 1382 - protein, 1457 aa, synthetic construct
  REGION 1..1457: note = Variant of human B-domain deleted Factor VIII
MQIELSTCFFLCLLRFCFSATRRYYLGAVELSWDYMQSDLGELPVDARFPPRVPKSFPFNTSQVYKKTLFVEFTDHLFNIAKPRPPWMGLLGPTIQAEVYDTVVITLKNMASHPVSLHAVGVSYWKASEGAEYDDQTSQREKEDDKVFPGGSHTYVWQVLKENGPMASDPPCLTYSYLSHVDLVKDLNSGLIGALLVCREGSLAKEKTQTLHKFILLFAVFDEGKSWHSETKNSLMQDRDAASARAWPKMHTVNGYVNRTLPGLIGCHRKSVYWHVIGMGTTPEVHSIFLEGHTFLVRNHRQASLGISPITFLTAQTLLMDLGQFLLFCHIPSHQHDGMEAYVKVDSCPEEPQLRMKNNEEAEDYDDDLTDSEMDVVRFDDDNSPSIIQARSGAKKHPKTWVHYIAAEEEDWDYAPLVLAPDDRSYKSQYLNNGPQRIGRKYKKVRFMAYTDETFKTREAIQHESGILGPLLYGEVGDTLLIIFKNQASRPYNIYPHGITDVRPLYSRRLPKGVKHLKDFPILPGEIFKYKWTVTVEDGPTKSDPRCLTRYYSSFVNMERDLASGLIGPLLICYKESVDQRGNQIMSDKRNVILFSVFDENRSWYLTENIQRFLPNPAGVQLEDPEFQASNIMHSINGYVFDSLQLSVCLHEVAYWYILSIGAQTDFLSVFFSGYTFKHKMVYEDTLTLFPFSGETVFMSMENPGLWILGCHNSDFRNRGMTALLKVSSCDWNTGDYYEDSYEDISAYFDSKNNAIEPRSFSQNPPVLKRHQREGTRTTLQSDQEEIDYDDTISVEMKKEDFDIYDCDENQSPRSFQKKTRHYFIAAVERLWDYGMSSSPHVLRNRAQSGSVPQFKKVVFQEFTDGSFTQPLYRGELNEHLGLLGPYIRAEVEDNIMVTFRNQASRPYSFYSSLISYEEDQRQGAEPRKNFVKPNETKTYFWKVQHHMAPTKDEFDCKAWAYFSDVDLEKDVHSGLIGPLLVCHTNTLNPAHGRQVTVQEFALFFTIFDETKSWYFTENMERNCRAPCNIQMEDPTFKENYRFHAINGYIMDTLPGLVMAQDQRIRWYLLSMGSNENIHSIHFSGHVFTVRKKEEYKMALYNLYPGVFETVEMLPSKAGIWRVECLIGEHLHAGMSTLFLVYSNKCQNPLGMASGHIRDFQITASGQYGQWAPKLARLHYSGSINAWSTKEPFSWIKVDLLAPMIIHGIKTQGARQKFSSLYISQFIIMYSLDGKKWQTYRGNSTGTDMVFFGNVDSSGIKHNIFNPPIIARYIRLHPTHYSIRSTLRMELMGCDLNSCSMPLGMESKAISDAQITASSYFTNMFATWSPSKARLHLQGRSNAWRPQVNNPKEWLQVDFQKTMKVTGVTTQGVKSLDTSMYVKEFLISSSQDGHQWTLFFQNGKVKVFQGNQDSFTPVVNSLDPPLLTRYLRIHPQSWEHQIALRMEVLGCEAQDLY

SEQ ID NO: 1383 - DNA, 4371 bp, synthetic construct
  misc_feature 1..4371: note = Variant of human B-domain deleted Factor VIII
  source 1..4371: mol_type = other DNA
atgcagattgaactgtctacctgcttcttcctctgtttgctgaggttctgctttagcgccactagacggtactaccttggcgctgtggagctgtcctgggactatatgcagagtgatttgggagagcttcccgtcgacgcacgatttcctcctcgcgttccaaagtcatttccctttaacacaagccaggtgtacaagaagacgctcttcgtcgaattcaccgatcacctgttcaatatcgccaaacccagaccaccatggatgggtcttttggggcctaccatacaagcggaggtgtatgacacagttgttatcactctcaagaacatggcttctcatccggtaagtcttcacgcagtgggcgtgtcctactggaaagcttcagaaggagccgagtatgatgatcagacatcccagagggagaaagaagacgacaaggtatttccaggtgggtctcatacctatgtgtggcaagtgctcaaagagaatggccctatggcaagcgatccgccgtgtttgacttacagctacctttcacacgttgacctcgtcaaggacctcaactccgggttgattggagccttgttggtatgcagggaaggatctcttgccaaagagaagacacagaccctccacaagtttatccttctctttgctgtgttcgatgagggcaaaagttggcatagcgaaacgaagaattccctcatgcaggatcgcgacgcagccagcgccagagcttggcccaagatgcacactgtgaacggatatgtcaataggacgcttcctggcttgattgggtgtcatcggaaaagtgtctactggcacgtgatcggaatggggacaacaccagaggtccactccatatttctcgaaggccataccttccttgttcgaaaccacagacaggcatccttggggatctctcccattacctttctcactgcccaaacgctccttatggacttgggtcagttccttctcttttgccatatcccgtcacaccagcatgatggtatggaagcttatgtgaaagtcgacagttgtcctgaggagccacagttgcgcatgaagaataatgaagaagccgaggattacgacgacgatctcaccgattctgagatggacgtggtgaggtttgatgacgacaactctccctccatcattcaagctcggagcggggcgaagaaacaccccaagacttgggtccactatatagcggcggaagaggaggattgggattacgctcctcttgtattggcaccagatgaccgctcatacaaaagccagtacctcaacaacggaccgcagagaattggccggaagtataagaaagtgcgatttatggcctatacagacgaaacctttaagacaagggaggccatccagcatgagagtgggattttgggacctcttctttacggcgaagttggtgataccctcctcatcatcttcaagaatcaagcttctcgcccctataacatttacccacacgggatcactgacgttaggcctttgtatagcagaagacttcccaaaggcgtgaagcatctcaaagacttccccattttgccaggcgagatctttaagtacaaatggaccgtcacagtggaagatggaccgactaaatcagaccctcgatgccttacgcggtactattcctccttcgtgaatatggagagagatttggcaagcggactcataggaccactcctcatctgttacaaggaatctgtagaccagaggggtaaccagattatgagtgataaacgcaatgtgatcctttttagcgtcttcgacgagaaccggtcctggtacttgaccgagaatatacaaaggttccttcccaaccccgcaggcgttcagttggaagaccctgagtttcaggccagcaatattatgcactcaatcaacggctatgtgtttgatagtctccagctttctgtttgcctccatgaagtagcctattggtacatcttgtcaattggtgctcaaacagacttcctctccgtcttcttctccggctacacctttaagcacaagatggtgtatgaggacactctcacactctttccattttctggagaaaccgtgttcatgagcatggagaatccaggcctttggatcttgggttgccacaacagtgattttcgcaatcggggaatgactgctctcctcaaagtcagcagctgtgattggaacacaggcgactattacgaagattcttacgaggacataagtgcctactttgactccaagaataacgccattgagcccagatcattctcccagaatcctcccgtgcttaaaaggcatcagcgcgaaggtaccagaactactcttcagtctgatcaagaggagattgactatgacgacaccattagcgtggaaatgaagaaggaggatttcgatatctatgacgaagatgagaaccagtctccgcggagctttcagaagaagacgcgacactacttcattgcagcagtcgaaaggctttgggactacggtatgtcatcatcccctcatgtgttgcgcaatagagctcagagtggaagtgttccacagttcaagaaagtcgtctttcaagagtttacagatggcagcttcacacagcctctctatcggggcgagcttaacgaacatttgggactccttggtccctatatccgagccgaagtggaggacaacattatggttacctttaggaatcaagcctctcgcccctacagcttctactcctccctcatcgagtatgaggaggatcagagacaaggcgctgaaccacggaagaactttgtgaaaccgaatgagacgaagacctacttctggaaagtacagcaccacatggcccccacaaaagacgaattcgattgcaaagcatgggcgtatttttcagacgttgacttggagaaagatgtacattcaggacttattggtcctttgttggtgtgtcacactaacactctcaatccagcccatggcaggcaggtgacagtccaggaattcgctcttttctttaccatctttgatgagaccaagtcctggtacttcacggaaaacatggagcgcaattgcagagccccctgtaacatacagatggaggaccctacctttaaggaaaattatcggttccacgcaatcaacggatacattatggatacactccctggccttgtgatggctcaggaccaacgaatcaggtggtacctcctcagcatgggttctaatgagaacatacactccattcacttttcaggacatgtgttcactgtccggaagaaagaagagtataagatggccctctacaatttgtatccaggcgtgtttgagaccgttgaaatgcttccctctaaagctggcatctggagagtagagtgcttgatcggagaacatcttcacgcaggtatgagcaccttgttcctcgtgtacagcaacaaatgtcagaatccacttggcatggccagtggacacattcgcgactttcagatcacagcatctggccagtatggacaatgggccccaaagttggctcgcctccattactccggtagcataaatgcgtggtccactaaagaacctttcagctggattaaggtcgatcttcttgcccccatgatcatccacggcattaagacacagggagcgaggcagaaattctcctccctctacatctcacagttcattattatgtatagtttggacggcaagaagtggcaaacttatagaggtaacagtactggaacagacatggtgttcttcggcaacgttgatagctctggcatcaaacacaacatctttaatcctcccataatagctcggtacatcagattgcatccgacccactacagcattaggagtacactccgaatggagcttatgggttgcgacttgaattcctgttcaatgccactcggaatggagtctaaagccatctctgatgcacagataaccgccagtagctactttacgaacatgtttgctacgtggtcaccctctaaggcaaggcttcatttgcaaggccggtctaatgcctggagacctcaggtgaacaacccgaaagaatggctccaggtggactttcagaagaccatgaaagtaacaggtgtcactactcagggagttaagtccttggatactagcatgtatgtgaaggagttccttatttcctcatcacaagatggccaccagtggaccctcttctttcagaatggtaaggtcaaagtgtttcagggcaatcaagacagcttcacacccgtggtgaacagtcttgatcctccactcttgacacgataccttcgaatccatccacagtcttgggagcaccagattgcattgcgcatggaagtacttggatgcgaggctcaggacctctac

SEQ ID NO: 1384 - protein, 1457 aa, synthetic construct
  REGION 1..1457: note = Variant of human B-domain deleted Factor VIII
MQIELSTCFFLCLLRFCFSATRRYYLGAVELSWDYMQSDLGELPVDARFPPRVPKSFPFNTSQVYKKTLFVEFTDHLFNIAKPRPPWMGLLGPTIQAEVYDTVVITLKNMASHPVSLHAVGVSYWKASEGAEYDDQTSQREKEDDKVFPGGSHTYVWQVLKENGPMASDPPCLTYSYLSHVDLVKDLNSGLIGALLVCREGSLAKEKTQTLHKFILLFAVFDEGKSWHSETKNSLMQDRDAASARAWPKMHTVNGYVNRTLPGLIGCHRKSVYWHVIGMGTTPEVHSIFLEGHTFLVRNHRQASLGISPITFLTAQTLLMDLGQFLLFCHIPSHQHDGMEAYVKVDSCPEEPQLRMKNNEEAEDYDDDLTDSEMDVVRFDDDNSPSIIQARSGAKKHPKTWVHYIAAEEEDWDYAPLVLAPDDRSYKSQYLNNGPQRIGRKYKKVRFMAYTDETFKTREAIQHESGILGPLLYGEVGDTLLIIFKNQASRPYNIYPHGITDVRPLYSRRLPKGVKHLKDFPILPGEIFKYKWTVTVEDGPTKSDPRCLTRYYSSFVNMERDLASGLIGPLLICYKESVDQRGNQIMSDKRNVILFSVFDENRSWYLTENIQRFLPNPAGVQLEDPEFQASNIMHSINGYVFDSLQLSVCLHEVAYWYILSIGAQTDFLSVFFSGYTFKHKMVYEDTLTLFPFSGETVFMSMENPGLWILGCHNSDFRNRGMTALLKVSSCDWNTGDYYEDSYEDISAYFDSKNNAIEPRSFSQNPPVLKRHQREGTRTTLQSDQEEIDYDDTISVEMKKEDFDIYDEDENQSPRSFQKKTRHYFIAAVERLWDYGMSSSPHVLRNRAQSGSVPQFKKVVFQEFTDGSFTQPLYRGELNEHLGLLGPYIRAEVEDNIMVTFRNQASRPYSFYSSLIEYEEDQRQGAEPRKNFVKPNETKTYFWKVQHHMAPTKDEFDCKAWAYFSDVDLEKDVHSGLIGPLLVCHTNTLNPAHGRQVTVQEFALFFTIFDETKSWYFTENMERNCRAPCNIQMEDPTFKENYRFHAINGYIMDTLPGLVMAQDQRIRWYLLSMGSNENIHSIHFSGHVFTVRKKEEYKMALYNLYPGVFETVEMLPSKAGIWRVECLIGEHLHAGMSTLFLVYSNKCQNPLGMASGHIRDFQITASGQYGQWAPKLARLHYSGSINAWSTKEPFSWIKVDLLAPMIIHGIKTQGARQKFSSLYISQFIIMYSLDGKKWQTYRGNSTGTDMVFFGNVDSSGIKHNIFNPPIIARYIRLHPTHYSIRSTLRMELMGCDLNSCSMPLGMESKAISDAQITASSYFTNMFATWSPSKARLHLQGRSNAWRPQVNNPKEWLQVDFQKTMKVTGVTTQGVKSLDTSMYVKEFLISSSQDGHQWTLFFQNGKVKVFQGNQDSFTPVVNSLDPPLLTRYLRIHPQSWEHQIALRMEVLGCEAQDLY

SEQ ID NO: 1385 - DNA, 4371 bp, synthetic construct
  misc_feature 1..4371: note = Variant of human B-domain deleted Factor VIII
  source 1..4371: mol_type = other DNA
atgcagattgaactgtctacctgcttcttcctctgtttgctgaggttctgctttagcgccactagacggtactaccttggcgctgtggagctgtcctgggactatatgcagagtgatttgggagagcttcccgtcgacgcacgatttcctcctcgcgttccaaagtcatttccctttaacacaagccaggtgtacaagaagacgctcttcgtcgaattcaccgatcacctgttcaatatcgccaaacccagaccaccatggatgggtcttttggggcctaccatacaagcggaggtgtatgacacagttgttatcactctcaagaacatggcttctcatccggtaagtcttcacgcagtgggcgtgtcctactggaaagcttcagaaggagccgagtatgatgatcagacatcccagagggagaaagaagacgacaaggtatttccaggtgggtctcatacctatgtgtggcaagtgctcaaagagaatggccctatggcaagcgatccgccgtgtttgacttacagctacctttcacacgttgacctcgtcaaggacctcaactccgggttgattggagccttgttggtatgcagggaaggatctcttgccaaagagaagacacagaccctccacaagtttatccttctctttgctgtgttcgatgagggcaaaagttggcatagcgaaacgaagaattccctcatgcaggatcgcgacgcagccagcgccagagcttggcccaagatgcacactgtgaacggatatgtcaataggacgcttcctggcttgattgggtgtcatcggaaaagtgtctactggcacgtgatcggaatggggacaacaccagaggtccactccatatttctcgaaggccataccttccttgttcgaaaccacagacaggcatccttggggatctctcccattacctttctcactgcccaaacgctccttatggacttgggtcagttccttctcttttgccatatcccgtcacaccagcatgatggtatggaagcttatgtgaaagtcgacagttgtcctgaggagccacagttgcgcatgaagaataatgaagaagccgaggattacgacgacgatctcaccgattctgagatggacgtggtgaggtttgatgacgacaactctccctccatcattcaagctcggagcggggcgaagaaacaccccaagacttgggtccactatatagcggcggaagaggaggattgggattacgctcctcttgtattggcaccagatgaccgctcatacaaaagccagtacctcaacaacggaccgcagagaattggccggaagtataagaaagtgcgatttatggcctatacagacgaaacctttaagacaagggaggccatccagcatgagagtgggattttgggacctcttctttacggcgaagttggtgataccctcctcatcatcttcaagaatcaagcttctcgcccctataacatttacccacacgggatcactgacgttaggcctttgtatagcagaagacttcccaaaggcgtgaagcatctcaaagacttccccattttgccaggcgagatctttaagtacaaatggaccgtcacagtggaagatggaccgactaaatcagaccctcgatgccttacgcggtactattcctccttcgtgaatatggagagagatttggcaagcggactcataggaccactcctcatctgttacaaggaatctgtagaccagaggggtaaccagattatgagtgataaacgcaatgtgatcctttttagcgtcttcgacgagaaccggtcctggtacttgaccgagaatatacaaaggttccttcccaaccccgcaggcgttcagttggaagaccctgagtttcaggccagcaatattatgcactcaatcaacggctatgtgtttgatagtctccagctttctgtttgcctccatgaagtagcctattggtacatcttgtcaattggtgctcaaacagacttcctctccgtcttcttctccggctaccagtttaagcacaagatggtgtatgaggacactctcacactctttccattttctggagaaaccgtgttcatgagcatggagaatccaggcctttggatcttgggttgccacaacagtgattttcgcaatcggggaatgactgctctcctcaaagtcagcagctgtgattggaacacaggcgactattacgaagattcttacgaggacataagtgcctactttgactccaagaataacgccattgagcccagatcattctcccagaatcctcccgtgcttaaaaggcatcagcgcgaaggtaccagaactactcttcagtctgatcaagaggagattgactatgacgacaccattagcgtggaaatgaagaaggaggatttcgatatctatgacgaagatgagaaccagtctccgcggagctttcagaagaagacgcgacactacttcattgcagcagtcgaaaggctttgggactacggtatgtcatcatcccctcatgtgttgcgcaatagagctcagagtggaagtgttccacagttcaagaaagtcgtctttcaagagtttacagatggcagcttcacacagcctctctatcggggcgagcttaacgaacatttgggactccttggtccctatatccgagccgaagtggaggacaacattatggttacctttaggaatcaagcctctcgcccctacagcttctactcctccctcatcagttatgaggaggatcagagacaaggcgctgaaccacggaagaactttgtgaaaccgaatgagacgaagacctacttctggaaagtacagcaccacatggcccccacaaaagacgaattcgattgcaaagcatgggcgtatttttcagacgttgacttggagaaagatgtacattcaggacttattggtcctttgttggtgtgtcacactaacactctcaatccagcccatggcaggcaggtgacagtccaggaattcgctcttttctttaccatctttgatgagaccaagtcctggtacttcacggaaaacatggagcgcaattgcagagccccctgtaacatacagatggaggaccctacctttaaggaaaattatcggttccacgcaatcaacggatacattatggatacactccctggccttgtgatggctcaggaccaacgaatcaggtggtacctcctcagcatgggttctaatgagaacatacactccattcacttttcaggacatgtgttcactgtccggaagaaagaagagtataagatggccctctacaatttgtatccaggcgtgtttgagaccgttgaaatgcttccctctaaagctggcatctggagagtagagtgcttgatcggagaacatcttcacgcaggtatgagcaccttgttcctcgtgtacagcaacaaatgtcagaatccacttggcatggccagtggacacattcgcgactttcagatcacagcatctggccagtatggacaatgggccccaaagttggctcgcctccattactccggtagcataaatgcgtggtccactaaagaacctttcagctggattaaggtcgatcttcttgcccccatgatcatccacggcattaagacacagggagcgaggcagaaattctcctccctctacatctcacagttcattattatgtatagtttggacggcaagaagtggcaaacttatagaggtaacagtactggaacagacatggtgttcttcggcaacgttgatagctctggcatcaaacacaacatctttaatcctcccataatagctcggtacatcagattgcatccgacccactacagcattaggagtacactccgaatggagcttatgggttgcgacttgaattcctgttcaatgccactcggaatggagtctaaagccatctctgatgcacagataaccgccagtagctactttacgaacatgtttgctacgtggtcaccctctaaggcaaggcttcatttgcaaggccggtctaatgcctggagacctcaggtgaacaacccgaaagaatggctccaggtggactttcagaagaccatgaaagtaacaggtgtcactactcagggagttaagtccttggatactagcatgtatgtgaaggagttccttatttcctcatcacaagatggccaccagtggaccctcttctttcagaatggtaaggtcaaagtgtttcagggcaatcaagacagcttcacacccgtggtgaacagtcttgatcctccactcttgacacgataccttcgaatccatccacagtcttgggagcaccagattgcattgcgcatggaagtacttggatgcgaggctcaggacctctac

SEQ ID NO: 1386 - protein, 1457 aa, synthetic construct
  REGION 1..1457: note = Variant of human B-domain deleted Factor VIII
MQIELSTCFFLCLLRFCFSATRRYYLGAVELSWDYMQSDLGELPVDARFPPRVPKSFPFNTSQVYKKTLFVEFTDHLFNIAKPRPPWMGLLGPTIQAEVYDTVVITLKNMASHPVSLHAVGVSYWKASEGAEYDDQTSQREKEDDKVFPGGSHTYVWQVLKENGPMASDPPCLTYSYLSHVDLVKDLNSGLIGALLVCREGSLAKEKTQTLHKFILLFAVFDEGKSWHSETKNSLMQDRDAASARAWPKMHTVNGYVNRTLPGLIGCHRKSVYWHVIGMGTTPEVHSIFLEGHTFLVRNHRQASLGISPITFLTAQTLLMDLGQFLLFCHIPSHQHDGMEAYVKVDSCPEEPQLRMKNNEEAEDYDDDLTDSEMDVVRFDDDNSPSIIQARSGAKKHPKTWVHYIAAEEEDWDYAPLVLAPDDRSYKSQYLNNGPQRIGRKYKKVRFMAYTDETFKTREAIQHESGILGPLLYGEVGDTLLIIFKNQASRPYNIYPHGITDVRPLYSRRLPKGVKHLKDFPILPGEIFKYKWTVTVEDGPTKSDPRCLTRYYSSFVNMERDLASGLIGPLLICYKESVDQRGNQIMSDKRNVILFSVFDENRSWYLTENIQRFLPNPAGVQLEDPEFQASNIMHSINGYVFDSLQLSVCLHEVAYWYILSIGAQTDFLSVFFSGYQFKHKMVYEDTLTLFPFSGETVFMSMENPGLWILGCHNSDFRNRGMTALLKVSSCDWNTGDYYEDSYEDISAYFDSKNNAIEPRSFSQNPPVLKRHQREGTRTTLQSDQEEIDYDDTISVEMKKEDFDIYDEDENQSPRSFQKKTRHYFIAAVERLWDYGMSSSPHVLRNRAQSGSVPQFKKVVFQEFTDGSFTQPLYRGELNEHLGLLGPYIRAEVEDNIMVTFRNQASRPYSFYSSLISYEEDQRQGAEPRKNFVKPNETKTYFWKVQHHMAPTKDEFDCKAWAYFSDVDLEKDVHSGLIGPLLVCHTNTLNPAHGRQVTVQEFALFFTIFDETKSWYFTENMERNCRAPCNIQMEDPTFKENYRFHAINGYIMDTLPGLVMAQDQRIRWYLLSMGSNENIHSIHFSGHVFTVRKKEEYKMALYNLYPGVFETVEMLPSKAGIWRVECLIGEHLHAGMSTLFLVYSNKCQNPLGMASGHIRDFQITASGQYGQWAPKLARLHYSGSINAWSTKEPFSWIKVDLLAPMIIHGIKTQGARQKFSSLYISQFIIMYSLDGKKWQTYRGNSTGTDMVFFGNVDSSGIKHNIFNPPIIARYIRLHPTHYSIRSTLRMELMGCDLNSCSMPLGMESKAISDAQITASSYFTNMFATWSPSKARLHLQGRSNAWRPQVNNPKEWLQVDFQKTMKVTGVTTQGVKSLDTSMYVKEFLISSSQDGHQWTLFFQNGKVKVFQGNQDSFTPVVNSLDPPLLTRYLRIHPQSWEHQIALRMEVLGCEAQDLY

SEQ ID NO: 1387 - DNA, 4371 bp, synthetic construct
  misc_feature 1..4371: note = Variant of human B-domain deleted Factor VIII
  source 1..4371: mol_type = other DNA
atgcagattgaactgtctacctgcttcttcctctgtttgctgaggttctgctttagcgccactagacggtactaccttggcgctgtggagctgtcctgggactatatgcagagtgatttgggagagcttcccgtcgacgcacgatttcctcctcgcgttccaaagtcatttccctttaacacaagccaggtgtacaagaagacgctcttcgtcgaattcaccgatcacctgttcaatatcgccaaacccagaccaccatggatgggtcttttggggcctaccatacaagcggaggtgtatgacacagttgttatcactctcaagaacatggcttctcatccggtaagtcttcacgcagtgggcgtgtcctactggaaagcttcagaaggagccgagtatgatgatcagacatcccagagggagaaagaagacgacaaggtatttccaggtgggtctcatacctatgtgtggcaagtgctcaaagagaatggccctatggcaagcgatccgccgtgtttgacttacagctacctttcacacgttgacctcgtcaaggacctcaactccgggttgattggagccttgttggtatgcagggaaggatctcttgccaaagagaagacacagaccctccacaagtttatccttctctttgctgtgttcgatgagggcaaaagttggcatagcgaaacgaagaattccctcatgcaggatcgcgacgcagccagcgccagagcttggcccaagatgcacactgtgaacggatatgtcaataggacgcttcctggcttgattgggtgtcatcggaaaagtgtctactggcacgtgatcggaatggggacaacaccagaggtccactccatatttctcgaaggccataccttccttgttcgaaaccacagacaggcatccttggggatctctcccattacctttctcactgcccaaacgctccttatggacttgggtcagttccttctcttttgccatatcccgtcacaccagcatgatggtatggaagcttatgtgaaagtcgacagttgtcctgaggagccacagttgcgcatgaagaataatgaagaagccgaggattacgacgacgatctcaccgattctgagatggacgtggtgaggtttgatgacgacaactctccctccatcattcaagctcggagcggggcgaagaaacaccccaagacttgggtccactatatagcggcggaagaggaggattgggattacgctcctcttgtattggcaccagatgaccgctcatacaaaagccagtacctcaacaacggaccgcagagaattggccggaagtataagaaagtgcgatttatggcctatacagacgaaacctttaagacaagggaggccatccagcatgagagtgggattttgggacctcttctttacggcgaagttggtgataccctcctcatcatcttcaagaatcaagcttctcgcccctataacatttacccacacgggatcactgacgttaggcctttgtatagcagaagacttcccaaaggcgtgaagcatctcaaagacttccccattttgccaggcgagatctttaagtacaaatggaccgtcacagtggaagatggaccgactaaatcagaccctcgatgccttacgcggtactattcctccttcgtgaatatggagagagatttggcaagcggactcataggaccactcctcatctgttacaaggaatctgtagaccaggtgggtaaccagattatgagtgataaacgcaatgtgatcctttttagcgtcttcgacgagaaccggtcctggtacttgaccgagaatatacaaaggttccttcccaaccccgcaggcgttcagttggaagaccctgagtttcaggccagcaatattatgcactcaatcaacggctatgtgtttgatagtctccagctttctgtttgcctccatgaagtagcctattggtacatcttgtcaattggtgctcaaacagacttcctctccgtcttcttctccggctacacctttaagcacaagatggtgtatgaggacactctcacactctttccattttctggagaaaccgtgttcatgagcatggagaatccaggcctttggatcttgggttgccacaacagtgattttcgcaatcggggaatgactgctctcctcaaagtcagcagctgtgattggaacacaggcgactattacgaagattcttacgaggacataagtgcctactttgactccaagaataacgccattgagcccagatcattctcccagaatcctcccgtgcttaaaaggcatcagcgcgaaggtaccagaactactcttcagtctgatcaagaggagattgactatgacgacaccattagcgtggaaatgaagaaggaggatttcgatatctatgacgaagatgagaaccagtctccgcggagctttcagaagaagacgcgacactacttcattgcagcagtcgaaaggctttgggactacggtatgtcatcatcccctcatgtgttgcgcaatagagctcagagtggaagtgttccacagttcaagaaagtcgtctttcaagagtttacagatggcagcttcacacagcctctctatcggggcgagcttaacgaacatttgggactccttggtccctatatccgagccgaagtggaggacaacattatggttacctttaggaatcaagcctctcgcccctacagcttctactcctccctcatcagttatgaggaggatcagagacaaggcgctgaaccacggaagaactttgtgaaaccgaatgagacgaagacctacttctggaaagtacagcaccacatggcccccacaaaagacgaattcgattgcaaagcatgggcgtatttttcagacgttgacttggagaaagatgtacattcaggacttattggtcctttgttggtgtgtcacactaacactctcaatccagcccatggcaggcaggtgacagtccaggaattcgctcttttctttaccatctttgatgagaccaagtcctggtacttcacggaaaacatggagcgcaattgcagagccccctgtaacatacagatggaggaccctacctttaaggaaaattatcggttccacgcaatcaacggatacattatggatacactccctggccttgtgatggctcaggaccaacgaatcaggtggtacctcctcagcatgggttctaatgagaacatacactccattcacttttcaggacatgtgttcactgtccggaagaaagaagagtataagatggccctctacaatttgtatccaggcgtgtttgagaccgttgaaatgcttccctctaaagctggcatctggagagtagagtgcttgatcggagaacatcttcacgcaggtatgagcaccttgttcctcgtgtacagcaacaaatgtcagaatccacttggcatggccagtggacacattcgcgactttcagatcacagcatctggccagtatggacaatgggccccaaagttggctcgcctccattactccggtagcataaatgcgtggtccactaaagaacctttcagctggattaaggtcgatcttcttgcccccatgatcatccacggcattaagacacagggagcgaggcagaaattctcctccctctacatctcacagttcattattatgtatagtttggacggcaagaagtggcaaacttatagaggtaacagtactggaacagacatggtgttcttcggcaacgttgatagctctggcatcaaacacaacatctttaatcctcccataatagctcggtacatcagattgcatccgacccactacagcattaggagtacactccgaatggagcttatgggttgcgacttgaattcctgttcaatgccactcggaatggagtctaaagccatctctgatgcacagataaccgccagtagctactttacgaacatgtttgctacgtggtcaccctctaaggcaaggcttcatttgcaaggccggtctaatgcctggagacctcaggtgaacaacccgaaagaatggctccaggtggactttcagaagaccatgaaagtaacaggtgtcactactcagggagttaagtccttggatactagcatgtatgtgaaggagttccttatttcctcatcacaagatggccaccagtggaccctcttctttcagaatggtaaggtcaaagtgtttcagggcaatcaagacagcttcacacccgtggtgaacagtcttgatcctccactcttgacacgataccttcgaatccatccacagtcttgggagcaccagattgcattgcgcatggaagtacttggatgcgaggctcaggacctctac

SEQ ID NO: 1388 - protein, 1457 aa, synthetic construct
  REGION 1..1457: note = Variant of human B-domain deleted Factor VIII
MQIELSTCFFLCLLRFCFSATRRYYLGAVELSWDYMQSDLGELPVDARFPPRVPKSFPFNTSQVYKKTLFVEFTDHLFNIAKPRPPWMGLLGPTIQAEVYDTVVITLKNMASHPVSLHAVGVSYWKASEGAEYDDQTSQREKEDDKVFPGGSHTYVWQVLKENGPMASDPPCLTYSYLSHVDLVKDLNSGLIGALLVCREGSLAKEKTQTLHKFILLFAVFDEGKSWHSETKNSLMQDRDAASARAWPKMHTVNGYVNRTLPGLIGCHRKSVYWHVIGMGTTPEVHSIFLEGHTFLVRNHRQASLGISPITFLTAQTLLMDLGQFLLFCHIPSHQHDGMEAYVKVDSCPEEPQLRMKNNEEAEDYDDDLTDSEMDVVRFDDDNSPSIIQARSGAKKHPKTWVHYIAAEEEDWDYAPLVLAPDDRSYKSQYLNNGPQRIGRKYKKVRFMAYTDETFKTREAIQHESGILGPLLYGEVGDTLLIIFKNQASRPYNIYPHGITDVRPLYSRRLPKGVKHLKDFPILPGEIFKYKWTVTVEDGPTKSDPRCLTRYYSSFVNMERDLASGLIGPLLICYKESVDQVGNQIMSDKRNVILFSVFDENRSWYLTENIQRFLPNPAGVQLEDPEFQASNIMHSINGYVFDSLQLSVCLHEVAYWYILSIGAQTDFLSVFFSGYTFKHKMVYEDTLTLFPFSGETVFMSMENPGLWILGCHNSDFRNRGMTALLKVSSCDWNTGDYYEDSYEDISAYFDSKNNAIEPRSFSQNPPVLKRHQREGTRTTLQSDQEEIDYDDTISVEMKKEDFDIYDEDENQSPRSFQKKTRHYFIAAVERLWDYGMSSSPHVLRNRAQSGSVPQFKKVVFQEFTDGSFTQPLYRGELNEHLGLLGPYIRAEVEDNIMVTFRNQASRPYSFYSSLISYEEDQRQGAEPRKNFVKPNETKTYFWKVQHHMAPTKDEFDCKAWAYFSDVDLEKDVHSGLIGPLLVCHTNTLNPAHGRQVTVQEFALFFTIFDETKSWYFTENMERNCRAPCNIQMEDPTFKENYRFHAINGYIMDTLPGLVMAQDQRIRWYLLSMGSNENIHSIHFSGHVFTVRKKEEYKMALYNLYPGVFETVEMLPSKAGIWRVECLIGEHLHAGMSTLFLVYSNKCQNPLGMASGHIRDFQITASGQYGQWAPKLARLHYSGSINAWSTKEPFSWIKVDLLAPMIIHGIKTQGARQKFSSLYISQFIIMYSLDGKKWQTYRGNSTGTDMVFFGNVDSSGIKHNIFNPPIIARYIRLHPTHYSIRSTLRMELMGCDLNSCSMPLGMESKAISDAQITASSYFTNMFATWSPSKARLHLQGRSNAWRPQVNNPKEWLQVDFQKTMKVTGVTTQGVKSLDTSMYVKEFLISSSQDGHQWTLFFQNGKVKVFQGNQDSFTPVVNSLDPPLLTRYLRIHPQSWEHQIALRMEVLGCEAQDLY

SEQ ID NO: 1389 - DNA, 4371 bp, synthetic construct
  misc_feature 1..4371: note = Variant of human B-domain deleted Factor VIII
  source 1..4371: mol_type = other DNA
atgcagattgaactgtctacctgcttcttcctctgtttgctgaggttctgctttagcgccactagacggtactaccttggcgctgtggagctgtcctgggactatatgcagagtgatttgggagagcttcccgtcgacgcacgatttcctcctcgcgttccaaagtcatttccctttaacacaagccaggtgtacaagaagacgctcttcgtcgaattcaccgatcacctgttcaatatcgccaaacccagaccaccatggatgggtcttttggggcctaccatacaagcggaggtgtatgacacagttgttatcactctcaagaacatggcttctcatccggtaagtcttcacgcagtgggcgtgtcctactggaaagcttcagaaggagccgagtatgatgatcagacatcccagagggagaaagaagacgacaaggtatttccaggtgggtctcatacctatgtgtggcaagtgctcaaagagaatggccctatggcaagcgatccgccgtgtttgacttacagctacctttcacacgttgacctcgtcaaggacctcaactccgggttgattggagccttgttggtatgcagggaaggatctcttgccaaagagaagacacagaccctccacaagtttatccttctctttgctgtgttcgatgagggcaaaagttggcatagcgaaacgaagaattccctcatgcaggatcgcgacgcagccagcgccagagcttggcccaagatgcacactgtgaacggatatgtcaataggacgcttcctggcttgattgggtgtcatcggaaaagtgtctactggcacgtgatcggaatggggacaacaccagaggtccactccatatttctcgaaggccataccttccttgttcgaaaccacagacaggcatccttggggatctctcccattacctttctcactgcccaaacgctccttatggacttgggtcagttccttctcttttgccatatcccgtcacaccagcatgatggtatggaagcttatgtgaaagtcgacagttgtcctgaggagccacagttgcgcatgaagaataatgaagaagccgaggattacgacgacgatctcaccgattctgagatggacgtggtgaggtttgatgacgacaactctccctccatcattcaagctcggagcggggcgaagaaacaccccaagacttgggtccactatatagcggcggaagaggaggattgggattacgctcctcttgtattggcaccagatgaccgctcatacaaaagccagtacctcaacaacggaccgcagagaattggccggaagtataagaaagtgcgatttatggcctatacagacgaaacctttaagacaagggaggccatccagcatgagagtgggattttgggacctcttctttacggcgaagttggtgataccctcctcatcatcttcaagaatcaagcttctcgcccctataacatttacccacacgggatcactgacgttaggcctttgtatagcagaagacttcccaaaggcgtgaagcatctcaaagacttccccattttgccaggcgagatctttaagtacaaatggaccgtcacagtggaagatggaccgactaaatcagaccctcgatgccttacgcggtactattcctccttcgtgaatatggagagagatttggcaagcggactcataggaccactcctcatctgttacaaggaatctgtagaccagaggggtaaccagattatgagtgataaacgcaatgtgatcctttttagcgtcttcgacgagaaccggtcctggtacttgaccgagaatatacaaaggttccttcccaaccccgcaggcgttcagttggaagaccctgagtttcaggccagcaatattatgcactcaatcaacggctatgtgtttgatagtctccagctttctgtttgcctccatgaagtagcctattggtacatcttgtcaattggtgctcaaacagacttcctctccgtcttcttctccggctacacctttaagcacaagatggtgtatgaggacactctcacactctttccattttctggagaaaccgtgttcatgagcatggagaatccaggcctttggatcttgggttgccacaacagtgattttcgcaatcggggaatgactgctctcctcaaagtcagcagctgtgattggaacacaggcgactattacgaagattcttacgaggacataagtgcctactttgactccaagaataacgccattgagcccagatcattctcccagaatcctcccgtgcttaaaaggcatcagcgcgaaggtaccagaactactcttcagtctgatcaagaggagattgactatgacgacaccattagcgtggaaatgaagaaggaggatttcgatatctatgacgaagatgagaaccagtctccgcggagctttcagaagaagacgcgacactacttcattgcagcagtcgaaaggctttgggactacggtatgtcatcatcccctcatgtgttgcgcaatagagctcagagtggaagtgttccacagttcaagaaagtcgtctttcaagagtttacagatggcagcttcacacagcctctctatcggggcgagcttaacgaacatttgggactccttggtccctatatccgagccgaagtggaggacaacattatggttacctttaggaatcaagcctctcgcccctacagcttctactcctccctcatcagttatgaggaggatcagagacaaggcgctgaaccacggaagaactttgtgaaaccgaatgagacgaagacctacttctggaaagtacagcaccacatggcccccacaaaagacgaattcgattgcaaagcatgggcgtatttttcagacgttgacccggagaaagatgtacattcaggacttattggtcctttgttggtgtgtcacactaacactctcaatccagcccatggcaggcaggtgacagtccaggaattcgctcttttctttaccatctttgatgagaccaagtcctggtacttcacggaaaacatggagcgcaattgcagagccccctgtaacatacagatggaggaccctacctttaaggaaaattatcggttccacgcaatcaacggatacattatggatacactccctggccttgtgatggctcaggaccaacgaatcaggtggtacctcctcagcatgggttctaatgagaacatacactccattcacttttcaggacatgtgttcactgtccggaagaaagaagagtataagatggccctctacaatttgtatccaggcgtgtttgagaccgttgaaatgcttccctctaaagctggcatctggagagtagagtgcttgatcggagaacatcttcacgcaggtatgagcaccttgttcctcgtgtacagcaacaaatgtcagaatccacttggcatggccagtggacacattcgcgactttcagatcacagcatctggccagtatggacaatgggccccaaagttggctcgcctccattactccggtagcataaatgcgtggtccactaaagaacctttcagctggattaaggtcgatcttcttgcccccatgatcatccacggcattaagacacagggagcgaggcagaaattctcctccctctacatctcacagttcattattatgtatagtttggacggcaagaagtggcaaacttatagaggtaacagtactggaacagacatggtgttcttcggcaacgttgatagctctggcatcaaacacaacatctttaatcctcccataatagctcggtacatcagattgcatccgacccactacagcattaggagtacactccgaatggagcttatgggttgcgacttgaattcctgttcaatgccactcggaatggagtctaaagccatctctgatgcacagataaccgccagtagctactttacgaacatgtttgctacgtggtcaccctctaaggcaaggcttcatttgcaaggccggtctaatgcctggagacctcaggtgaacaacccgaaagaatggctccaggtggactttcagaagaccatgaaagtaacaggtgtcactactcagggagttaagtccttggatactagcatgtatgtgaaggagttccttatttcctcatcacaagatggccaccagtggaccctcttctttcagaatggtaaggtcaaagtgtttcagggcaatcaagacagcttcacacccgtggtgaacagtcttgatcctccactcttgacacgataccttcgaatccatccacagtcttgggagcaccagattgcattgcgcatggaagtacttggatgcgaggctcaggacctctac

SEQ ID NO: 1390 - protein, 1457 aa, synthetic construct
  REGION 1..1457: note = Variant of human B-domain deleted Factor VIII
MQIELSTCFFLCLLRFCFSATRRYYLGAVELSWDYMQSDLGELPVDARFPPRVPKSFPFNTSQVYKKTLFVEFTDHLFNIAKPRPPWMGLLGPTIQAEVYDTVVITLKNMASHPVSLHAVGVSYWKASEGAEYDDQTSQREKEDDKVFPGGSHTYVWQVLKENGPMASDPPCLTYSYLSHVDLVKDLNSGLIGALLVCREGSLAKEKTQTLHKFILLFAVFDEGKSWHSETKNSLMQDRDAASARAWPKMHTVNGYVNRTLPGLIGCHRKSVYWHVIGMGTTPEVHSIFLEGHTFLVRNHRQASLGISPITFLTAQTLLMDLGQFLLFCHIPSHQHDGMEAYVKVDSCPEEPQLRMKNNEEAEDYDDDLTDSEMDVVRFDDDNSPSIIQARSGAKKHPKTWVHYIAAEEEDWDYAPLVLAPDDRSYKSQYLNNGPQRIGRKYKKVRFMAYTDETFKTREAIQHESGILGPLLYGEVGDTLLIIFKNQASRPYNIYPHGITDVRPLYSRRLPKGVKHLKDFPILPGEIFKYKWTVTVEDGPTKSDPRCLTRYYSSFVNMERDLASGLIGPLLICYKESVDQRGNQIMSDKRNVILFSVFDENRSWYLTENIQRFLPNPAGVQLEDPEFQASNIMHSINGYVFDSLQLSVCLHEVAYWYILSIGAQTDFLSVFFSGYTFKHKMVYEDTLTLFPFSGETVFMSMENPGLWILGCHNSDFRNRGMTALLKVSSCDWNTGDYYEDSYEDISAYFDSKNNAIEPRSFSQNPPVLKRHQREGTRTTLQSDQEEIDYDDTISVEMKKEDFDIYDEDENQSPRSFQKKTRHYFIAAVERLWDYGMSSSPHVLRNRAQSGSVPQFKKVVFQEFTDGSFTQPLYRGELNEHLGLLGPYIRAEVEDNIMVTFRNQASRPYSFYSSLISYEEDQRQGAEPRKNFVKPNETKTYFWKVQHHMAPTKDEFDCKAWAYFSDVDPEKDVHSGLIGPLLVCHTNTLNPAHGRQVTVQEFALFFTIFDETKSWYFTENMERNCRAPCNIQMEDPTFKENYRFHAINGYIMDTLPGLVMAQDQRIRWYLLSMGSNENIHSIHFSGHVFTVRKKEEYKMALYNLYPGVFETVEMLPSKAGIWRVECLIGEHLHAGMSTLFLVYSNKCQNPLGMASGHIRDFQITASGQYGQWAPKLARLHYSGSINAWSTKEPFSWIKVDLLAPMIIHGIKTQGARQKFSSLYISQFIIMYSLDGKKWQTYRGNSTGTDMVFFGNVDSSGIKHNIFNPPIIARYIRLHPTHYSIRSTLRMELMGCDLNSCSMPLGMESKAISDAQITASSYFTNMFATWSPSKARLHLQGRSNAWRPQVNNPKEWLQVDFQKTMKVTGVTTQGVKSLDTSMYVKEFLISSSQDGHQWTLFFQNGKVKVFQGNQDSFTPVVNSLDPPLLTRYLRIHPQSWEHQIALRMEVLGCEAQDLY

SEQ ID NO: 1391 - DNA, 4371 bp, synthetic construct
  misc_feature 1..4371: note = Variant of human B-domain deleted Factor VIII
  source 1..4371: mol_type = other DNA
atgcagattgaactgtctacctgcttcttcctctgtttgctgaggttctgctttagcgccactagacggtactaccttggcgctgtggagctgtcctgggactatatgcagagtgatttgggagagcttcccgtcgacgcacgatttcctcctcgcgttccaaagtcatttccctttaacacaagccaggtgtacaagaagacgctcttcgtcgaattcaccgatcacctgttcaatatcgccaaacccagaccaccatggatgggtcttttggggcctaccatacaagcggaggtgtatgacacagttgttatcactctcaagaacatggcttctcatccggtaagtcttcacgcagtgggcgtgtcctactggaaagcttcagaaggagccgagtatgatgatcagacatcccagagggagaaagaagacgacaaggtatttccaggtgggtctcatacctatgtgtggcaagtgctcaaagagaatggccctatggcaagcgatccgccgtgtttgacttacagctacctttcacacgttgacctcgtcaaggacctcaactccgggttgattggagccttgttggtatgcagggaaggatctcttgccaaagagaagacacagaccctccacaagtttatccttctctttgctgtgttcgatgagggcaaaagttggcatagcgaaacgaagaattccctcatgcaggatcgcgacgcagccagcgccagagcttggcccaagatgcacactgtgaacggatatgtcaataggacgcttcctggcttgattgggtgtcatcggaaaagtgtctactggcacgtgatcggaatggggacaacaccagaggtccactccatatttctcgaaggccataccttccttgttcgaaaccacagacaggcatccttggggatctctcccattacctttctcactgcccaaacgctccttatggacttgggtcagttccttctcttttgccatatcccgtcacaccagcatgatggtatggaagcttatgtgaaagtcgacagttgtcctgaggagccacagttgcgcatgaagaataatgaagaagccgaggattacgacgacgatctcaccgattctgagatggacgtggtgaggtttgatgacgacaactctccctccatcattcaagctcggagcggggcgaagaaacaccccaagacttgggtccactatatagcggcggaagaggaggattgggattacgctcctcttgtattggcaccagatgaccgctcatacaaaagccagtacctcaacaacggaccgcagagaattggccggaagtataagaaagtgcgatttatggcctatacagacgaaacctttaagacaagggaggccatccagcatgagagtgggattttgggacctcttctttacggcgaagttggtgataccctcctcatcatcttcaagaatcaagcttctcgcccctataacatttacccacacgggatcactgacgttaggcctttgtatagcagaagacttcccaaaggcgtgaagcatctcaaagacttccccattttgccaggcgagatctttaagtacaaatggaccgtcacagtggaagatggaccgactaaatcagaccctcgatgccttacgcggtactattcctccttcgtgaatatggagagagatttggcaagcggactcataggaccactcctcatctgttacaaggaatctgtagaccagaggggtaaccagattatgagtgataaacgcaatgtgatcctttttagcgtcttcgacgagaaccggtcctggtacttgaccgagaatatacaaaggttccttcccaaccccgcaggcgttcagttggaagaccctgagtttcaggccagcaatattatgcactcaatcaacggctatgtgtttgatagtctccagctttctgtttgcctccatgaagtagcctattggtacatcttgtcaattggtgctcaaacagacttcctctccgtcttcttctccggctacacctttaagcacaagatggtgtatgaggacactctcacactctttccattttctggagaaaccgtgttcatgagcatggagaatccaggcctttggatcttgggttgccacaacagtgattttcgcaatcggggaatgactgctctcctcaaagtcagcagctgtgattggaacacaggcgactattacgaagattcttacgaggacataagtgcctactttgactccaagaataactatattgagcccagatcattctcccagaatcctcccgtgcttaaaaggcatcagcgcgaaggtaccagaactactcttcagtctgatcaagaggagattgactatgacgacaccattagcgtggaaatgaagaaggaggatttcgatatctatgacgaagatgagaaccagtctccgcggagctttcagaagaagacgcgacactacttcattgcagcagtcgaaaggctttgggactacggtatgtcatcatcccctcatgtgttgcgcaatagagctcagagtggaagtgttccacagttcaagaaagtcgtctttcaagagtttacagatggcagcttcacacagcctctctatcggggcgagcttaacgaacatttgggactccttggtccctatatccgagccgaagtggaggacaacattatggttacctttaggaatcaagcctctcgcccctacagcttctactcctccctcatcagttatgaggaggatcagagacaaggcgctgaaccacggaagaactttgtgaaaccgaatgagacgaagacctacttctggaaagtacagcaccacatggcccccacaaaagacgaattcgattgcaaagcatgggcgtatttttcagacgttgacttggagaaagatgtacattcaggacttattggtcctttgttggtgtgtcacactaacactctcaatccagcccatggcaggcaggtgacagtccaggaattcgctcttttctttaccatctttgatgagaccaagtcctggtacttcacggaaaacatggagcgcaattgcagagccccctgtaacatacagatggaggaccctacctttaaggaaaattatcggttccacgcaatcaacggatacattatggatacactccctggccttgtgatggctcaggaccaacgaatcaggtggtacctcctcagcatgggttctaatgagaacatacactccattcacttttcaggacatgtgttcactgtccggaagaaagaagagtataagatggccctctacaatttgtatccaggcgtgtttgagaccgttgaaatgcttccctctaaagctggcatctggagagtagagtgcttgatcggagaacatcttcacgcaggtatgagcaccttgttcctcgtgtacagcaacaaatgtcagaatccacttggcatggccagtggacacattcgcgactttcagatcacagcatctggccagtatggacaatgggccccaaagttggctcgcctccattactccggtagcataaatgcgtggtccactaaagaacctttcagctggattaaggtcgatcttcttgcccccatgatcatccacggcattaagacacagggagcgaggcagaaattctcctccctctacatctcacagttcattattatgtatagtttggacggcaagaagtggcaaacttatagaggtaacagtactggaacagacatggtgttcttcggcaacgttgatagctctggcatcaaacacaacatctttaatcctcccataatagctcggtacatcagattgcatccgacccactacagcattaggagtacactccgaatggagcttatgggttgcgacttgaattcctgttcaatgccactcggaatggagtctaaagccatctctgatgcacagataaccgccagtagctactttacgaacatgtttgctacgtggtcaccctctaaggcaaggcttcatttgcaaggccggtctaatgcctggagacctcaggtgaacaacccgaaagaatggctccaggtggactttcagaagaccatgaaagtaacaggtgtcactactcagggagttaagtccttggatactagcatgtatgtgaaggagttccttatttcctcatcacaagatggccaccagtggaccctcttctttcagaatggtaaggtcaaagtgtttcagggcaatcaagacagcttcacacccgtggtgaacagtcttgatcctccactcttgacacgataccttcgaatccatccacagtcttgggagcaccagattgcattgcgcatggaagtacttggatgcgaggctcaggacctctac

SEQ ID NO: 1392 - protein, 1457 aa, synthetic construct
  REGION 1..1457: note = Variant of human B-domain deleted Factor VIII
MQIELSTCFFLCLLRFCFSATRRYYLGAVELSWDYMQSDLGELPVDARFPPRVPKSFPFNTSQVYKKTLFVEFTDHLFNIAKPRPPWMGLLGPTIQAEVYDTVVITLKNMASHPVSLHAVGVSYWKASEGAEYDDQTSQREKEDDKVFPGGSHTYVWQVLKENGPMASDPPCLTYSYLSHVDLVKDLNSGLIGALLVCREGSLAKEKTQTLHKFILLFAVFDEGKSWHSETKNSLMQDRDAASARAWPKMHTVNGYVNRTLPGLIGCHRKSVYWHVIGMGTTPEVHSIFLEGHTFLVRNHRQASLGISPITFLTAQTLLMDLGQFLLFCHIPSHQHDGMEAYVKVDSCPEEPQLRMKNNEEAEDYDDDLTDSEMDVVRFDDDNSPSIIQARSGAKKHPKTWVHYIAAEEEDWDYAPLVLAPDDRSYKSQYLNNGPQRIGRKYKKVRFMAYTDETFKTREAIQHESGILGPLLYGEVGDTLLIIFKNQASRPYNIYPHGITDVRPLYSRRLPKGVKHLKDFPILPGEIFKYKWTVTVEDGPTKSDPRCLTRYYSSFVNMERDLASGLIGPLLICYKESVDQRGNQIMSDKRNVILFSVFDENRSWYLTENIQRFLPNPAGVQLEDPEFQASNIMHSINGYVFDSLQLSVCLHEVAYWYILSIGAQTDFLSVFFSGYTFKHKMVYEDTLTLFPFSGETVFMSMENPGLWILGCHNSDFRNRGMTALLKVSSCDWNTGDYYEDSYEDISAYFDSKNNYIEPRSFSQNPPVLKRHQREGTRTTLQSDQEEIDYDDTISVEMKKEDFDIYDEDENQSPRSFQKKTRHYFIAAVERLWDYGMSSSPHVLRNRAQSGSVPQFKKVVFQEFTDGSFTQPLYRGELNEHLGLLGPYIRAEVEDNIMVTFRNQASRPYSFYSSLISYEEDQRQGAEPRKNFVKPNETKTYFWKVQHHMAPTKDEFDCKAWAYFSDVDLEKDVHSGLIGPLLVCHTNTLNPAHGRQVTVQEFALFFTIFDETKSWYFTENMERNCRAPCNIQMEDPTFKENYRFHAINGYIMDTLPGLVMAQDQRIRWYLLSMGSNENIHSIHFSGHVFTVRKKEEYKMALYNLYPGVFETVEMLPSKAGIWRVECLIGEHLHAGMSTLFLVYSNKCQNPLGMASGHIRDFQITASGQYGQWAPKLARLHYSGSINAWSTKEPFSWIKVDLLAPMIIHGIKTQGARQKFSSLYISQFIIMYSLDGKKWQTYRGNSTGTDMVFFGNVDSSGIKHNIFNPPIIARYIRLHPTHYSIRSTLRMELMGCDLNSCSMPLGMESKAISDAQITASSYFTNMFATWSPSKARLHLQGRSNAWRPQVNNPKEWLQVDFQKTMKVTGVTTQGVKSLDTSMYVKEFLISSSQDGHQWTLFFQNGKVKVFQGNQDSFTPVVNSLDPPLLTRYLRIHPQSWEHQIALRMEVLGCEAQDLY

SEQ ID NO: 1393 - DNA, 4371 bp, synthetic construct
  misc_feature 1..4371: note = Variant of human B-domain deleted Factor VIII
  source 1..4371: mol_type = other DNA
atgcagattgaactgtctacctgcttcttcctctgtttgctgaggttctgctttagcgccactagacggtactaccttggcgctgtggagctgtcctgggactatatgcagagtgatttgggagagcttcccgtcgacgcacgatttcctcctcgcgttccaaagtcatttccctttaacacaagccaggtgtacaagaagacgctcttcgtcgaattcaccgatcacctgttcaatatcgccaaacccagaccaccatggatgggtcttttggggcctaccatacaagcggaggtgtatgacacagttgttatcactctcaagaacatggcttctcatccggtaagtcttcacgcagtgggcgtgtcctactggaaagcttcagaaggagccgagtatgatgatcagacatcccagagggagaaagaagacgacaaggtatttccaggtgggtctcatacctatgtgtggcaagtgctcaaagagaatggccctatggcaagcgatccgccgtgtttgacttacagctacctttcacacgttgacctcgtcaaggacctcaactccgggttgattggagccttgttggtatgcagggaaggatctcttgccaaagagaagacacagaccctccacaagtttatccttctctttgctgtgttcgatgagggcaaaagttggcatagcgaaacgaagaattccctcatgcaggatcgcgacgcagccagcgccagagcttggcccaagatgcacactgtgaacggatatgtcaataggacgcttcctggcttgattgggtgtcatcggaaaagtgtctactggcacgtgatcggaatggggacaacaccagaggtccactccatatttctcgaaggccataccttccttgttcgaaaccacagacaggcatccttggggatctctcccattacctttctcactgcccaaacgctccttatggacttgggtcagttccttctcttttgccatatcccgtcacaccagcatgatggtatggaagcttatgtgaaagtcgacagttgtcctgaggagccacagttgcgcatgaagaataatgaagaagccgaggattacgacgacgatctcaccgattctgagatggacgtggtgaggtttgatgacgacaactctccctccatcattcaagctcggagcggggcgaagaaacaccccaagacttgggtccactatatagcggcggaagaggaggattgggattacgctcctcttgtattggcaccagatgaccgctcatacaaaagccagtacctcaacaacggaccgcagagaattggccggaagtataagaaagtgcgatttatggcctatacagacgaaacctttaagacaagggaggccatccagcatgagagtgggattttgggacctcttctttacggcgaagttggtgataccctcctcatcatcttcaagaatcaagcttctcgcccctataacatttacccacacgggatcactgacgttaggcctttgtatagcagaagacttcccaaaggcgtgaagcatctcaaagacttccccattttgccaggcgagatctttaagtacaaatggaccgtcacagtggaagatggaccgactaaatcagaccctcgatgccttacgcggtactattcctccttcgtgaatatggagagagatttggcaagcggactcataggaccactcctcatctgttacaaggaatctgtagaccagaggggtaaccagattatgagtgataaacgcaatgtgatcctttttagcgtcttcgacgagaaccggtcctggtacttgaccgagaatatacaaaggttccttcccaaccccgcaggcgttcagttggaagaccctgagtttcaggccagcaatattatgcactcaatcaacggctatgtgtttgatagtctccagctttctgtttgcctccatgaagtagcctattggtacatcttgtcaattggtgctcaaacagacttcctctccgtcttcttctccggctacacctttaagcacaagatggtgtatgaggacactctcacactctttccattttctggagaaaccgtgttcatgagcatggagaatccaggcctttggatcttgggttgccacaacagtgattttcgcaatcggggaatgactgctctcctcaaagtcagcagctgtgattggaacacaggcgactattacgaagattcttacgaggacataagtgcctactttgactccaagaataacgccattgagcccagatcattctcccagaatcctcccgtgcttaaaaggcatcagcgcgaaggtaccagaactactcttcagtctgatcaagaggagattgactatgacgacaccattagcgtggaaatgaagaaggaggatttcgatatctatgacgaagatgagaaccagtctccgcggagctttcagaagaagacgcgacactacttcattgcagcagtcgaaaggctttgggactacggtatgtcatcatcccctcatgtgttgcgcaatagagctcagagtggaagtgttccacagttcaagaaagtcgtctttcaagagtttacagatggcagcttcacacagcctctctatcggggcgagcttaacgaacatttgggactccttggtccctatatccgagccgaagtggaggacaacattatggttacctttaggaatcaagcctctcgcccctacagcttctactcctccctcatccagtatgaggaggatcagagacaaggcgctgaaccacggaagaactttgtgaaaccgaatgagacgaagacctacttctggaaagtacagcaccacatggcccccacaaaagacgaattcgattgcaaagcatgggcgtatttttcagacgttgacttggagaaagatgtacattcaggacttattggtcctttgttggtgtgtcacactaacactctcaatccagcccatggcaggcaggtgacagtccaggaattcgctcttttctttaccatctttgatgagaccaagtcctggtacttcacggaaaacatggagcgcaattgcagagccccctgtaacatacagatggaggaccctacctttaaggaaaattatcggttccacgcaatcaacggatacattatggatacactccctggccttgtgatggctcaggaccaacgaatcaggtggtacctcctcagcatgggttctaatgagaacatacactccattcacttttcaggacatgtgttcactgtccggaagaaagaagagtataagatggccctctacaatttgtatccaggcgtgtttgagaccgttgaaatgcttccctctaaagctggcatctggagagtagagtgcttgatcggagaacatcttcacgcaggtatgagcaccttgttcctcgtgtacagcaacaaatgtcagaatccacttggcatggccagtggacacattcgcgactttcagatcacagcatctggccagtatggacaatgggccccaaagttggctcgcctccattactccggtagcataaatgcgtggtccactaaagaacctttcagctggattaaggtcgatcttcttgcccccatgatcatccacggcattaagacacagggagcgaggcagaaattctcctccctctacatctcacagttcattattatgtatagtttggacggcaagaagtggcaaacttatagaggtaacagtactggaacagacatggtgttcttcggcaacgttgatagctctggcatcaaacacaacatctttaatcctcccataatagctcggtacatcagattgcatccgacccactacagcattaggagtacactccgaatggagcttatgggttgcgacttgaattcctgttcaatgccactcggaatggagtctaaagccatctctgatgcacagataaccgccagtagctactttacgaacatgtttgctacgtggtcaccctctaaggcaaggcttcatttgcaaggccggtctaatgcctggagacctcaggtgaacaacccgaaagaatggctccaggtggactttcagaagaccatgaaagtaacaggtgtcactactcagggagttaagtccttggatactagcatgtatgtgaaggagttccttatttcctcatcacaagatggccaccagtggaccctcttctttcagaatggtaaggtcaaagtgtttcagggcaatcaagacagcttcacacccgtggtgaacagtcttgatcctccactcttgacacgataccttcgaatccatccacagtcttgggagcaccagattgcattgcgcatggaagtacttggatgcgaggctcaggacctctac

SEQ ID NO: 1394 - protein, 1457 aa, synthetic construct
  REGION 1..1457: note = Variant of human B-domain deleted Factor VIII
MQIELSTCFFLCLLRFCFSATRRYYLGAVELSWDYMQSDLGELPVDARFPPRVPKSFPFNTSQVYKKTLFVEFTDHLFNIAKPRPPWMGLLGPTIQAEVYDTVVITLKNMASHPVSLHAVGVSYWKASEGAEYDDQTSQREKEDDKVFPGGSHTYVWQVLKENGPMASDPPCLTYSYLSHVDLVKDLNSGLIGALLVCREGSLAKEKTQTLHKFILLFAVFDEGKSWHSETKNSLMQDRDAASARAWPKMHTVNGYVNRTLPGLIGCHRKSVYWHVIGMGTTPEVHSIFLEGHTFLVRNHRQASLGISPITFLTAQTLLMDLGQFLLFCHIPSHQHDGMEAYVKVDSCPEEPQLRMKNNEEAEDYDDDLTDSEMDVVRFDDDNSPSIIQARSGAKKHPKTWVHYIAAEEEDWDYAPLVLAPDDRSYKSQYLNNGPQRIGRKYKKVRFMAYTDETFKTREAIQHESGILGPLLYGEVGDTLLIIFKNQASRPYNIYPHGITDVRPLYSRRLPKGVKHLKDFPILPGEIFKYKWTVTVEDGPTKSDPRCLTRYYSSFVNMERDLASGLIGPLLICYKESVDQRGNQIMSDKRNVILFSVFDENRSWYLTENIQRFLPNPAGVQLEDPEFQASNIMHSINGYVFDSLQLSVCLHEVAYWYILSIGAQTDFLSVFFSGYTFKHKMVYEDTLTLFPFSGETVFMSMENPGLWILGCHNSDFRNRGMTALLKVSSCDWNTGDYYEDSYEDISAYFDSKNNAIEPRSFSQNPPVLKRHQREGTRTTLQSDQEEIDYDDTISVEMKKEDFDIYDEDENQSPRSFQKKTRHYFIAAVERLWDYGMSSSPHVLRNRAQSGSVPQFKKVVFQEFTDGSFTQPLYRGELNEHLGLLGPYIRAEVEDNIMVTFRNQASRPYSFYSSLIQYEEDQRQGAEPRKNFVKPNETKTYFWKVQHHMAPTKDEFDCKAWAYFSDVDLEKDVHSGLIGPLLVCHTNTLNPAHGRQVTVQEFALFFTIFDETKSWYFTENMERNCRAPCNIQMEDPTFKENYRFHAINGYIMDTLPGLVMAQDQRIRWYLLSMGSNENIHSIHFSGHVFTVRKKEEYKMALYNLYPGVFETVEMLPSKAGIWRVECLIGEHLHAGMSTLFLVYSNKCQNPLGMASGHIRDFQITASGQYGQWAPKLARLHYSGSINAWSTKEPFSWIKVDLLAPMIIHGIKTQGARQKFSSLYISQFIIMYSLDGKKWQTYRGNSTGTDMVFFGNVDSSGIKHNIFNPPIIARYIRLHPTHYSIRSTLRMELMGCDLNSCSMPLGMESKAISDAQITASSYFTNMFATWSPSKARLHLQGRSNAWRPQVNNPKEWLQVDFQKTMKVTGVTTQGVKSLDTSMYVKEFLISSSQDGHQWTLFFQNGKVKVFQGNQDSFTPVVNSLDPPLLTRYLRIHPQSWEHQIALRMEVLGCEAQDLY

SEQ ID NO: 1395 - DNA, 4371 bp, synthetic construct
  misc_feature 1..4371: note = Variant of human B-domain deleted Factor VIII
  source 1..4371: mol_type = other DNA
atgcagattgaactgtctacctgcttcttcctctgtttgctgaggttctgctttagcgccactagacggtactaccttggcgctgtggagctgtcctgggactatatgcagagtgatttgggagagcttcccgtcgacgcacgatttcctcctcgcgttccaaagtcatttccctttaacacaagccaggtgtacaagaagacgctcttcgtcgaattcaccgatcacctgttcaatatcgccaaacccagaccaccatggatgggtcttttggggcctaccatacaagcggaggtgtatgacacagttgttatcactctcaagaacatggcttctcatccggtaagtcttcacgcagtgggcgtgtcctactggaaagcttcagaaggagccgagtatgatgatcagacatcccagagggagaaagaagacgacaaggtatttccaggtgggtctcatacctatgtgtggcaagtgctcaaagagaatggccctatggcaagcgatccgccgtgtttgacttacagctacctttcacacgttgacctcgtcaaggacctcaactccgggttgattggagccttgttggtatgcagggaaggatctcttgccaaagagaagacacagaccctccacaagtttatccttctctttgctgtgttcgatgagggcaaaagttggcatagcgaaacgaagaattccctcatgcaggatcgcgacgcagccagcgccagagcttggcccaagatgcacactgtgaacggatatgtcaataggacgcttcctggcttgattgggtgtcatcggaaaagtgtctactggcacgtgatcggaatggggacaacaccagaggtccactccatatttctcgaaggccataccttccttgttcgaaaccacagacaggcatccttggggatctctcccattacctttctcactgcccaaacgctccttatggacttgggtcagttccttctcttttgccatatcccgtcacaccagcatgatggtatggaagcttatgtgaaagtcgacagttgtcctgaggagccacagttgcgcatgaagaataatgaagaagccgaggattacgacgacgatctcaccgattctgagatggacgtggtgaggtttgatgacgacaactctccctccatcattcaagctcggagcggggcgaagaaacaccccaagacttgggtccactatatagcggcggaagaggaggattgggattacgctcctcttgtattggcaccagatgaccgctcatacaaaagccagtacctcaacaacggaccgcagagaattggccggaagtataagaaagtgcgatttatggcctatacagacgaaacctttaagacaagggaggccatccagcatgagagtgggattttgggacctcttctttacggcgaagttggtgataccctcctcatcatcttcaagaatcaagcttctcgcccctataacatttacccacacgggatcactgacgttaggcctttgtatagcagaagacttcccaaaggcgtgaagcatctcaaagacttccccattttgccaggcgagatctttaagtacaaatggaccgtcacagtggaagatggaccgactaaatcagaccctcgatgccttacgcggtactattcctccttcgtgaatatggagagagatttggcaagcggactcataggaccactcctcatctgttacaaggaatctgtagaccagaggggtaaccagattatgagtgataaacgcaatgtgatcctttttagcgtcttcgacgagaaccggtcctggtacttgaccgagaatatacaaaggttccttcccaaccccgcaggcgttcagttggaagaccctgagtttcaggccagcaatattatgcactcaatcaacggctatgtgtttgatagtctccagctttctgtttgcctccatgaagtagcctattggtacatcttgtcaattggtgctcaaacagacttcctctccgtcttcttctccggctacacctttaagcacaagatggtgtatgaggacactctcacactctttccattttctggagaaaccgtgttcatgagcatggagaatccaggcctttggatcttgggttgccacaacagtgattttcgcaatcggggaatgactgctctcctcaaagtcagcagctgtgattggaacacagatgactattacgaagattcttacgaggacataagtgcctactttgactccaagaataacgccattgagcccagatcattctcccagaatcctcccgtgcttaaaaggcatcagcgcgaaggtaccagaactactcttcagtctgatcaagaggagattgactatgacgacaccattagcgtggaaatgaagaaggaggatttcgatatctatgacgaagatgagaaccagtctccgcggagctttcagaagaagacgcgacactacttcattgcagcagtcgaaaggctttgggactacggtatgtcatcatcccctcatgtgttgcgcaatagagctcagagtggaagtgttccacagttcaagaaagtcgtctttcaagagtttacagatggcagcttcacacagcctctctatcggggcgagcttaacgaacatttgggactccttggtccctatatccgagccgaagtggaggacaacattatggttacctttaggaatcaagcctctcgcccctacagcttctactcctccctcatcagttatgaggaggatcagagacaaggcgctgaaccacggaagaactttgtgaaaccgaatgagacgaagacctacttctggaaagtacagcaccacatggcccccacaaaagacgaattcgattgcaaagcatgggcgtatttttcagacgttgacttggagaaagatgtacattcaggacttattggtcctttgttggtgtgtcacactaacactctcaatccagcccatggcaggcaggtgacagtccaggaattcgctcttttctttaccatctttgatgagaccaagtcctggtacttcacggaaaacatggagcgcaattgcagagccccctgtaacatacagatggaggaccctacctttaaggaaaattatcggttccacgcaatcaacggatacattatggatacactccctggccttgtgatggctcaggaccaacgaatcaggtggtacctcctcagcatgggttctaatgagaacatacactccattcacttttcaggacatgtgttcactgtccggaagaaagaagagtataagatggccctctacaatttgtatccaggcgtgtttgagaccgttgaaatgcttccctctaaagctggcatctggagagtagagtgcttgatcggagaacatcttcacgcaggtatgagcaccttgttcctcgtgtacagcaacaaatgtcagaatccacttggcatggccagtggacacattcgcgactttcagatcacagcatctggccagtatggacaatgggccccaaagttggctcgcctccattactccggtagcataaatgcgtggtccactaaagaacctttcagctggattaaggtcgatcttcttgcccccatgatcatccacggcattaagacacagggagcgaggcagaaattctcctccctctacatctcacagttcattattatgtatagtttggacggcaagaagtggcaaacttatagaggtaacagtactggaacagacatggtgttcttcggcaacgttgatagctctggcatcaaacacaacatctttaatcctcccataatagctcggtacatcagattgcatccgacccactacagcattaggagtacactccgaatggagcttatgggttgcgacttgaattcctgttcaatgccactcggaatggagtctaaagccatctctgatgcacagataaccgccagtagctactttacgaacatgtttgctacgtggtcaccctctaaggcaaggcttcatttgcaaggccggtctaatgcctggagacctcaggtgaacaacccgaaagaatggctccaggtggactttcagaagaccatgaaagtaacaggtgtcactactcagggagttaagtccttggatactagcatgtatgtgaaggagttccttatttcctcatcacaagatggccaccagtggaccctcttctttcagaatggtaaggtcaaagtgtttcagggcaatcaagacagcttcacacccgtggtgaacagtcttgatcctccactcttgacacgataccttcgaatccatccacagtcttgggagcaccagattgcattgcgcatggaagtacttggatgcgaggctcaggacctctac

SEQ ID NO: 1396 - protein, 1457 aa, synthetic construct
  REGION 1..1457: note = Variant of human B-domain deleted Factor VIII
MQIELSTCFFLCLLRFCFSATRRYYLGAVELSWDYMQSDLGELPVDARFPPRVPKSFPFNTSQVYKKTLFVEFTDHLFNIAKPRPPWMGLLGPTIQAEVYDTVVITLKNMASHPVSLHAVGVSYWKASEGAEYDDQTSQREKEDDKVFPGGSHTYVWQVLKENGPMASDPPCLTYSYLSHVDLVKDLNSGLIGALLVCREGSLAKEKTQTLHKFILLFAVFDEGKSWHSETKNSLMQDRDAASARAWPKMHTVNGYVNRTLPGLIGCHRKSVYWHVIGMGTTPEVHSIFLEGHTFLVRNHRQASLGISPITFLTAQTLLMDLGQFLLFCHIPSHQHDGMEAYVKVDSCPEEPQLRMKNNEEAEDYDDDLTDSEMDVVRFDDDNSPSIIQARSGAKKHPKTWVHYIAAEEEDWDYAPLVLAPDDRSYKSQYLNNGPQRIGRKYKKVRFMAYTDETFKTREAIQHESGILGPLLYGEVGDTLLIIFKNQASRPYNIYPHGITDVRPLYSRRLPKGVKHLKDFPILPGEIFKYKWTVTVEDGPTKSDPRCLTRYYSSFVNMERDLASGLIGPLLICYKESVDQRGNQIMSDKRNVILFSVFDENRSWYLTENIQRFLPNPAGVQLEDPEFQASNIMHSINGYVFDSLQLSVCLHEVAYWYILSIGAQTDFLSVFFSGYTFKHKMVYEDTLTLFPFSGETVFMSMENPGLWILGCHNSDFRNRGMTALLKVSSCDWNTDDYYEDSYEDISAYFDSKNNAIEPRSFSQNPPVLKRHQREGTRTTLQSDQEEIDYDDTISVEMKKEDFDIYDEDENQSPRSFQKKTRHYFIAAVERLWDYGMSSSPHVLRNRAQSGSVPQFKKVVFQEFTDGSFTQPLYRGELNEHLGLLGPYIRAEVEDNIMVTFRNQASRPYSFYSSLISYEEDQRQGAEPRKNFVKPNETKTYFWKVQHHMAPTKDEFDCKAWAYFSDVDLEKDVHSGLIGPLLVCHTNTLNPAHGRQVTVQEFALFFTIFDETKSWYFTENMERNCRAPCNIQMEDPTFKENYRFHAINGYIMDTLPGLVMAQDQRIRWYLLSMGSNENIHSIHFSGHVFTVRKKEEYKMALYNLYPGVFETVEMLPSKAGIWRVECLIGEHLHAGMSTLFLVYSNKCQNPLGMASGHIRDFQITASGQYGQWAPKLARLHYSGSINAWSTKEPFSWIKVDLLAPMIIHGIKTQGARQKFSSLYISQFIIMYSLDGKKWQTYRGNSTGTDMVFFGNVDSSGIKHNIFNPPIIARYIRLHPTHYSIRSTLRMELMGCDLNSCSMPLGMESKAISDAQITASSYFTNMFATWSPSKARLHLQGRSNAWRPQVNNPKEWLQVDFQKTMKVTGVTTQGVKSLDTSMYVKEFLISSSQDGHQWTLFFQNGKVKVFQGNQDSFTPVVNSLDPPLLTRYLRIHPQSWEHQIALRMEVLGCEAQDLY

SEQ ID NO: 1397 - DNA, 4371 bp, synthetic construct
  misc_feature 1..4371: note = Variant of human B-domain deleted Factor VIII
  source 1..4371: mol_type = other DNA
atgcagattgaactgtctacctgcttcttcctctgtttgctgaggttctgctttagcgccactagacggtactaccttggcgctgtggagctgtcctgggactatatgcagagtgatttgggagagcttcccgtcgacgcacgatttcctcctcgcgttccaaagtcatttccctttaacacaagccaggtgtacaagaagacgctcttcgtcgaattcaccgatcacctgttcaatatcgccaaacccagaccaccatggatgggtcttttggggcctaccatacaagcggaggtgtatgacacagttgttatcactctcaagaacatggcttctcatccggtaagtcttcacgcagtgggcgtgtcctactggaaagcttcagaaggagccgagtatgatgatcagacatcccagagggagaaagaagacgacaaggtatttccaggtgggtctcatacctatgtgtggcaagtgctcaaagagaatggccctatggcaagcgatccgccgtgtttgacttacagctacctttcacacgttgacctcgtcaaggacctcaactccgggttgattggagccttgttggtatgcagggaaggatctcttgccaaagagaagacacagaccctccacaagtttatccttctctttgctgtgttcgatgagggcaaaagttggcatagcgaaacgaagaattccctcatgcaggatcgcgacgcagccagcgccagagcttggcccaagatgcacactgtgaacggatatgtcaataggacgcttcctggcttgattgggtgtcatcggaaaagtgtctactggcacgtgatcggaatggggacaacaccagaggtccactccatatttctcgaaggccataccttccttgttcgaaaccacagacaggcatccttggggatctctcccattacctttctcactgcccaaacgctccttatggacttgggtcagttccttctcttttgccatatcccgtcacaccagcatgatggtatggaagcttatgtgaaagtcgacagttgtcctgaggagccacagttgcgcatgaagaataatgaagaagccgaggattacgacgacgatctcaccgattctgagatggacgtggtgaggtttgatgacgacaactctccctccatcattcaagctcggagcggggcgaagaaacaccccaagacttgggtccactatatagcggcggaagaggaggattgggattacgctcctcttgtattggcaccagatgaccgctcatacaaaagccagtacctcaacaacggaccgcagagaattggccggaagtataagaaagtgcgatttatggcctatacagacgaaacctttaagacaagggaggccatccagcatgagagtgggattttgggacctcttctttacggcgaagttggtgataccctcctcatcatcttcaagaatcaagcttctcgcccctataacatttacccacacgggatcactgacgttaggcctttgtatagcagaagacttcccaaaggcgtgaagcatctcaaagacttccccattttgccaggcgagatctttaagtacaaatggaccgtcacagtggaagatggaccgactaaatcagaccctcgatgccttacgcggtactattcctccttcgtgaatatggagagagatttggcaagcggactcataggaccactcctcatctgttacaaggaatctgtagaccagaggggtaaccagattatgagtgataaacgcaatgtgatcctttttagcgtcttcgacgagaaccggtcctggtacttgaccgagaatatacaaaggttccttcccaaccccgcaggcgttcagttggaagaccctgagtttcaggccagcaatattatgcactcaatcaacggctatgtgtttgatagtctccagctttctgtttgcctccatgaagtagcctattggtacatcttgtcaattggtgctcaaacagacttcctctccgtcttcttctccggctacacctttaagcacaagatggtgtatgaggacactctcacactctttccattttctggagaaaccgtgttcatgagcatggagaatccaggcctttggatcttgggttgccacaacagtgattttcgcaatcggggaatgactgctctcctcaaagtcagcagctgtgattggaacacaggcgactattacgaagggtcttacgaggacataagtgcctactttgactccaagaataacgccattgagcccagatcattctcccagaatcctcccgtgcttaaaaggcatcagcgcgaaggtaccagaactactcttcagtctgatcaagaggagattgactatgacgacaccattagcgtggaaatgaagaaggaggatttcgatatctatgacgaagatgagaaccagtctccgcggagctttcagaagaagacgcgacactacttcattgcagcagtcgaaaggctttgggactacggtatgtcatcatcccctcatgtgttgcgcaatagagctcagagtggaagtgttccacagttcaagaaagtcgtctttcaagagtttacagatggcagcttcacacagcctctctatcggggcgagcttaacgaacatttgggactccttggtccctatatccgagccgaagtggaggacaacattatggttacctttaggaatcaagcctctcgcccctacagcttctactcctccctcatcagttatgaggaggatcagagacaaggcgctgaaccacggaagaactttgtgaaaccgaatgagacgaagacctacttctggaaagtacagcaccacatggcccccacaaaagacgaattcgattgcaaagcatgggcgtatttttcagacgttgacttggagaaagatgtacattcaggacttattggtcctttgttggtgtgtcacactaacactctcaatccagcccatggcaggcaggtgacagtccaggaattcgctcttttctttaccatctttgatgagaccaagtcctggtacttcacggaaaacatggagcgcaattgcagagccccctgtaacatacagatggaggaccctacctttaaggaaaattatcggttccacgcaatcaacggatacattatggatacactccctggccttgtgatggctcaggaccaacgaatcaggtggtacctcctcagcatgggttctaatgagaacatacactccattcacttttcaggacatgtgttcactgtccggaagaaagaagagtataagatggccctctacaatttgtatccaggcgtgtttgagaccgttgaaatgcttccctctaaagctggcatctggagagtagagtgcttgatcggagaacatcttcacgcaggtatgagcaccttgttcctcgtgtacagcaacaaatgtcagaatccacttggcatggccagtggacacattcgcgactttcagatcacagcatctggccagtatggacaatgggccccaaagttggctcgcctccattactccggtagcataaatgcgtggtccactaaagaacctttcagctggattaaggtcgatcttcttgcccccatgatcatccacggcattaagacacagggagcgaggcagaaattctcctccctctacatctcacagttcattattatgtatagtttggacggcaagaagtggcaaacttatagaggtaacagtactggaacagacatggtgttcttcggcaacgttgatagctctggcatcaaacacaacatctttaatcctcccataatagctcggtacatcagattgcatccgacccactacagcattaggagtacactccgaatggagcttatgggttgcgacttgaattcctgttcaatgccactcggaatggagtctaaagccatctctgatgcacagataaccgccagtagctactttacgaacatgtttgctacgtggtcaccctctaaggcaaggcttcatttgcaaggccggtctaatgcctggagacctcaggtgaacaacccgaaagaatggctccaggtggactttcagaagaccatgaaagtaacaggtgtcactactcagggagttaagtccttggatactagcatgtatgtgaaggagttccttatttcctcatcacaagatggccaccagtggaccctcttctttcagaatggtaaggtcaaagtgtttcagggcaatcaagacagcttcacacccgtggtgaacagtcttgatcctccactcttgacacgataccttcgaatccatccacagtcttgggagcaccagattgcattgcgcatggaagtacttggatgcgaggctcaggacctctac

SEQ ID NO: 1398 - protein, 1457 aa, synthetic construct
  REGION 1..1457: note = Variant of human B-domain deleted Factor VIII
MQIELSTCFFLCLLRFCFSATRRYYLGAVELSWDYMQSDLGELPVDARFPPRVPKSFPFNTSQVYKKTLFVEFTDHLFNIAKPRPPWMGLLGPTIQAEVYDTVVITLKNMASHPVSLHAVGVSYWKASEGAEYDDQTSQREKEDDKVFPGGSHTYVWQVLKENGPMASDPPCLTYSYLSHVDLVKDLNSGLIGALLVCREGSLAKEKTQTLHKFILLFAVFDEGKSWHSETKNSLMQDRDAASARAWPKMHTVNGYVNRTLPGLIGCHRKSVYWHVIGMGTTPEVHSIFLEGHTFLVRNHRQASLGISPITFLTAQTLLMDLGQFLLFCHIPSHQHDGMEAYVKVDSCPEEPQLRMKNNEEAEDYDDDLTDSEMDVVRFDDDNSPSIIQARSGAKKHPKTWVHYIAAEEEDWDYAPLVLAPDDRSYKSQYLNNGPQRIGRKYKKVRFMAYTDETFKTREAIQHESGILGPLLYGEVGDTLLIIFKNQASRPYNIYPHGITDVRPLYSRRLPKGVKHLKDFPILPGEIFKYKWTVTVEDGPTKSDPRCLTRYYSSFVNMERDLASGLIGPLLICYKESVDQRGNQIMSDKRNVILFSVFDENRSWYLTENIQRFLPNPAGVQLEDPEFQASNIMHSINGYVFDSLQLSVCLHEVAYWYILSIGAQTDFLSVFFSGYTFKHKMVYEDTLTLFPFSGETVFMSMENPGLWILGCHNSDFRNRGMTALLKVSSCDWNTGDYYEGSYEDISAYFDSKNNAIEPRSFSQNPPVLKRHQREGTRTTLQSDQEEIDYDDTISVEMKKEDFDIYDEDENQSPRSFQKKTRHYFIAAVERLWDYGMSSSPHVLRNRAQSGSVPQFKKVVFQEFTDGSFTQPLYRGELNEHLGLLGPYIRAEVEDNIMVTFRNQASRPYSFYSSLISYEEDQRQGAEPRKNFVKPNETKTYFWKVQHHMAPTKDEFDCKAWAYFSDVDLEKDVHSGLIGPLLVCHTNTLNPAHGRQVTVQEFALFFTIFDETKSWYFTENMERNCRAPCNIQMEDPTFKENYRFHAINGYIMDTLPGLVMAQDQRIRWYLLSMGSNENIHSIHFSGHVFTVRKKEEYKMALYNLYPGVFETVEMLPSKAGIWRVECLIGEHLHAGMSTLFLVYSNKCQNPLGMASGHIRDFQITASGQYGQWAPKLARLHYSGSINAWSTKEPFSWIKVDLLAPMIIHGIKTQGARQKFSSLYISQFIIMYSLDGKKWQTYRGNSTGTDMVFFGNVDSSGIKHNIFNPPIIARYIRLHPTHYSIRSTLRMELMGCDLNSCSMPLGMESKAISDAQITASSYFTNMFATWSPSKARLHLQGRSNAWRPQVNNPKEWLQVDFQKTMKVTGVTTQGVKSLDTSMYVKEFLISSSQDGHQWTLFFQNGKVKVFQGNQDSFTPVVNSLDPPLLTRYLRIHPQSWEHQIALRMEVLGCEAQDLY

SEQ ID NO: 1399 - DNA, 4371 bp, synthetic construct
  misc_feature 1..4371: note = Variant of human B-domain deleted Factor VIII
  source 1..4371: mol_type = other DNA
atgcagattgaactgtctacctgcttcttcctctgtttgctgaggttctgctttagcgccactagacggtactaccttggcgctgtggagctgtcctgggactatatgcagagtgatttgggagagcttcccgtcgacgcacgatttcctcctcgcgttccaaagtcatttccctttaacacaagccaggtgtacaagaagacgctcttcgtcgaattcaccgatcacctgttcaatatcgccaaacccagaccaccatggatgggtcttttggggcctaccatacaagcggaggtgtatgacacagttgttatcactctcaagaacatggcttctcatccggtaagtcttcacgcagtgggcgtgtcctactggaaagcttcagaaggagccgagtatgatgatcagacatcccagagggagaaagaagacgacaaggtatttccaggtgggtctcatacctatgtgtggcaagtgctcaaagagaatggccctatggcaagcgatccgccgtgtttgacttacagctacctttcacacgttgacctcgtcaaggacctcaactccgggttgattggagccttgttggtatgcagggaaggatctcttgccaaagagaagacacagaccctccacaagtttatccttctctttgctgtgttcgatgagggcaaaagttggcatagcgaaacgaagaattccctcatgcaggatcgcgacgcagccagcgccagagcttggcccaagatgcacactgtgaacggatatgtcaataggacgcttcctggcttgattgggtgtcatcggaaaagtgtctactggcacgtgatcggaatggggacaacaccagaggtccactccatatttctcgaaggccataccttccttgttcgaaaccacagacaggcatccttggggatctctcccattacctttctcactgcccaaacgctccttatggacttgggtcagttccttctcttttgccatatcccgtcacaccagcatgatggtatggaagcttatgtgaaagtcgacagttgtcctgaggagccacagttgcgcatgaagaataatgaagaagccgaggattacgacgacgatctcaccgattctgagatggacgtggtgaggtttgatgacgacaactctccctccatcattcaagctcggagcggggcgaagaaacaccccaagacttgggtccactatatagcggcggaagaggaggattgggattacgctcctcttgtattggcaccagatgaccgctcatacaaaagccagtacctcaacaacggaccgcagagaattggccggaagtataagaaagtgcgatttatggcctatacagacgaaacctttaagacaagggaggccatccagcatgagagtgggattttgggacctcttctttacggcgaagttggtgataccctcctcatcatcttcaagaatcaagcttctcgcccctataacatttacccacacgggatcactgacgttaggcctttgtatagcagaagacttcccaaaggcgtgaagcatctcaaagacttccccattttgccaggcgagatctttaagtacaaatggaccgtcacagtggaagatggaccgactaaatcagaccctcgatgccttacgcggtactattcctccttcgtgaatatggagagagatttggcaagcggactcataggaccactcctcatctgttacaaggaatctgtagaccagaggggtaaccagattatgagtgataaacgcaatgtgatcctttttagcgtcttcgacgagaaccggtcctggtacttgaccgagaatatacaaaggttccttcccaaccccgcaggcgttcagttggaagaccctgagtttcaggccagcaatattatgcactcaatcaacggctatgtgtttgatagtctccagctttctgtttgcctccatgaagtagcctattggtacatcttgtcaattggtgctcaaacagacttcctctccgtcttcttctccggctacacctttaagcacaagatggtgtatgaggacactctcacactctttccattttctggagaaaccgtgtatatgagcatggagaatccaggcctttggatcttgggttgccacaacagtgattttcgcaatcggggaatgactgctctcctcaaagtcagcagctgtgattggaacacaggcgactattacgaagattcttacgaggacataagtgcctactttgactccaagaataacgccattgagcccagatcattctcccagaatcctcccgtgcttaaaaggcatcagcgcgaaggtaccagaactactcttcagtctgatcaagaggagattgactatgacgacaccattagcgtggaaatgaagaaggaggatttcgatatctatgacgaagatgagaaccagtctccgcggagctttcagaagaagacgcgacactacttcattgcagcagtcgaaaggctttgggactacggtatgtcatcatcccctcatgtgttgcgcaatagagctcagagtggaagtgttccacagttcaagaaagtcgtctttcaagagtttacagatggcagcttcacacagcctctctatcggggcgagcttaacgaacatttgggactccttggtccctatatccgagccgaagtggaggacaacattatggttacctttaggaatcaagcctctcgcccctacagcttctactcctccctcatcagttatgaggaggatcagagacaaggcgctgaaccacggaagaactttgtgaaaccgaatgagacgaagacctacttctggaaagtacagcaccacatggcccccacaaaagacgaattcgattgcaaagcatgggcgtatttttcagacgttgacttggagaaagatgtacattcaggacttattggtcctttgttggtgtgtcacactaacactctcaatccagcccatggcaggcaggtgacagtccaggaattcgctcttttctttaccatctttgatgagaccaagtcctggtacttcacggaaaacatggagcgcaattgcagagccccctgtaacatacagatggaggaccctacctttaaggaaaattatcggttccacgcaatcaacggatacattatggatacactccctggccttgtgatggctcaggaccaacgaatcaggtggtacctcctcagcatgggttctaatgagaacatacactccattcacttttcaggacatgtgttcactgtccggaagaaagaagagtataagatggccctctacaatttgtatccaggcgtgtttgagaccgttgaaatgcttccctctaaagctggcatctggagagtagagtgcttgatcggagaacatcttcacgcaggtatgagcaccttgttcctcgtgtacagcaacaaatgtcagaatccacttggcatggccagtggacacattcgcgactttcagatcacagcatctggccagtatggacaatgggccccaaagttggctcgcctccattactccggtagcataaatgcgtggtccactaaagaacctttcagctggattaaggtcgatcttcttgcccccatgatcatccacggcattaagacacagggagcgaggcagaaattctcctccctctacatctcacagttcattattatgtatagtttggacggcaagaagtggcaaacttatagaggtaacagtactggaacagacatggtgttcttcggcaacgttgatagctctggcatcaaacacaacatctttaatcctcccataatagctcggtacatcagattgcatccgacccactacagcattaggagtacactccgaatggagcttatgggttgcgacttgaattcctgttcaatgccactcggaatggagtctaaagccatctctgatgcacagataaccgccagtagctactttacgaacatgtttgctacgtggtcaccctctaaggcaaggcttcatttgcaaggccggtctaatgcctggagacctcaggtgaacaacccgaaagaatggctccaggtggactttcagaagaccatgaaagtaacaggtgtcactactcagggagttaagtccttggatactagcatgtatgtgaaggagttccttatttcctcatcacaagatggccaccagtggaccctcttctttcagaatggtaaggtcaaagtgtttcagggcaatcaagacagcttcacacccgtggtgaacagtcttgatcctccactcttgacacgataccttcgaatccatccacagtcttgggagcaccagattgcattgcgcatggaagtacttggatgcgaggctcaggacctctac

SEQ ID NO: 1400 - protein, 1457 aa, synthetic construct
  REGION 1..1457: note = Variant of human B-domain deleted Factor VIII
MQIELSTCFFLCLLRFCFSATRRYYLGAVELSWDYMQSDLGELPVDARFPPRVPKSFPFNTSQVYKKTLFVEFTDHLFNIAKPRPPWMGLLGPTIQAEVYDTVVITLKNMASHPVSLHAVGVSYWKASEGAEYDDQTSQREKEDDKVFPGGSHTYVWQVLKENGPMASDPPCLTYSYLSHVDLVKDLNSGLIGALLVCREGSLAKEKTQTLHKFILLFAVFDEGKSWHSETKNSLMQDRDAASARAWPKMHTVNGYVNRTLPGLIGCHRKSVYWHVIGMGTTPEVHSIFLEGHTFLVRNHRQASLGISPITFLTAQTLLMDLGQFLLFCHIPSHQHDGMEAYVKVDSCPEEPQLRMKNNEEAEDYDDDLTDSEMDVVRFDDDNSPSIIQARSGAKKHPKTWVHYIAAEEEDWDYAPLVLAPDDRSYKSQYLNNGPQRIGRKYKKVRFMAYTDETFKTREAIQHESGILGPLLYGEVGDTLLIIFKNQASRPYNIYPHGITDVRPLYSRRLPKGVKHLKDFPILPGEIFKYKWTVTVEDGPTKSDPRCLTRYYSSFVNMERDLASGLIGPLLICYKESVDQRGNQIMSDKRNVILFSVFDENRSWYLTENIQRFLPNPAGVQLEDPEFQASNIMHSINGYVFDSLQLSVCLHEVAYWYILSIGAQTDFLSVFFSGYTFKHKMVYEDTLTLFPFSGETVYMSMENPGLWILGCHNSDFRNRGMTALLKVSSCDWNTGDYYEDSYEDISAYFDSKNNAIEPRSFSQNPPVLKRHQREGTRTTLQSDQEEIDYDDTISVEMKKEDFDIYDEDENQSPRSFQKKTRHYFIAAVERLWDYGMSSSPHVLRNRAQSGSVPQFKKVVFQEFTDGSFTQPLYRGELNEHLGLLGPYIRAEVEDNIMVTFRNQASRPYSFYSSLISYEEDQRQGAEPRKNFVKPNETKTYFWKVQHHMAPTKDEFDCKAWAYFSDVDLEKDVHSGLIGPLLVCHTNTLNPAHGRQVTVQEFALFFTIFDETKSWYFTENMERNCRAPCNIQMEDPTFKENYRFHAINGYIMDTLPGLVMAQDQRIRWYLLSMGSNENIHSIHFSGHVFTVRKKEEYKMALYNLYPGVFETVEMLPSKAGIWRVECLIGEHLHAGMSTLFLVYSNKCQNPLGMASGHIRDFQITASGQYGQWAPKLARLHYSGSINAWSTKEPFSWIKVDLLAPMIIHGIKTQGARQKFSSLYISQFIIMYSLDGKKWQTYRGNSTGTDMVFFGNVDSSGIKHNIFNPPIIARYIRLHPTHYSIRSTLRMELMGCDLNSCSMPLGMESKAISDAQITASSYFTNMFATWSPSKARLHLQGRSNAWRPQVNNPKEWLQVDFQKTMKVTGVTTQGVKSLDTSMYVKEFLISSSQDGHQWTLFFQNGKVKVFQGNQDSFTPVVNSLDPPLLTRYLRIHPQSWEHQIALRMEVLGCEAQDLY

SEQ ID NO: 1401 - DNA, 4371 bp, synthetic construct
  misc_feature 1..4371: note = Variant of human B-domain deleted Factor VIII
  source 1..4371: mol_type = other DNA
atgcagattgaactgtctacctgcttcttcctctgtttgctgaggttctgctttagcgccactagacggtactaccttggcgctgtggagctgtcctgggactatatgcagagtgatttgggagagcttcccgtcgacgcacgatttcctcctcgcgttccaaagtcatttccctttaacacaagccaggtgtacaagaagacgctcttcgtcgaattcaccgatcacctgttcaatatcgccaaacccagaccaccatggatgggtcttttggggcctaccatacaagcggaggtgtatgacacagttgttatcactctcaagaacatggcttctcatccggtaagtcttcacgcagtgggcgtgtcctactggaaagcttcagaaggagccgagtatgatgatcagacatcccagagggagaaagaagacgacaaggtatttccaggtgggtctcatacctatgtgtggcaagtgctcaaagagaatggccctatggcaagcgatccgccgtgtttgacttacagctacctttcacacgttgacctcgtcaaggacctcaactccgggttgattggagccttgttggtatgcagggaaggatctcttgccaaagagaagacacagaccctccacaagtttatccttctctttgctgtgttcgatgagggcaaaagttggcatagcgaaacgaagaattccctcatgcaggatcgcgacgcagccagcgccagagcttggcccaagatgcacactgtgaacggatatgtcaataggacgcttcctggcttgattgggtgtcatcggaaaagtgtctactggcacgtgatcggaatggggacaacaccagaggtccactccatatttctcgaaggccataccttccttgttcgaaaccacagacaggcatccttggggatctctcccattacctttctcactgcccaaacgctccttatggacttgggtcagttccttctcttttgccatatcccgtcacaccagcatgatggtatggaagcttatgtgaaagtcgacagttgtcctgaggagccacagttgcgcatgaagaataatgaagaagccgaggattacgacgacgatctcaccgattctgagatggacgtggtgaggtttgatgacgacaactctccctccatcattcaagctcggagcggggcgaagaaacaccccaagacttgggtccactatatagcggcggaagaggaggattgggattacgctcctcttgtattggcaccagatgaccgctcatacaaaagccagtacctcaacaacggaccgcagagaattggccggaagtataagaaagtgcgatttatggcctatacagacgaaacctttaagacaagggaggccatccagcatgagagtgggattttgggacctcttctttacggcgaagttggtgataccctcctcatcatcttcaagaatcaagcttctcgcccctataacatttacccacacgggatcactgacgttaggcctttgtatagcagaagacttcccaaaggcgtgaagcatctcaaagacttccccattttgccaggcgagatctttaagtacaaatggaccgtcacagtggaagatggaccgactaaatcagaccctcgatgccttacgcggtactattcctccttcgtgaatatggagagagatttggcaagcggactcataggaccactcctcatctgttacaaggaatctgtagaccagaggggtaaccagattatgagtgataaacgcaatgtgatcctttttagcgtcttcgacgagaaccggtcctggtacttgaccgagaatatacaaaggttccttcccaaccccgcaggcgttcagttggaagaccctgagtttcaggccagcaatattatgcactcaatcaacggctatgtgtttgatagtctccagctttctgtttgcctccatgaagtagcctattggtacatcttgtcaattggtgctcaaacagacttcctctccgtcttcttctccggctacacctttaagcacaagatggtgtatgaggacactctcacactctttccattttctggagaaaccgtgttcatgagcatggagaatccaggcctttggatcttgggttgccacaacagtgattttcgcaatcggggaatgactgctctcctcaaagtcagcagctgtgattggaacacaggcgactattacgaagattcttacgaggacataagtgcctactttgactccaagaataacgccattgggcccagatcattctcccagaatcctcccgtgcttaaaaggcatcagcgcgaaggtaccagaactactcttcagtctgatcaagaggagattgactatgacgacaccattagcgtggaaatgaagaaggaggatttcgatatctatgacgaagatgagaaccagtctccgcggagctttcagaagaagacgcgacactacttcattgcagcagtcgaaaggctttgggactacggtatgtcatcatcccctcatgtgttgcgcaatagagctcagagtggaagtgttccacagttcaagaaagtcgtctttcaagagtttacagatggcagcttcacacagcctctctatcggggcgagcttaacgaacatttgggactccttggtccctatatccgagccgaagtggaggacaacattatggttacctttaggaatcaagcctctcgcccctacagcttctactcctccctcatcagttatgaggaggatcagagacaaggcgctgaaccacggaagaactttgtgaaaccgaatgagacgaagacctacttctggaaagtacagcaccacatggcccccacaaaagacgaattcgattgcaaagcatgggcgtatttttcagacgttgacttggagaaagatgtacattcaggacttattggtcctttgttggtgtgtcacactaacactctcaatccagcccatggcaggcaggtgacagtccaggaattcgctcttttctttaccatctttgatgagaccaagtcctggtacttcacggaaaacatggagcgcaattgcagagccccctgtaacatacagatggaggaccctacctttaaggaaaattatcggttccacgcaatcaacggatacattatggatacactccctggccttgtgatggctcaggaccaacgaatcaggtggtacctcctcagcatgggttctaatgagaacatacactccattcacttttcaggacatgtgttcactgtccggaagaaagaagagtataagatggccctctacaatttgtatccaggcgtgtttgagaccgttgaaatgcttccctctaaagctggcatctggagagtagagtgcttgatcggagaacatcttcacgcaggtatgagcaccttgttcctcgtgtacagcaacaaatgtcagaatccacttggcatggccagtggacacattcgcgactttcagatcacagcatctggccagtatggacaatgggccccaaagttggctcgcctccattactccggtagcataaatgcgtggtccactaaagaacctttcagctggattaaggtcgatcttcttgcccccatgatcatccacggcattaagacacagggagcgaggcagaaattctcctccctctacatctcacagttcattattatgtatagtttggacggcaagaagtggcaaacttatagaggtaacagtactggaacagacatggtgttcttcggcaacgttgatagctctggcatcaaacacaacatctttaatcctcccataatagctcggtacatcagattgcatccgacccactacagcattaggagtacactccgaatggagcttatgggttgcgacttgaattcctgttcaatgccactcggaatggagtctaaagccatctctgatgcacagataaccgccagtagctactttacgaacatgtttgctacgtggtcaccctctaaggcaaggcttcatttgcaaggccggtctaatgcctggagacctcaggtgaacaacccgaaagaatggctccaggtggactttcagaagaccatgaaagtaacaggtgtcactactcagggagttaagtccttggatactagcatgtatgtgaaggagttccttatttcctcatcacaagatggccaccagtggaccctcttctttcagaatggtaaggtcaaagtgtttcagggcaatcaagacagcttcacacccgtggtgaacagtcttgatcctccactcttgacacgataccttcgaatccatccacagtcttgggagcaccagattgcattgcgcatggaagtacttggatgcgaggctcaggacctctac

SEQ ID NO: 1402 - protein, 1457 aa, synthetic construct
  REGION 1..1457: note = Variant of human B-domain deleted Factor VIII
MQIELSTCFFLCLLRFCFSATRRYYLGAVELSWDYMQSDLGELPVDARFPPRVPKSFPFNTSQVYKKTLFVEFTDHLFNIAKPRPPWMGLLGPTIQAEVYDTVVITLKNMASHPVSLHAVGVSYWKASEGAEYDDQTSQREKEDDKVFPGGSHTYVWQVLKENGPMASDPPCLTYSYLSHVDLVKDLNSGLIGALLVCREGSLAKEKTQTLHKFILLFAVFDEGKSWHSETKNSLMQDRDAASARAWPKMHTVNGYVNRTLPGLIGCHRKSVYWHVIGMGTTPEVHSIFLEGHTFLVRNHRQASLGISPITFLTAQTLLMDLGQFLLFCHIPSHQHDGMEAYVKVDSCPEEPQLRMKNNEEAEDYDDDLTDSEMDVVRFDDDNSPSIIQARSGAKKHPKTWVHYIAAEEEDWDYAPLVLAPDDRSYKSQYLNNGPQRIGRKYKKVRFMAYTDETFKTREAIQHESGILGPLLYGEVGDTLLIIFKNQASRPYNIYPHGITDVRPLYSRRLPKGVKHLKDFPILPGEIFKYKWTVTVEDGPTKSDPRCLTRYYSSFVNMERDLASGLIGPLLICYKESVDQRGNQIMSDKRNVILFSVFDENRSWYLTENIQRFLPNPAGVQLEDPEFQASNIMHSINGYVFDSLQLSVCLHEVAYWYILSIGAQTDFLSVFFSGYTFKHKMVYEDTLTLFPFSGETVFMSMENPGLWILGCHNSDFRNRGMTALLKVSSCDWNTGDYYEDSYEDISAYFDSKNNAIGPRSFSQNPPVLKRHQREGTRTTLQSDQEEIDYDDTISVEMKKEDFDIYDEDENQSPRSFQKKTRHYFIAAVERLWDYGMSSSPHVLRNRAQSGSVPQFKKVVFQEFTDGSFTQPLYRGELNEHLGLLGPYIRAEVEDNIMVTFRNQASRPYSFYSSLISYEEDQRQGAEPRKNFVKPNETKTYFWKVQHHMAPTKDEFDCKAWAYFSDVDLEKDVHSGLIGPLLVCHTNTLNPAHGRQVTVQEFALFFTIFDETKSWYFTENMERNCRAPCNIQMEDPTFKENYRFHAINGYIMDTLPGLVMAQDQRIRWYLLSMGSNENIHSIHFSGHVFTVRKKEEYKMALYNLYPGVFETVEMLPSKAGIWRVECLIGEHLHAGMSTLFLVYSNKCQNPLGMASGHIRDFQITASGQYGQWAPKLARLHYSGSINAWSTKEPFSWIKVDLLAPMIIHGIKTQGARQKFSSLYISQFIIMYSLDGKKWQTYRGNSTGTDMVFFGNVDSSGIKHNIFNPPIIARYIRLHPTHYSIRSTLRMELMGCDLNSCSMPLGMESKAISDAQITASSYFTNMFATWSPSKARLHLQGRSNAWRPQVNNPKEWLQVDFQKTMKVTGVTTQGVKSLDTSMYVKEFLISSSQDGHQWTLFFQNGKVKVFQGNQDSFTPVVNSLDPPLLTRYLRIHPQSWEHQIALRMEVLGCEAQDLY

SEQ ID NO: 1403 - DNA, 4371 bp, synthetic construct
  misc_feature 1..4371: note = Variant of human B-domain deleted Factor VIII
  source 1..4371: mol_type = other DNA
atgcagattgaactgtctacctgcttcttcctctgtttgctgaggttctgctttagcgccactagacggtactaccttggcgctgtggagctgtcctgggactatatgcagagtgatttgggagagcttcccgtcgacgcacgatttcctcctcgcgttccaaagtcatttccctttaacacaagccaggtgtacaagaagacgctcttcgtcgaattcaccgatcacctgttcaatatcgccaaacccagaccaccatggatgggtcttttggggcctaccatacaagcggaggtgtatgacacagttgttatcactctcaagaacatggcttctcatccggtaagtcttcacgcagtgggcgtgtcctactggaaagcttcagaaggagccgagtatgatgatcagacatcccagagggagaaagaagacgacaaggtatttccaggtgggtctcatacctatgtgtggcaagtgctcaaagagaatggccctatggcaagcgatccgccgtgtttgacttacagctacctttcacacgttgacctcgtcaaggacctcaactccgggttgattggagccttgttggtatgcagggaaggatctcttgccaaagagaagacacagaccctccacaagtttatccttctctttgctgtgttcgatgagggcaaaagttggcatagcgaaacgaagaattccctcatgcaggatcgcgacgcagccagcgccagagcttggcccaagatgcacactgtgaacggatatgtcaataggacgcttcctggcttgattgggtgtcatcggaaaagtgtctactggcacgtgatcggaatggggacaacaccagaggtccactccatatttctcgaaggccataccttccttgttcgaaaccacagacaggcatccttggggatctctcccattacctttctcactgcccaaacgctccttatggacttgggtcagttccttctcttttgccatatcccgtcacaccagcatgatggtatggaagcttatgtgaaagtcgacagttgtcctgaggagccacagttgcgcatgaagaataatgaagaagccgaggattacgacgacgatctcaccgattctgagatggacgtggtgaggtttgatgacgacaactctccctccatcattcaagctcggagcggggcgaagaaacaccccaagacttgggtccactatatagcggcggaagaggaggattgggattacgctcctcttgtattggcaccagatgaccgctcatacaaaagccagtacctcaacaacggaccgcagagaattggccggaagtataagaaagtgcgatttatggcctatacagacgaaacctttaagacaagggaggccatccagcatgagagtgggattttgggacctcttctttacggcgaagttggtgataccctcctcatcatcttcaagaatcaagcttctcgcccctataacatttacccacacgggatcactgacgttaggcctttgtatagcagaagacttcccaaaggcgtgaagcatctcaaagacttccccattttgccaggcgagatctttaagtacaaatggaccgtcacagtggaagatggaccgactaaatcagaccctcgatgccttacgcggtactattcctccttcgtgaatatggagagagatttggcaagcggactcataggaccactcctcatctgttacaaggaatctgtagaccagaggggtaaccagattatgagtgataaacgcaatgtgatcctttttagcgtcttcgacgagaaccggtcctggtacttgaccgagaatatacaaaggttccttcccaaccccgcaggcgttcagttggaagaccctgagtttcaggccagcaatattatgcactcaatcaacggctatgtgtttgatagtctccagctttctgtttgcctccatgaagtagcctattggtacatcttgtcaattggtgctcaaacagacttcctctccgtcttcttctccggctacacctttaagcacaagatggtgtatgaggacactctcacactctttccattttctggagaaaccgtgttcatgagcatggagaatccaggcctttggatcttgggttgccacaacagtgattttcgcaatcggggaatgactgctctcctcaaagtcagcagctgtgattggaacacaggcgactattacgaagattcttacgaggacataagtgcctactttgactccaagaataacgccattgagcccagatcattctcccagaatcctcccgtgcttaaaaggcatcagcgcgaaggtaccagaactactcttcagtctgatcaagaggagattgactatgacacgaccattagcgtggaaatgaagaaggaggatttcgatatctatgacgaagatgagaaccagtctccgcggagctttcagaagaagacgcgacactacttcattgcagcagtcgaaaggctttgggactacggtatgtcatcatcccctcatgtgttgcgcaatagagctcagagtggaagtgttccacagttcaagaaagtcgtctttcaagagtttacagatggcagcttcacacagcctctctatcggggcgagcttaacgaacatttgggactccttggtccctatatccgagccgaagtggaggacaacattatggttacctttaggaatcaagcctctcgcccctacagcttctactcctccctcatcagttatgaggaggatcagagacaaggcgctgaaccacggaagaactttgtgaaaccgaatgagacgaagacctacttctggaaagtacagcaccacatggcccccacaaaagacgaattcgattgcaaagcatgggcgtatttttcagacgttgacttggagaaagatgtacattcaggacttattggtcctttgttggtgtgtcacactaacactctcaatccagcccatggcaggcaggtgacagtccaggaattcgctcttttctttaccatctttgatgagaccaagtcctggtacttcacggaaaacatggagcgcaattgcagagccccctgtaacatacagatggaggaccctacctttaaggaaaattatcggttccacgcaatcaacggatacattatggatacactccctggccttgtgatggctcaggaccaacgaatcaggtggtacctcctcagcatgggttctaatgagaacatacactccattcacttttcaggacatgtgttcactgtccggaagaaagaagagtataagatggccctctacaatttgtatccaggcgtgtttgagaccgttgaaatgcttccctctaaagctggcatctggagagtagagtgcttgatcggagaacatcttcacgcaggtatgagcaccttgttcctcgtgtacagcaacaaatgtcagaatccacttggcatggccagtggacacattcgcgactttcagatcacagcatctggccagtatggacaatgggccccaaagttggctcgcctccattactccggtagcataaatgcgtggtccactaaagaacctttcagctggattaaggtcgatcttcttgcccccatgatcatccacggcattaagacacagggagcgaggcagaaattctcctccctctacatctcacagttcattattatgtatagtttggacggcaagaagtggcaaacttatagaggtaacagtactggaacagacatggtgttcttcggcaacgttgatagctctggcatcaaacacaacatctttaatcctcccataatagctcggtacatcagattgcatccgacccactacagcattaggagtacactccgaatggagcttatgggttgcgacttgaattcctgttcaatgccactcggaatggagtctaaagccatctctgatgcacagataaccgccagtagctactttacgaacatgtttgctacgtggtcaccctctaaggcaaggcttcatttgcaaggccggtctaatgcctggagacctcaggtgaacaacccgaaagaatggctccaggtggactttcagaagaccatgaaagtaacaggtgtcactactcagggagttaagtccttggatactagcatgtatgtgaaggagttccttatttcctcatcacaagatggccaccagtggaccctcttctttcagaatggtaaggtcaaagtgtttcagggcaatcaagacagcttcacacccgtggtgaacagtcttgatcctccactcttgacacgataccttcgaatccatccacagtcttgggagcaccagattgcattgcgcatggaagtacttggatgcgaggctcaggacctctac

SEQ ID NO: 1404 - protein, 1457 aa, synthetic construct
  REGION 1..1457: note = Variant of human B-domain deleted Factor VIII
MQIELSTCFFLCLLRFCFSATRRYYLGAVELSWDYMQSDLGELPVDARFPPRVPKSFPFNTSQVYKKTLFVEFTDHLFNIAKPRPPWMGLLGPTIQAEVYDTVVITLKNMASHPVSLHAVGVSYWKASEGAEYDDQTSQREKEDDKVFPGGSHTYVWQVLKENGPMASDPPCLTYSYLSHVDLVKDLNSGLIGALLVCREGSLAKEKTQTLHKFILLFAVFDEGKSWHSETKNSLMQDRDAASARAWPKMHTVNGYVNRTLPGLIGCHRKSVYWHVIGMGTTPEVHSIFLEGHTFLVRNHRQASLGISPITFLTAQTLLMDLGQFLLFCHIPSHQHDGMEAYVKVDSCPEEPQLRMKNNEEAEDYDDDLTDSEMDVVRFDDDNSPSIIQARSGAKKHPKTWVHYIAAEEEDWDYAPLVLAPDDRSYKSQYLNNGPQRIGRKYKKVRFMAYTDETFKTREAIQHESGILGPLLYGEVGDTLLIIFKNQASRPYNIYPHGITDVRPLYSRRLPKGVKHLKDFPILPGEIFKYKWTVTVEDGPTKSDPRCLTRYYSSFVNMERDLASGLIGPLLICYKESVDQRGNQIMSDKRNVILFSVFDENRSWYLTENIQRFLPNPAGVQLEDPEFQASNIMHSINGYVFDSLQLSVCLHEVAYWYILSIGAQTDFLSVFFSGYTFKHKMVYEDTLTLFPFSGETVFMSMENPGLWILGCHNSDFRNRGMTALLKVSSCDWNTGDYYEDSYEDISAYFDSKNNAIEPRSFSQNPPVLKRHQREGTRTTLQSDQEEIDYDTTISVEMKKEDFDIYDEDENQSPRSFQKKTRHYFIAAVERLWDYGMSSSPHVLRNRAQSGSVPQFKKVVFQEFTDGSFTQPLYRGELNEHLGLLGPYIRAEVEDNIMVTFRNQASRPYSFYSSLISYEEDQRQGAEPRKNFVKPNETKTYFWKVQHHMAPTKDEFDCKAWAYFSDVDLEKDVHSGLIGPLLVCHTNTLNPAHGRQVTVQEFALFFTIFDETKSWYFTENMERNCRAPCNIQMEDPTFKENYRFHAINGYIMDTLPGLVMAQDQRIRWYLLSMGSNENIHSIHFSGHVFTVRKKEEYKMALYNLYPGVFETVEMLPSKAGIWRVECLIGEHLHAGMSTLFLVYSNKCQNPLGMASGHIRDFQITASGQYGQWAPKLARLHYSGSINAWSTKEPFSWIKVDLLAPMIIHGIKTQGARQKFSSLYISQFIIMYSLDGKKWQTYRGNSTGTDMVFFGNVDSSGIKHNIFNPPIIARYIRLHPTHYSIRSTLRMELMGCDLNSCSMPLGMESKAISDAQITASSYFTNMFATWSPSKARLHLQGRSNAWRPQVNNPKEWLQVDFQKTMKVTGVTTQGVKSLDTSMYVKEFLISSSQDGHQWTLFFQNGKVKVFQGNQDSFTPVVNSLDPPLLTRYLRIHPQSWEHQIALRMEVLGCEAQDLY

SEQ ID NO: 1405 - DNA, 4371 bp, synthetic construct
  misc_feature 1..4371: note = Variant of human B-domain deleted Factor VIII
  source 1..4371: mol_type = other DNA
atgcagattgaactgtctacctgcttcttcctctgtttgctgaggttctgctttagcgccactagacggtactaccttggcgctgtggagctgtcctgggactatatgcagagtgatttgggagagcttcccgtcgacgcacgatttcctcctcgcgttccaaagtcatttccctttaacacaagccaggtgtacaagaagacgctcttcgtcgaattcaccgatcacctgttcaatatcgccaaacccagaccaccatggatgggtcttttggggcctaccatacaagcggaggtgtatgacacagttgttatcactctcaagaacatggcttctcatccggtaagtcttcacgcagtgggcgtgtcctactggaaagcttcagaaggagccgagtatgatgatcagacatcccagagggagaaagaagacgacaaggtatttccaggtgggtctcatacctatgtgtggcaagtgctcaaagagaatggccctatggcaagcgatccgccgtgtttgacttacagctacctttcacacgttgacctcgtcaaggacctcaactccgggttgattggagccttgttggtatgcagggaaggatctcttgccaaagagaagacacagaccctccacaagtttatccttctctttgctgtgttcgatgagggcaaaagttggcatagcgaaacgaagaattccctcatgcaggatcgcgacgcagccagcgccagagcttggcccaagatgcacactgtgaacggatatgtcaataggacgcttcctggcttgattgggtgtcatcggaaaagtgtctactggcacgtgatcggaatggggacaacaccagaggtccactccatatttctcgaaggccataccttccttgttcgaaaccacagacaggcatccttggggatctctcccattacctttctcactgcccaaacgctccttatggacttgggtcagttccttctcttttgccatatcccgtcacaccagcatgatggtatggaagcttatgtgaaagtcgacagttgtcctgaggagccacagttgcgcatgaagaataatgaagaagccgaggattacgacgacgatctcaccgattctgagatggacgtggtgaggtttgatgacgacaactctccctccatcattcaagctcggagcggggcgaagaaacaccccaagacttgggtccactatatagcggcggaagaggaggattgggattacgctcctcttgtattggcaccagatgaccgctcatacaaaagccagtacctcaacaacggaccgcagagaattggccggaagtataagaaagtgcgatttatggcctatacagacgaaacctttaagacaagggaggccatccagcatgagagtgggattttgggacctcttctttacggcgaagttggtgataccctcctcatcatcttcaagaatcaagcttctcgcccctataacatttacccacacgggatcactgacgttaggcctttgtatagcagaagacttcccaaaggcgtgaagcatctcaaagacttccccattttgccaggcgagatctttaagtacaaatggaccgtcacagtggaagatggaccgactaaatcagaccctcgatgccttacgcggtactattcctccttcgtgaatatggagagagatttggcaagcggactcataggaccactcctcatctgttacaaggaatctgtagaccagaggggtaaccagattatgagtgataaacgcaatgtgatcctttttagcgtcttcgacgagaaccggtcctggtacttgaccgagaatatacaaaggttccttcccaaccccgcaggcgttcagttggaagaccctgagtttcaggccagcaatattatgcactcaatcaacggctatgtgtttgatagtctccagctttctgtttgcctccatgaagtagcctattggtacatcttgtcaattggtgctcaaacagacttcctctccgtcttcttctccggctacacctttaagcacaagatggtgtatgaggacactctcacactctttccattttctggagaaaccgtgttcatgagcatggagaatccaggcctttggatcttgggttgccacaacagtgattttcgcaatcggggaatgactgctctcctcaaagtcagcagctgtgattggaacacaggcgactattacgaagattcttacgaggacataagtgcctactttgactccaagaataacgccattgagcccagatcattctcccagaatcctcccgtgcttaaaaggcatcagcgcgaaggtaccagaactactcttcagtctgatcaagaggagattgactatgacgacaccattagcgtggaaatgaagaaggaggatttcgatatctatgacgaagatgagaaccagtctccgcggagctttcagaagaagacgcgacactacttcattgcagcagtcgaaaggctttgggactacggtatgtcatcatcccctcatgtgttgcgcaatagagctcagagtggaagtgttccacagttcaagaaagtcgtctttcaagagtttacagatggcagcttcacacagcctctctatcggggcgagcttaacgaacatttgggactccttggtccctatatccgagccgaagtggaggacaacattatggttacctttaggaatcaagcctctcgcccctacagcttctactcctccctcatcagttatgaggaggatcagagacaaggcgctgaaccacggaagaactttgtgaaaccgaatgagacgaagacctacttctggaaagtacagcaccacatggcccccacaaaagacgaattcgattgcaaagcatgggcgtatttttcagacgttgacttggagaaagatgtacattcaggacttattggtcctttgttggtgtgtcacactaacactctcaatccagcccatggcaggcaggtgacagtccaggaattcgctcttttctttaccatctttgatgagaccaagtcctggtacttcacggaaaacatggagcgcaattgcagagccccctgtaacatacagatggaggaccctacctttaaggaaaattatcggttccacgcaatcaacggatacattatggatacactccctggccttgtgatggctcaggaccaacgaatcaggtggtacctcctcagcatgggttctaatgagaacatacactccattcacttttcaggacatgtgttcactgtccggaagaaagaagagtataagatggccctctacaatttgtatccaggcgtgtttgagaccgttgaaatggcgccctctaaagctggcatctggagagtagagtgcttgatcggagaacatcttcacgcaggtatgagcaccttgttcctcgtgtacagcaacaaatgtcagaatccacttggcatggccagtggacacattcgcgactttcagatcacagcatctggccagtatggacaatgggccccaaagttggctcgcctccattactccggtagcataaatgcgtggtccactaaagaacctttcagctggattaaggtcgatcttcttgcccccatgatcatccacggcattaagacacagggagcgaggcagaaattctcctccctctacatctcacagttcattattatgtatagtttggacggcaagaagtggcaaacttatagaggtaacagtactggaacagacatggtgttcttcggcaacgttgatagctctggcatcaaacacaacatctttaatcctcccataatagctcggtacatcagattgcatccgacccactacagcattaggagtacactccgaatggagcttatgggttgcgacttgaattcctgttcaatgccactcggaatggagtctaaagccatctctgatgcacagataaccgccagtagctactttacgaacatgtttgctacgtggtcaccctctaaggcaaggcttcatttgcaaggccggtctaatgcctggagacctcaggtgaacaacccgaaagaatggctccaggtggactttcagaagaccatgaaagtaacaggtgtcactactcagggagttaagtccttggatactagcatgtatgtgaaggagttccttatttcctcatcacaagatggccaccagtggaccctcttctttcagaatggtaaggtcaaagtgtttcagggcaatcaagacagcttcacacccgtggtgaacagtcttgatcctccactcttgacacgataccttcgaatccatccacagtcttgggagcaccagattgcattgcgcatggaagtacttggatgcgaggctcaggacctctac

SEQ ID NO: 1406 - protein, 1457 aa, synthetic construct
  REGION 1..1457: note = Variant of human B-domain deleted Factor VIII
MQIELSTCFFLCLLRFCFSATRRYYLGAVELSWDYMQSDLGELPVDARFPPRVPKSFPFNTSQVYKKTLFVEFTDHLFNIAKPRPPWMGLLGPTIQAEVYDTVVITLKNMASHPVSLHAVGVSYWKASEGAEYDDQTSQREKEDDKVFPGGSHTYVWQVLKENGPMASDPPCLTYSYLSHVDLVKDLNSGLIGALLVCREGSLAKEKTQTLHKFILLFAVFDEGKSWHSETKNSLMQDRDAASARAWPKMHTVNGYVNRTLPGLIGCHRKSVYWHVIGMGTTPEVHSIFLEGHTFLVRNHRQASLGISPITFLTAQTLLMDLGQFLLFCHIPSHQHDGMEAYVKVDSCPEEPQLRMKNNEEAEDYDDDLTDSEMDVVRFDDDNSPSIIQARSGAKKHPKTWVHYIAAEEEDWDYAPLVLAPDDRSYKSQYLNNGPQRIGRKYKKVRFMAYTDETFKTREAIQHESGILGPLLYGEVGDTLLIIFKNQASRPYNIYPHGITDVRPLYSRRLPKGVKHLKDFPILPGEIFKYKWTVTVEDGPTKSDPRCLTRYYSSFVNMERDLASGLIGPLLICYKESVDQRGNQIMSDKRNVILFSVFDENRSWYLTENIQRFLPNPAGVQLEDPEFQASNIMHSINGYVFDSLQLSVCLHEVAYWYILSIGAQTDFLSVFFSGYTFKHKMVYEDTLTLFPFSGETVFMSMENPGLWILGCHNSDFRNRGMTALLKVSSCDWNTGDYYEDSYEDISAYFDSKNNAIEPRSFSQNPPVLKRHQREGTRTTLQSDQEEIDYDDTISVEMKKEDFDIYDEDENQSPRSFQKKTRHYFIAAVERLWDYGMSSSPHVLRNRAQSGSVPQFKKVVFQEFTDGSFTQPLYRGELNEHLGLLGPYIRAEVEDNIMVTFRNQASRPYSFYSSLISYEEDQRQGAEPRKNFVKPNETKTYFWKVQHHMAPTKDEFDCKAWAYFSDVDLEKDVHSGLIGPLLVCHTNTLNPAHGRQVTVQEFALFFTIFDETKSWYFTENMERNCRAPCNIQMEDPTFKENYRFHAINGYIMDTLPGLVMAQDQRIRWYLLSMGSNENIHSIHFSGHVFTVRKKEEYKMALYNLYPGVFETVEMAPSKAGIWRVECLIGEHLHAGMSTLFLVYSNKCQNPLGMASGHIRDFQITASGQYGQWAPKLARLHYSGSINAWSTKEPFSWIKVDLLAPMIIHGIKTQGARQKFSSLYISQFIIMYSLDGKKWQTYRGNSTGTDMVFFGNVDSSGIKHNIFNPPIIARYIRLHPTHYSIRSTLRMELMGCDLNSCSMPLGMESKAISDAQITASSYFTNMFATWSPSKARLHLQGRSNAWRPQVNNPKEWLQVDFQKTMKVTGVTTQGVKSLDTSMYVKEFLISSSQDGHQWTLFFQNGKVKVFQGNQDSFTPVVNSLDPPLLTRYLRIHPQSWEHQIALRMEVLGCEAQDLY

SEQ ID NO: 1407 - DNA, 4371 bp, synthetic construct
  misc_feature 1..4371: note = Variant of human B-domain deleted Factor VIII
  source 1..4371: mol_type = other DNA
atgcagattgaactgtctacctgcttcttcctctgtttgctgaggttctgctttagcgccactagacggtactaccttggcgctgtggagctgtcctgggactatatgcagagtgatttgggagagcttcccgtcgacgcacgatttcctcctcgcgttccaaagtcatttccctttaacacaagccaggtgtacaagaagacgctcttcgtcgaattcaccgatcacctgttcaatatcgccaaacccagaccaccatggatgggtcttttggggcctaccatacaagcggaggtgtatgacacagttgttatcactctcaagaacatggcttctcatccggtaagtcttcacgcagtgggcgtgtcctactggaaagcttcagaaggagccgagtatgatgatcagacatcccagagggagaaagaagacgacaaggtatttccaggtgggtctcatacctatgtgtggcaagtgctcaaagagaatggccctatggcaagcgatccgccgtgtttgacttacagctacctttcacacgttgacctcgtcaaggacctcaactccgggttgattggagccttgttggtatgcagggaaggatctcttgccaaagagaagacacagaccctccacaagtttatccttctctttgctgtgttcgatgagggcaaaagttggcatagcgaaacgaagaattccctcatgcaggatcgcgacgcagccagcgccagagcttggcccaagatgcacactgtgaacggatatgtcaataggacgcttcctggcttgattgggtgtcatcggaaaagtgtctactggcacgtgatcggaatggggacaacaccagaggtccactccatatttctcgaaggccataccttccttgttcgaaaccacagacaggcatccttggggatctctcccattacctttctcactgcccaaacgctccttatggacttgggtcagttccttctcttttgccatatcccgtcacaccagcatgatggtatggaagcttatgtgaaagtcgacagttgtcctgaggagccacagttgcgcatgaagaataatgaagaagccgaggattacgacgacgatctcaccgattctgagatggacgtggtgaggtttgatgacgacaactctccctccatcattcaagctcggagcggggcgaagaaacaccccaagacttgggtccactatatagcggcggaagaggaggattgggattacgctcctcttgtattggcaccagatgaccgctcatacaaaagccagtacctcaacaacggaccgcagagaattggccggaagtataagaaagtgcgatttatggcctatacagacgaaacctttaagacaagggaggccatccagcatgagagtgggattttgggacctcttctttacggcgaagttggtgataccctcctcatcatcttcaagaatcaagcttctcgcccctataacatttacccacacgggatcactgacgttaggcctttgtatagcagaagacttcccaaaggcgtgaagcatctcaaagacttccccattttgccaggcgagatctttaagtacaaatggaccgtcacagtggaagatggaccgactaaatcagaccctcgatgccttacgcggtactattcctccttcgtgaatatggagagagatttggcaagcggactcataggaccactcctcatctgttacaaggaatctgtagaccagaggggtaaccagattatgagtgataaacgcaatgtgatcctttttagcgtcttcgacgagaaccggtcctggtacttgaccgagaatatacaaaggttccttcccaaccccgcaggcgttcagttggaagaccctgagtttcaggccagcaatattatgcactcaatcaacggctatgtgtttgatagtctccagctttctgtttgcctccatgaagtagcctattggtacatcttgtcaattggtgctcaaacagacttcctctccgtcttcttctccggctacacctttaagcacaagatggtgtatgaggacactctcacactctttccattttctggagaaaccgtgttcatgagcatggagaatccaggcctttggatcttgggttgccacaacagtgattttcgcaatcggggaatgactgctctcctcaaagtcagcagctgtgattggaacacagtggactattacgaagattcttacgaggacataagtgcctactttgactccaagaataacgccattgagcccagatcattctcccagaatcctcccgtgcttaaaaggcatcagcgcgaaggtaccagaactactcttcagtctgatcaagaggagattgactatgacgacaccattagcgtggaaatgaagaaggaggatttcgatatctatgacgaagatgagaaccagtctccgcggagctttcagaagaagacgcgacactacttcattgcagcagtcgaaaggctttgggactacggtatgtcatcatcccctcatgtgttgcgcaatagagctcagagtggaagtgttccacagttcaagaaagtcgtctttcaagagtttacagatggcagcttcacacagcctctctatcggggcgagcttaacgaacatttgggactccttggtccctatatccgagccgaagtggaggacaacattatggttacctttaggaatcaagcctctcgcccctacagcttctactcctccctcatcagttatgaggaggatcagagacaaggcgctgaaccacggaagaactttgtgaaaccgaatgagacgaagacctacttctggaaagtacagcaccacatggcccccacaaaagacgaattcgattgcaaagcatgggcgtatttttcagacgttgacttggagaaagatgtacattcaggacttattggtcctttgttggtgtgtcacactaacactctcaatccagcccatggcaggcaggtgacagtccaggaattcgctcttttctttaccatctttgatgagaccaagtcctggtacttcacggaaaacatggagcgcaattgcagagccccctgtaacatacagatggaggaccctacctttaaggaaaattatcggttccacgcaatcaacggatacattatggatacactccctggccttgtgatggctcaggaccaacgaatcaggtggtacctcctcagcatgggttctaatgagaacatacactccattcacttttcaggacatgtgttcactgtccggaagaaagaagagtataagatggccctctacaatttgtatccaggcgtgtttgagaccgttgaaatgcttccctctaaagctggcatctggagagtagagtgcttgatcggagaacatcttcacgcaggtatgagcaccttgttcctcgtgtacagcaacaaatgtcagaatccacttggcatggccagtggacacattcgcgactttcagatcacagcatctggccagtatggacaatgggccccaaagttggctcgcctccattactccggtagcataaatgcgtggtccactaaagaacctttcagctggattaaggtcgatcttcttgcccccatgatcatccacggcattaagacacagggagcgaggcagaaattctcctccctctacatctcacagttcattattatgtatagtttggacggcaagaagtggcaaacttatagaggtaacagtactggaacagacatggtgttcttcggcaacgttgatagctctggcatcaaacacaacatctttaatcctcccataatagctcggtacatcagattgcatccgacccactacagcattaggagtacactccgaatggagcttatgggttgcgacttgaattcctgttcaatgccactcggaatggagtctaaagccatctctgatgcacagataaccgccagtagctactttacgaacatgtttgctacgtggtcaccctctaaggcaaggcttcatttgcaaggccggtctaatgcctggagacctcaggtgaacaacccgaaagaatggctccaggtggactttcagaagaccatgaaagtaacaggtgtcactactcagggagttaagtccttggatactagcatgtatgtgaaggagttccttatttcctcatcacaagatggccaccagtggaccctcttctttcagaatggtaaggtcaaagtgtttcagggcaatcaagacagcttcacacccgtggtgaacagtcttgatcctccactcttgacacgataccttcgaatccatccacagtcttgggagcaccagattgcattgcgcatggaagtacttggatgcgaggctcaggacctctac

SEQ ID NO: 1408 - protein, 1457 aa, synthetic construct
  REGION 1..1457: note = Variant of human B-domain deleted Factor VIII
MQIELSTCFFLCLLRFCFSATRRYYLGAVELSWDYMQSDLGELPVDARFPPRVPKSFPFNTSQVYKKTLFVEFTDHLFNIAKPRPPWMGLLGPTIQAEVYDTVVITLKNMASHPVSLHAVGVSYWKASEGAEYDDQTSQREKEDDKVFPGGSHTYVWQVLKENGPMASDPPCLTYSYLSHVDLVKDLNSGLIGALLVCREGSLAKEKTQTLHKFILLFAVFDEGKSWHSETKNSLMQDRDAASARAWPKMHTVNGYVNRTLPGLIGCHRKSVYWHVIGMGTTPEVHSIFLEGHTFLVRNHRQASLGISPITFLTAQTLLMDLGQFLLFCHIPSHQHDGMEAYVKVDSCPEEPQLRMKNNEEAEDYDDDLTDSEMDVVRFDDDNSPSIIQARSGAKKHPKTWVHYIAAEEEDWDYAPLVLAPDDRSYKSQYLNNGPQRIGRKYKKVRFMAYTDETFKTREAIQHESGILGPLLYGEVGDTLLIIFKNQASRPYNIYPHGITDVRPLYSRRLPKGVKHLKDFPILPGEIFKYKWTVTVEDGPTKSDPRCLTRYYSSFVNMERDLASGLIGPLLICYKESVDQRGNQIMSDKRNVILFSVFDENRSWYLTENIQRFLPNPAGVQLEDPEFQASNIMHSINGYVFDSLQLSVCLHEVAYWYILSIGAQTDFLSVFFSGYTFKHKMVYEDTLTLFPFSGETVFMSMENPGLWILGCHNSDFRNRGMTALLKVSSCDWNTVDYYEDSYEDISAYFDSKNNAIEPRSFSQNPPVLKRHQREGTRTTLQSDQEEIDYDDTISVEMKKEDFDIYDEDENQSPRSFQKKTRHYFIAAVERLWDYGMSSSPHVLRNRAQSGSVPQFKKVVFQEFTDGSFTQPLYRGELNEHLGLLGPYIRAEVEDNIMVTFRNQASRPYSFYSSLISYEEDQRQGAEPRKNFVKPNETKTYFWKVQHHMAPTKDEFDCKAWAYFSDVDLEKDVHSGLIGPLLVCHTNTLNPAHGRQVTVQEFALFFTIFDETKSWYFTENMERNCRAPCNIQMEDPTFKENYRFHAINGYIMDTLPGLVMAQDQRIRWYLLSMGSNENIHSIHFSGHVFTVRKKEEYKMALYNLYPGVFETVEMLPSKAGIWRVECLIGEHLHAGMSTLFLVYSNKCQNPLGMASGHIRDFQITASGQYGQWAPKLARLHYSGSINAWSTKEPFSWIKVDLLAPMIIHGIKTQGARQKFSSLYISQFIIMYSLDGKKWQTYRGNSTGTDMVFFGNVDSSGIKHNIFNPPIIARYIRLHPTHYSIRSTLRMELMGCDLNSCSMPLGMESKAISDAQITASSYFTNMFATWSPSKARLHLQGRSNAWRPQVNNPKEWLQVDFQKTMKVTGVTTQGVKSLDTSMYVKEFLISSSQDGHQWTLFFQNGKVKVFQGNQDSFTPVVNSLDPPLLTRYLRIHPQSWEHQIALRMEVLGCEAQDLY

SEQ ID NO: 1409 - DNA, 4371 bp, synthetic construct
  misc_feature 1..4371: note = Variant of human B-domain deleted Factor VIII
  source 1..4371: mol_type = other DNA
atgcagattgaactgtctacctgcttcttcctctgtttgctgaggttctgctttagcgccactagacggtactaccttggcgctgtggagctgtcctgggactatatgcagagtgatttgggagagcttcccgtcgacgcacgatttcctcctcgcgttccaaagtcatttccctttaacacaagccaggtgtacaagaagacgctcttcgtcgaattcaccgatcacctgttcaatatcgccaaacccagaccaccatggatgggtcttttggggcctaccatacaagcggaggtgtatgacacagttgttatcactctcaagaacatggcttctcatccggtaagtcttcacgcagtgggcgtgtcctactggaaagcttcagaaggagccgagtatgatgatcagacatcccagagggagaaagaagacgacaaggtatttccaggtgggtctcatacctatgtgtggcaagtgctcaaagagaatggccctatggcaagcgatccgccgtgtttgacttacagctacctttcacacgttgacctcgtcaaggacctcaactccgggttgattggagccttgttggtatgcagggaaggatctcttgccaaagagaagacacagaccctccacaagtttatccttctctttgctgtgttcgatgagggcaaaagttggcatagcgaaacgaagaattccctcatgcaggatcgcgacgcagccagcgccagagcttggcccaagatgcacactgtgaacggatatgtcaataggacgcttcctggcttgattgggtgtcatcggaaaagtgtctactggcacgtgatcggaatggggacaacaccagaggtccactccatatttctcgaaggccataccttccttgttcgaaaccacagacaggcatccttggggatctctcccattacctttctcactgcccaaacgctccttatggacttgggtcagttccttctcttttgccatatcccgtcacaccagcatgatggtatggaagcttatgtgaaagtcgacagttgtcctgaggagccacagttgcgcatgaagaataatgaagaagccgaggattacgacgacgatctcaccgattctgagatggacgtggtgaggtttgatgacgacaactctccctccatcattcaagctcggagcggggcgaagaaacaccccaagacttgggtccactatatagcggcggaagaggaggattgggattacgctcctcttgtattggcaccagatgaccgctcatacaaaagccagtacctcaacaacggaccgcagagaattggccggaagtataagaaagtgcgatttatggcctatacagacgaaacctttaagacaagggaggccatccagcatgagagtgggattttgggacctcttctttacggcgaagttggtgataccctcctcatcatcttcaagaatcaagcttctcgcccctataacatttacccacacgggatcactgacgttaggcctttgtatagcagaagacttcccaaaggcgtgaagcatctcaaagacttccccattttgccaggcgagatctttaagtacaaatggaccgtcacacctgaagatggaccgactaaatcagaccctcgatgccttacgcggtactattcctccttcgtgaatatggagagagatttggcaagcggactcataggaccactcctcatctgttacaaggaatctgtagaccagaggggtaaccagattatgagtgataaacgcaatgtgatcctttttagcgtcttcgacgagaaccggtcctggtacttgaccgagaatatacaaaggttccttcccaacccggcaggcgttcagctggaagaccctgagtttcaggccagcaatattatgcactcaatcaacggctatgtgtttgatagtctccagctttctgtttgcctccatgaagtagcctattggtacatcttgtcaattggtgctcaaacagacttcctctccgtcttcttctccggctacacctttaagcacaagatggtgtatgaggacactctcacactctttccattttctggagaaaccgtgttcatgagcatggagaatccaggcctttggatcttgggttgccacaacagtgattttcgcaatcggggaatgactgctctcctcaaagtcagcagctgtgattggaacacaggcgactattacgaagattcttacgaggacataagtgcctactttgactccaagaataacgccattgagcccagatcattctcccagaatcctcccgtgcttaaaaggcatcagcgcgaaggtaccagaactactcttcagtctgatcaagaggagattgactatgacgacaccattagcgtggaaatgaagaaggaggatttcgatatctatgacgaagatgagaaccagtctccgcggagctttcagaagaagacgcgacactacttcattgcagcagtcgaaaggctttgggactacggtatgtcatcatcccctcatgtgttgcgcaatagagctcagagtggaagtgttccacagttcaagaaagtcgtctttcaagagtttacagatggcagcttcacacagcctctctatcggggcgagcttaacgaacatttgggactccttggtccctatatccgagccgaagtggaggacaacattatggttacctttaggaatcaagcctctcgcccctacagcttctactcctccctcatcagttatgaggaggatcagagacaaggcgctgaaccacggaagaactttgtgaaaccgaatgagacgaagacctacttctggaaagtacagcaccacatggcccccacaaaagacgaattcgattgcaaagcatgggcgtatttttcagacgttgacttggagaaagatgtacattcaggacttattggtcctttgttggtgtgtcacactaacactctcaatccagcccatggcaggcaggtgacagtccaggaattcgctcttttctttaccatctttgatgagaccaagtcctggtacttcacggaaaacatggagcgcaattgcagagccccctgtaacatacagatggaggaccctacctttaaggaaaattatcggttccacgcaatcaacggatacattatggatacactccctggccttgtgatggctcaggaccaacgaatcaggtggtacctcctcagcatgggttctaatgagaacatacactccattcacttttcaggacatgtgttcactgtccggaagaaagaagagtataagatggccctctacaatttgtatccaggcgtgtttgagaccgttgaaatgcttccctctaaagctggcatctggagagtagagtgcttgatcggagaacatcttcacgcaggtatgagcaccttgttcctcgtgtacagcaacaaatgtcagaatccacttggcatggccagtggacacattcgcgactttcagatcacagcatctggccagtatggacaatgggccccaaagttggctcgcctccattactccggtagcataaatgcgtggtccactaaagaacctttcagctggattaaggtcgatcttcttgcccccatgatcatccacggcattaagacacagggagcgaggcagaaattctcctccctctacatctcacagttcattattatgtatagtttggacggcaagaagtggcaaacttatagaggtaacagtactggaacagacatggtgttcttcggcaacgttgatagctctggcatcaaacacaacatctttaatcctcccataatagctcggtacatcagattgcatccgacccactacagcattaggagtacactccgaatggagcttatgggttgcgacttgaattcctgttcaatgccactcggaatggagtctaaagccatctctgatgcacagataaccgccagtagctactttacgaacatgtttgctacgtggtcaccctctaaggcaaggcttcatttgcaaggccggtctaatgcctggagacctcaggtgaacaacccgaaagaatggctccaggtggactttcagaagaccatgaaagtaacaggtgtcactactcagggagttaagtccttggatactagcatgtatgtgaaggagttccttatttcctcatcacaagatggccaccagtggaccctcttctttcagaatggtaaggtcaaagtgtttcagggcaatcaagacagcttcacacccgtggtgaacagtcttgatcctccactcttgacacgataccttcgaatccatccacagtcttgggagcaccagattgcattgcgcatggaagtacttggatgcgaggctcaggacctctac

SEQ ID NO: 1410 - protein, 1457 aa, synthetic construct
  REGION 1..1457: note = Variant of human B-domain deleted Factor VIII
MQIELSTCFFLCLLRFCFSATRRYYLGAVELSWDYMQSDLGELPVDARFPPRVPKSFPFNTSQVYKKTLFVEFTDHLFNIAKPRPPWMGLLGPTIQAEVYDTVVITLKNMASHPVSLHAVGVSYWKASEGAEYDDQTSQREKEDDKVFPGGSHTYVWQVLKENGPMASDPPCLTYSYLSHVDLVKDLNSGLIGALLVCREGSLAKEKTQTLHKFILLFAVFDEGKSWHSETKNSLMQDRDAASARAWPKMHTVNGYVNRTLPGLIGCHRKSVYWHVIGMGTTPEVHSIFLEGHTFLVRNHRQASLGISPITFLTAQTLLMDLGQFLLFCHIPSHQHDGMEAYVKVDSCPEEPQLRMKNNEEAEDYDDDLTDSEMDVVRFDDDNSPSIIQARSGAKKHPKTWVHYIAAEEEDWDYAPLVLAPDDRSYKSQYLNNGPQRIGRKYKKVRFMAYTDETFKTREAIQHESGILGPLLYGEVGDTLLIIFKNQASRPYNIYPHGITDVRPLYSRRLPKGVKHLKDFPILPGEIFKYKWTVTPEDGPTKSDPRCLTRYYSSFVNMERDLASGLIGPLLICYKESVDQRGNQIMSDKRNVILFSVFDENRSWYLTENIQRFLPNPAGVQLEDPEFQASNIMHSINGYVFDSLQLSVCLHEVAYWYILSIGAQTDFLSVFFSGYTFKHKMVYEDTLTLFPFSGETVFMSMENPGLWILGCHNSDFRNRGMTALLKVSSCDWNTGDYYEDSYEDISAYFDSKNNAIEPRSFSQNPPVLKRHQREGTRTTLQSDQEEIDYDDTISVEMKKEDFDIYDEDENQSPRSFQKKTRHYFIAAVERLWDYGMSSSPHVLRNRAQSGSVPQFKKVVFQEFTDGSFTQPLYRGELNEHLGLLGPYIRAEVEDNIMVTFRNQASRPYSFYSSLISYEEDQRQGAEPRKNFVKPNETKTYFWKVQHHMAPTKDEFDCKAWAYFSDVDLEKDVHSGLIGPLLVCHTNTLNPAHGRQVTVQEFALFFTIFDETKSWYFTENMERNCRAPCNIQMEDPTFKENYRFHAINGYIMDTLPGLVMAQDQRIRWYLLSMGSNENIHSIHFSGHVFTVRKKEEYKMALYNLYPGVFETVEMLPSKAGIWRVECLIGEHLHAGMSTLFLVYSNKCQNPLGMASGHIRDFQITASGQYGQWAPKLARLHYSGSINAWSTKEPFSWIKVDLLAPMIIHGIKTQGARQKFSSLYISQFIIMYSLDGKKWQTYRGNSTGTDMVFFGNVDSSGIKHNIFNPPIIARYIRLHPTHYSIRSTLRMELMGCDLNSCSMPLGMESKAISDAQITASSYFTNMFATWSPSKARLHLQGRSNAWRPQVNNPKEWLQVDFQKTMKVTGVTTQGVKSLDTSMYVKEFLISSSQDGHQWTLFFQNGKVKVFQGNQDSFTPVVNSLDPPLLTRYLRIHPQSWEHQIALRMEVLGCEAQDLY

SEQ ID NO: 1411 - DNA, 4371 bp, synthetic construct
  misc_feature 1..4371: note = Variant of human B-domain deleted Factor VIII
  source 1..4371: mol_type = other DNA
atgcagattgaactgtctacctgcttcttcctctgtttgctgaggttctgctttagcgccactagacggtactaccttggcgctgtggagctgtcctgggactatatgcagagtgatttgggagagcttcccgtcgacgcacgatttcctcctcgcgttccaaagtcatttccctttaacacaagccaggtgtacaagaagacgctcttcgtcgaattcaccgatcacctgttcaatatcgccaaacccagaccaccatggatgggtcttttggggcctaccatacaagcggaggtgtatgacacagttgttatcactctcaagaacatggcttctcatccggtaagtcttcacgcagtgggcgtgtcctactggaaagcttcagaaggagccgagtatgatgatcagacatcccagagggagaaagaagacgacaaggtatttccaggtgggtctcatacctatgtgtggcaagtgctcaaagagaatggccctatggcaagcgatccgccgtgtttgacttacagctacctttcacacgttgacctcgtcaaggacctcaactccgggttgattggagccttgttggtatgcagggaaggatctcttgccaaagagaagacacagacccgccacaagtttatccttctctttgctgtgttcgatgagggcaaaagttggcatagcgaaacgaagaattccctcatgcaggatcgcgacgcagccagcgccagagcttggcccaagatgcacactgtgaacggatatgtcaataggacgcttcctggcttgattgggtgtcatcggaaaagtgtctactggcacgtgatcggaatggggacaacaccagaggtccactccatatttctcgaaggccataccttccttgttcgaaaccacagacaggcatccttggggatctctcccattacctttctcactgcccaaacgctccttatggacttgggtcagttccttctcttttgccatatcccgtcacaccagcatgatggtatggaagcttatgtgaaagtcgacagttgtcctgaggagccacagttgcgcatgaagaataatgaagaagccgaggattacgacgacgatctcaccgattctgagatggacgtggtgaggtttgatgacgacaactctccctccatcattcaagctcggagcggggcgaagaaacaccccaagacttgggtccactatatagcggcggaagaggaggattgggattacgctcctcttgtattggcaccagatgaccgctcatacaaaagccagtacctcaacaacggaccgcagagaattggccggaagtataagaaagtgcgatttatggcctatacagacgaaacctttaagacaagggaggccatccagcatgagagtgggattttgggacctcttctttacggcgaagttggtgataccctcctcatcatcttcaagaatcaagcttctcgcccctataacatttacccacacgggatcactgacgttaggcctttgtatagcagaagacttcccaaaggcgtgaagcatctcaaagacttccccattttgccaggcgagatctttaagtacaaatggaccgtcacaaaggaagatggaccgactaaatcagaccctcgatgccttacgcggtactattcctccttcgtgaatatggagagagatttggcaagcggactcataggaccactcctcatctgttacaaggaatctgtagaccagaggggtaaccagattatgagtgataaacgcaatgtgatcctttttagcgtcttcgacgagaaccggtcctggtacttgaccgagaatatacaaaggttccttcccaaccccgcaggcgttcaggacgaagaccctgagtttcaggccagcaatattatgcactcaatcaacggctatgtgtttgatagtctccagctttctgtttgcctccatgaagtagcctattggtacatcttgtcaattggtgctcaaacagacttcctctccgtcttcttctccggctacacctttaagcacaaggcagtgtatgaggacactctcacactctttccattttctggagaaaccgtgttcatgagcatggagaatccaggcctttggatcttgggttgccacaacagtgattttcgcaatcggggaatgactgctctcctcaaagtcagcagctgtgattggaacacaggcgactattacgaagattcttacgaggacataagtgcctactttgactccaagaataacgccattgagcccagatcattctcccagaatcctcccgtgcttaaaaggcatcagcgcgaaggtaccagaactactcttcagtctgatcaagaggagattgactatgacgacaccattagcgtggaaatgaagaaggaggatttcgatatctatgacgaagatgagaaccagtctccgcggagctttcagaagaagacgcgacactacttcattgcagcagtcgaaaggctttgggactacggtatgtcatcatcccctcatgtgttgcgcaatagagctcagagtggaagtgttccacagttcaagaaagtcgtctttcaagagtttacagatggcagcttcacacagcctctctatcggggcgagcttaacgaacatttgggactccttggtccctatatccgagccgaagtggaggacaacattatggttacctttaggaatcaagcctctcgcccctacagcttctactcctccctcatcagttatgaggaggatcagagacaaggcgctgaaccacggaagaactttgtgaaaccgaatgagacgaagacctacttctggaaagtacagcaccacatggcccccacaaaagacgaattcgattgcaaagcatgggcgtatttttcagacgttgacttggagaaagatgtacattcaggacttattggtcctttgttggtgtgtcacactaacactctcaatccagcccatggcaggcaggtgacagtccaggaattcgctcttttctttaccatctttgatgagaccaagtcctggtacttcacggaaaacatggagcgcaattgcagagccccctgtaacatacagatggaggaccctacctttaaggaaaattatcggttccacgcaatcaacggatacattatggatacactccctggccttgtgatggctcaggaccaacgaatcaggtggtacctcctcagcatgggttctaatgagaacatacactccattcacttttcaggacatgtgttcactgtccggaagaaagaagagtataagatggccctctacaatttgtatccaggcgtgtttgagaccgttgaaatgcttccctctaaagctggcatctggagagtagagtgcttgatcggagaacatcttcacgcaggtatgagcaccttgttcctcgtgtacagcaacaaatgtcagaatccacttggcatggccagtggacacattcgcgactttcagatcacagcatctggccagtatggacaatgggccccaaagttggctcgcctccattactccggtagcataaatgcgtggtccactaaagaacctttcagctggattaaggtcgatcttcttgcccccatgatcatccacggcattaagacacagggagcgaggcagaaattctcctccctctacatctcacagttcattattatgtatagtttggacggcaagaagtggcaaacttatagaggtaacagtactggaacagacatggtgttcttcggcaacgttgatagctctggcatcaaacacaacatctttaatcctcccataatagctcggtacatcagattgcatccgacccactacagcattaggagtacactccgaatggagcttatgggttgcgacttgaattcctgttcaatgccactcggaatggagtctaaagccatctctgatgcacagataaccgccagtagctactttacgaacatgtttgctacgtggtcaccctctaaggcaaggcttcatttgcaaggccggtctaatgcctggagacctcaggtgaacaacccgaaagaatggctccaggtggactttcagaagaccatgaaagtaacaggtgtcactactcagggagttaagtccttggatactagcatgtatgtgaaggagttccttatttcctcatcacaagatggccaccagtggaccctcttctttcagaatggtaaggtcaaagtgtttcagggcaatcaagacagcttcacacccgtggtgaacagtcttgatcctccactcttgacacgataccttcgaatccatccacagtcttgggagcaccagattgcattgcgcatggaagtacttggatgcgaggctcaggacctctac

SEQ ID NO: 1412 - protein, 1457 aa, synthetic construct
  REGION 1..1457: note = Variant of human B-domain deleted Factor VIII
MQIELSTCFFLCLLRFCFSATRRYYLGAVELSWDYMQSDLGELPVDARFPPRVPKSFPFNTSQVYKKTLFVEFTDHLFNIAKPRPPWMGLLGPTIQAEVYDTVVITLKNMASHPVSLHAVGVSYWKASEGAEYDDQTSQREKEDDKVFPGGSHTYVWQVLKENGPMASDPPCLTYSYLSHVDLVKDLNSGLIGALLVCREGSLAKEKTQTRHKFILLFAVFDEGKSWHSETKNSLMQDRDAASARAWPKMHTVNGYVNRTLPGLIGCHRKSVYWHVIGMGTTPEVHSIFLEGHTFLVRNHRQASLGISPITFLTAQTLLMDLGQFLLFCHIPSHQHDGMEAYVKVDSCPEEPQLRMKNNEEAEDYDDDLTDSEMDVVRFDDDNSPSIIQARSGAKKHPKTWVHYIAAEEEDWDYAPLVLAPDDRSYKSQYLNNGPQRIGRKYKKVRFMAYTDETFKTREAIQHESGILGPLLYGEVGDTLLIIFKNQASRPYNIYPHGITDVRPLYSRRLPKGVKHLKDFPILPGEIFKYKWTVTKEDGPTKSDPRCLTRYYSSFVNMERDLASGLIGPLLICYKESVDQRGNQIMSDKRNVILFSVFDENRSWYLTENIQRFLPNPAGVQDEDPEFQASNIMHSINGYVFDSLQLSVCLHEVAYWYILSIGAQTDFLSVFFSGYTFKHKAVYEDTLTLFPFSGETVFMSMENPGLWILGCHNSDFRNRGMTALLKVSSCDWNTGDYYEDSYEDISAYFDSKNNAIEPRSFSQNPPVLKRHQREGTRTTLQSDQEEIDYDDTISVEMKKEDFDIYDEDENQSPRSFQKKTRHYFIAAVERLWDYGMSSSPHVLRNRAQSGSVPQFKKVVFQEFTDGSFTQPLYRGELNEHLGLLGPYIRAEVEDNIMVTFRNQASRPYSFYSSLISYEEDQRQGAEPRKNFVKPNETKTYFWKVQHHMAPTKDEFDCKAWAYFSDVDLEKDVHSGLIGPLLVCHTNTLNPAHGRQVTVQEFALFFTIFDETKSWYFTENMERNCRAPCNIQMEDPTFKENYRFHAINGYIMDTLPGLVMAQDQRIRWYLLSMGSNENIHSIHFSGHVFTVRKKEEYKMALYNLYPGVFETVEMLPSKAGIWRVECLIGEHLHAGMSTLFLVYSNKCQNPLGMASGHIRDFQITASGQYGQWAPKLARLHYSGSINAWSTKEPFSWIKVDLLAPMIIHGIKTQGARQKFSSLYISQFIIMYSLDGKKWQTYRGNSTGTDMVFFGNVDSSGIKHNIFNPPIIARYIRLHPTHYSIRSTLRMELMGCDLNSCSMPLGMESKAISDAQITASSYFTNMFATWSPSKARLHLQGRSNAWRPQVNNPKEWLQVDFQKTMKVTGVTTQGVKSLDTSMYVKEFLISSSQDGHQWTLFFQNGKVKVFQGNQDSFTPVVNSLDPPLLTRYLRIHPQSWEHQIALRMEVLGCEAQDLY

SEQ ID NO: 1413 - DNA, 4371 bp, synthetic construct
  misc_feature 1..4371: note = Variant of human B-domain deleted Factor VIII
  source 1..4371: mol_type = other DNA
atgcagattgaactgtctacctgcttcttcctctgtttgctgaggttctgctttagcgccactagacggtactaccttggcgctgtggagctgtcctgggactatatgcagagtgatttgggagagcttcccgtcgacgcacgatttcctcctcgcgttccaaagtcatttccctttaacacaagccaggtgtacaagaagacgctcttcgtcgaattcaccgatcacctgttcaatatcgccaaacccagaccaccatggatgggtcttttggggcctaccatacaagcggaggtgtatgacacagttgttatcactctcaagaacatggcttctcatccggtaagtcttcacgcagtgggcgtgtcctactggaaagcttcagaaggagccgagtatgatgatcagacatcccagagggagaaagaagacgacaaggtatttccaggtgggtctcatacctatgtgtggcaagtgctcaaagagaatggccctatggcaagcgatccgccgtgtttgacttacagctacctttcacacgttgacctcgtcaaggacctcaactccgggttgattggagccttgttggtatgcagggaaggatctcttgccaaagagaagacacagaccctgcacaagtttatccttctctttgctgtgttcgatgagggcaaaagttggcatagcgaaacgaagaattccctcatgcaggatcgcgacgcagccagcgccagagcttggcccaagatgcacactgtgaacggatatgtcaataggacgcttcctggcttgattgggtgtcatcggaaaagtgtctactggcacgtgatcggaatggggacaacaccagaggtccactccatatttctcgaaggccataccttccttgttcgaaaccacagacaggcatccttggggatctctcccattacctttctcactgcccaaacgctccttatggacttgggtcagttccttctcttttgccatatcccgtcacaccagcatgatggtatggaagcttatgtgaaagtcgacagttgtcctgaggagccacagttgcgcatgaagaataatgaagaagccgaggattacgacgacgatctcaccgattctgagatggacgtggtgaggtttgatgacgacaactctccctccatcattcaagctcggagcggggcgaagaaacaccccaagacttgggtccactatatagcggcggaagaggaggattgggattacgctcctcttgtattggcaccagatgaccgctcatacaaaagccagtacctcaacaacggaccgcagagaattggccggaagtataagaaagtgcgatttatggcctatacagacgaaacctttaagacaagggaggccatccagcatgagagtgggattttgggacctcttctttacggcgaagttggtgataccctcctcatcatcttcaagaatcaagcttctcgcccctataacatttacccacacgggatcactgacgttaggcctttgtatagcagaagacttcccaaaggcgtgaagcatctcaaagacttccccattttgccaggcgagatctttaagtacaaatggaccgtcacaaaggaagatggaccgactaaatcagaccctcgatgccttacgcggtactattcctccttcgtgaatctggagagagatttggcaagcggactcataggaccactcctcatctgttacaaggaatctgtagaccagaggggtaaccagattatgagtgataaacgcaatgtgatcctttttagcgtcttcgacgagaaccggtcctggtacttgaccgagaatatacaaaggttccttcccaacccggcaggcgttcagctggaagaccctgagtttcaggccagcaatattatgcactcaatcaacggctatgtgtttgatagtctccagctttctgtttgcctccatgaagtagcctattggtacatcttgtcaattggtgctcaaacagacttcctctccgtcttcttctccggctacacctttaagcacaagatggtgtatgaggacactctcacactctttccattttctggagaaaccgtgttcatgagcatggagaatccaggcctttggatcttgggttgccacaacagtgattttcgcaatcggggaatgactgctctcctcaaagtcagcagctgtgattggaacacaggcgactattacgaagattcttacgaggacataagtgcctactttgactccaagaataacgccattgagcccagatcattctcccagaatcctcccgtgcttaaaaggcatcagcgcgaaggtaccagaactactcttcagtctgatcaagaggagattgactatgacgacaccattagcgtggaaatgaagaaggaggatttcgatatctatgacgaagatgagaaccagtctccgcggagctttcagaagaagacgcgacactacttcattgcagcagtcgaaaggctttgggactacggtatgtcatcatcccctcatgtgttgcgcaatagagctcagagtggaagtgttccacagttcaagaaagtcgtctttcaagagtttacagatggcagcttcacacagcctctctatcggggcgagcttaacgaacatttgggactccttggtccctatatccgagccgaagtggaggacaacattatggttacctttaggaatcaagcctctcgcccctacagcttctactcctccctcatcagttatgaggaggatcagagacaaggcgctgaaccacggaagaactttgtgaaaccgaatgagacgaagacctacttctggaaagtacagcaccacatggcccccacaaaagacgaattcgattgcaaagcatgggcgtatttttcagacgttgacttggagaaagatgtacattcaggacttattggtcctttgttggtgtgtcacactaacactctcaatccagcccatggcaggcaggtgacagtccaggaattcgctcttttctttaccatctttgatgagaccaagtcctggtacttcacggaaaacatggagcgcaattgcagagccccctgtaacatacagatggaggaccctacctttaaggaaaattatcggttccacgcaatcaacggatacattatggatacactccctggccttgtgatggctcaggaccaacgaatcaggtggtacctcctcagcatgggttctaatgagaacatacactccattcacttttcaggacatgtgttcactgtccggaagaaagaagagtataagatggccctctacaatttgtatccaggcgtgtttgagaccgttgaaatgcttccctctaaagctggcatctggagagtagagtgcttgatcggagaacatcttcacgcaggtatgagcaccttgttcctcgtgtacagcaacaaatgtcagaatccacttggcatggccagtggacacattcgcgactttcagatcacagcatctggccagtatggacaatgggccccaaagttggctcgcctccattactccggtagcataaatgcgtggtccactaaagaacctttcagctggattaaggtcgatcttcttgcccccatgatcatccacggcattaagacacagggagcgaggcagaaattctcctccctctacatctcacagttcattattatgtatagtttggacggcaagaagtggcaaacttatagaggtaacagtactggaacagacatggtgttcttcggcaacgttgatagctctggcatcaaacacaacatctttaatcctcccataatagctcggtacatcagattgcatccgacccactacagcattaggagtacactccgaatggagcttatgggttgcgacttgaattcctgttcaatgccactcggaatggagtctaaagccatctctgatgcacagataaccgccagtagctactttacgaacatgtttgctacgtggtcaccctctaaggcaaggcttcatttgcaaggccggtctaatgcctggagacctcaggtgaacaacccgaaagaatggctccaggtggactttcagaagaccatgaaagtaacaggtgtcactactcagggagttaagtccttggatactagcatgtatgtgaaggagttccttatttcctcatcacaagatggccaccagtggaccctcttctttcagaatggtaaggtcaaagtgtttcagggcaatcaagacagcttcacacccgtggtgaacagtcttgatcctccactcttgacacgataccttcgaatccatccacagtcttgggagcaccagattgcattgcgcatggaagtacttggatgcgaggctcaggacctctac

SEQ ID NO: 1414 - protein, 1457 aa, synthetic construct
  REGION 1..1457: note = Variant of human B-domain deleted Factor VIII
MQIELSTCFFLCLLRFCFSATRRYYLGAVELSWDYMQSDLGELPVDARFPPRVPKSFPFNTSQVYKKTLFVEFTDHLFNIAKPRPPWMGLLGPTIQAEVYDTVVITLKNMASHPVSLHAVGVSYWKASEGAEYDDQTSQREKEDDKVFPGGSHTYVWQVLKENGPMASDPPCLTYSYLSHVDLVKDLNSGLIGALLVCREGSLAKEKTQTLHKFILLFAVFDEGKSWHSETKNSLMQDRDAASARAWPKMHTVNGYVNRTLPGLIGCHRKSVYWHVIGMGTTPEVHSIFLEGHTFLVRNHRQASLGISPITFLTAQTLLMDLGQFLLFCHIPSHQHDGMEAYVKVDSCPEEPQLRMKNNEEAEDYDDDLTDSEMDVVRFDDDNSPSIIQARSGAKKHPKTWVHYIAAEEEDWDYAPLVLAPDDRSYKSQYLNNGPQRIGRKYKKVRFMAYTDETFKTREAIQHESGILGPLLYGEVGDTLLIIFKNQASRPYNIYPHGITDVRPLYSRRLPKGVKHLKDFPILPGEIFKYKWTVTKEDGPTKSDPRCLTRYYSSFVNLERDLASGLIGPLLICYKESVDQRGNQIMSDKRNVILFSVFDENRSWYLTENIQRFLPNPAGVQLEDPEFQASNIMHSINGYVFDSLQLSVCLHEVAYWYILSIGAQTDFLSVFFSGYTFKHKMVYEDTLTLFPFSGETVFMSMENPGLWILGCHNSDFRNRGMTALLKVSSCDWNTGDYYEDSYEDISAYFDSKNNAIEPRSFSQNPPVLKRHQREGTRTTLQSDQEEIDYDDTISVEMKKEDFDIYDEDENQSPRSFQKKTRHYFIAAVERLWDYGMSSSPHVLRNRAQSGSVPQFKKVVFQEFTDGSFTQPLYRGELNEHLGLLGPYIRAEVEDNIMVTFRNQASRPYSFYSSLISYEEDQRQGAEPRKNFVKPNETKTYFWKVQHHMAPTKDEFDCKAWAYFSDVDLEKDVHSGLIGPLLVCHTNTLNPAHGRQVTVQEFALFFTIFDETKSWYFTENMERNCRAPCNIQMEDPTFKENYRFHAINGYIMDTLPGLVMAQDQRIRWYLLSMGSNENIHSIHFSGHVFTVRKKEEYKMALYNLYPGVFETVEMLPSKAGIWRVECLIGEHLHAGMSTLFLVYSNKCQNPLGMASGHIRDFQITASGQYGQWAPKLARLHYSGSINAWSTKEPFSWIKVDLLAPMIIHGIKTQGARQKFSSLYISQFIIMYSLDGKKWQTYRGNSTGTDMVFFGNVDSSGIKHNIFNPPIIARYIRLHPTHYSIRSTLRMELMGCDLNSCSMPLGMESKAISDAQITASSYFTNMFATWSPSKARLHLQGRSNAWRPQVNNPKEWLQVDFQKTMKVTGVTTQGVKSLDTSMYVKEFLISSSQDGHQWTLFFQNGKVKVFQGNQDSFTPVVNSLDPPLLTRYLRIHPQSWEHQIALRMEVLGCEAQDLY

SEQ ID NO: 1415 - DNA, 4371 bp, synthetic construct
  misc_feature 1..4371: note = Variant of human B-domain deleted Factor VIII
  source 1..4371: mol_type = other DNA
atgcagattgaactgtctacctgcttcttcctctgtttgctgaggttctgctttagcgccactagacggtactaccttggcgctgtggagctgtcctgggactatatgcagagtgatttgggagagcttcccgtcgacgcacgatttcctcctcgcgttccaaagtcatttccctttaacacaagccaggtgtacaagaagacgctcttcgtcgaattcaccgatcacctgttcaatatcgccaaacccagaccaccatggatgggtcttttggggcctaccatacaagcggaggtgtatgacacagttgttatcactctcaagaacatggcttctcatccggtaagtcttcacgcagtgggcgtgtcctactggaaagcttcagaaggagccgagtatgatgatcagacatcccagagggagaaagaagacgacaaggtatttccaggtgggtctcatacctatgtgtggcaagtgctcaaagagaatggccctatggcaagcgatccgccgtgtttgacttacagctacctttcacacgttgacctcgtcaaggacctcaactccgggttgattggagccttgttggtatgcagggaaggatctcttgccaaagagaagacacagacccgccacaagtttatccttctctttgctgtgttcgatgagggcaaaagttggcatagcgaaacgaagaattccctcatgcaggatcgcgacgcagccagcgccagagcttggcccaagatgcacactgtgaacggatatgtcaataggacgcttcctggcttgattgggtgtcatcggaaaagtgtctactggcacgtgatcggaatggggacaacaccagaggtccactccatatttctcgaaggccataccttccttgttcgaaaccacagacaggcatccttggggatctctcccattacctttctcactgcccaaacgctccttatggacttgggtcagttccttctcttttgccatatcccgtcacaccagcatgatggtatggaagcttatgtgaaagtcgacagttgtcctgaggagccacagttgcgcatgaagaataatgaagaagccgaggattacgacgacgatctcaccgattctgagatggacgtggtgaggtttgatgacgacaactctccctccatcattcaagctcggagcggggcgaagaaacaccccaagacttgggtccactatatagcggcggaagaggaggattgggattacgctcctcttgtattggcaccagatgaccgctcatacaaaagccagtacctcaacaacggaccgcagagaattggccggaagtataagaaagtgcgatttatggcctatacagacgaaacctttaagacaagggaggccatccagcatgagagtgggattttgggacctcttctttacggcgaagttggtgataccctcctcatcatcttcaagaatcaagcttctcgcccctataacatttacccacacgggatcactgacgttaggcctttgtatagcagaagacttcccaaaggcgtgaagcatctcaaagacttccccattttgccaggcgagatctttaagtacaaatggaccgtcacacgtgaagatggaccgactaaatcagaccctcgatgccttacgcggtactattcctccggggtgaatatggagagagatttggcaagcggactcataggaccactcctcatctgttacaaggaatctgtagaccagaggggtaaccagattatgagtgataaacgcaatgtgatcctttttagcgtcttcgacgagaaccggtcctggtacttgaccgagaatatacaaaggttccttcccaacggcgcaggcgttcagctggaagaccctgagtttcaggccagcaatattatgcactcaatcaacggctatgtgtttgatagtctccagctttctgtttgcctccatgaagtagcctattggtacatcttgtcaattggtgctcaaacagacttcctctccgtcttcttctccggctacacctttaagcacaagatggtgtatgaggacactctcacactctttccattttctggagaaaccgtgttcatgagcatggagaatccaggcctttggatcttgggttgccacaacagtgattttcgcaatcggggaatgactgctctcctcaaagtcagcagctgtgataagaacacaggcgactattacgaagattcttacgaggacataagtgcctactttgactccaagaataacgccattgagcccagatcattctcccagaatcctcccgtgcttaaaaggcatcagcgcgaaggtaccagaactactcttcagtctgatcaagaggagattgactatgacgacaccattagcgtggaaatgaagaaggaggatttcgatatctatgacgaagatgagaaccagtctccgcggagctttcagaagaagacgcgacactacttcattgcagcagtcgaaaggctttgggactacggtatgtcatcatcccctcatgtgttgcgcaatagagctcagagtggaagtgttccacagttcaagaaagtcgtctttcaagagtttacagatggcagcttcacacagcctctctatcggggcgagcttaacgaacatttgggactccttggtccctatatccgagccgaagtggaggacaacattatggttacctttaggaatcaagcctctcgcccctacagcttctactcctccctcatcagttatgaggaggatcagagacaaggcgctgaaccacggaagaactttgtgaaaccgaatgagacgaagacctacttctggaaagtacagcaccacatggcccccacaaaagacgaattcgattgcaaagcatgggcgtatttttcagacgttgacttggagaaagatgtacattcaggacttattggtcctttgttggtgtgtcacactaacactctcaatccagcccatggcaggcaggtgacagtccaggaattcgctcttttctttaccatctttgatgagaccaagtcctggtacttcacggaaaacatggagcgcaattgcagagccccctgtaacatacagatggaggaccctacctttaaggaaaattatcggttccacgcaatcaacggatacattatggatacactccctggccttgtgatggctcaggaccaacgaatcaggtggtacctcctcagcatgggttctaatgagaacatacactccattcacttttcaggacatgtgttcactgtccggaagaaagaagagtataagatggccctctacaatttgtatccaggcgtgtttgagaccgttgaaatgcttccctctaaagctggcatctggagagtagagtgcttgatcggagaacatcttcacgcaggtatgagcaccttgttcctcgtgtacagcaacaaatgtcagaatccacttggcatggccagtggacacattcgcgactttcagatcacagcatctggccagtatggacaatgggccccaaagttggctcgcctccattactccggtagcataaatgcgtggtccactaaagaacctttcagctggattaaggtcgatcttcttgcccccatgatcatccacggcattaagacacagggagcgaggcagaaattctcctccctctacatctcacagttcattattatgtatagtttggacggcaagaagtggcaaacttatagaggtaacagtactggaacagacatggtgttcttcggcaacgttgatagctctggcatcaaacacaacatctttaatcctcccataatagctcggtacatcagattgcatccgacccactacagcattaggagtacactccgaatggagcttatgggttgcgacttgaattcctgttcaatgccactcggaatggagtctaaagccatctctgatgcacagataaccgccagtagctactttacgaacatgtttgctacgtggtcaccctctaaggcaaggcttcatttgcaaggccggtctaatgcctggagacctcaggtgaacaacccgaaagaatggctccaggtggactttcagaagaccatgaaagtaacaggtgtcactactcagggagttaagtccttggatactagcatgtatgtgaaggagttccttatttcctcatcacaagatggccaccagtggaccctcttctttcagaatggtaaggtcaaagtgtttcagggcaatcaagacagcttcacacccgtggtgaacagtcttgatcctccactcttgacacgataccttcgaatccatccacagtcttgggagcaccagattgcattgcgcatggaagtacttggatgcgaggctcaggacctctac

SEQ ID NO: 1416 - protein, 1457 aa, synthetic construct
  REGION 1..1457: note = Variant of human B-domain deleted Factor VIII
MQIELSTCFFLCLLRFCFSATRRYYLGAVELSWDYMQSDLGELPVDARFPPRVPKSFPFNTSQVYKKTLFVEFTDHLFNIAKPRPPWMGLLGPTIQAEVYDTVVITLKNMASHPVSLHAVGVSYWKASEGAEYDDQTSQREKEDDKVFPGGSHTYVWQVLKENGPMASDPPCLTYSYLSHVDLVKDLNSGLIGALLVCREGSLAKEKTQTRHKFILLFAVFDEGKSWHSETKNSLMQDRDAASARAWPKMHTVNGYVNRTLPGLIGCHRKSVYWHVIGMGTTPEVHSIFLEGHTFLVRNHRQASLGISPITFLTAQTLLMDLGQFLLFCHIPSHQHDGMEAYVKVDSCPEEPQLRMKNNEEAEDYDDDLTDSEMDVVRFDDDNSPSIIQARSGAKKHPKTWVHYIAAEEEDWDYAPLVLAPDDRSYKSQYLNNGPQRIGRKYKKVRFMAYTDETFKTREAIQHESGILGPLLYGEVGDTLLIIFKNQASRPYNIYPHGITDVRPLYSRRLPKGVKHLKDFPILPGEIFKYKWTVTREDGPTKSDPRCLTRYYSSGVNMERDLASGLIGPLLICYKESVDQRGNQIMSDKRNVILFSVFDENRSWYLTENIQRFLPNGAGVQLEDPEFQASNIMHSINGYVFDSLQLSVCLHEVAYWYILSIGAQTDFLSVFFSGYTFKHKMVYEDTLTLFPFSGETVFMSMENPGLWILGCHNSDFRNRGMTALLKVSSCDKNTGDYYEDSYEDISAYFDSKNNAIEPRSFSQNPPVLKRHQREGTRTTLQSDQEEIDYDDTISVEMKKEDFDIYDEDENQSPRSFQKKTRHYFIAAVERLWDYGMSSSPHVLRNRAQSGSVPQFKKVVFQEFTDGSFTQPLYRGELNEHLGLLGPYIRAEVEDNIMVTFRNQASRPYSFYSSLISYEEDQRQGAEPRKNFVKPNETKTYFWKVQHHMAPTKDEFDCKAWAYFSDVDLEKDVHSGLIGPLLVCHTNTLNPAHGRQVTVQEFALFFTIFDETKSWYFTENMERNCRAPCNIQMEDPTFKENYRFHAINGYIMDTLPGLVMAQDQRIRWYLLSMGSNENIHSIHFSGHVFTVRKKEEYKMALYNLYPGVFETVEMLPSKAGIWRVECLIGEHLHAGMSTLFLVYSNKCQNPLGMASGHIRDFQITASGQYGQWAPKLARLHYSGSINAWSTKEPFSWIKVDLLAPMIIHGIKTQGARQKFSSLYISQFIIMYSLDGKKWQTYRGNSTGTDMVFFGNVDSSGIKHNIFNPPIIARYIRLHPTHYSIRSTLRMELMGCDLNSCSMPLGMESKAISDAQITASSYFTNMFATWSPSKARLHLQGRSNAWRPQVNNPKEWLQVDFQKTMKVTGVTTQGVKSLDTSMYVKEFLISSSQDGHQWTLFFQNGKVKVFQGNQDSFTPVVNSLDPPLLTRYLRIHPQSWEHQIALRMEVLGCEAQDLY

SEQ ID NO: 1417 - DNA, 4371 bp, synthetic construct
  misc_feature 1..4371: note = Variant of human B-domain deleted Factor VIII
  source 1..4371: mol_type = other DNA
atgcagattgaactgtctacctgcttcttcctctgtttgctgaggttctgctttagcgccactagacggtactaccttggcgctgtggagctgtcctgggactatatgcagagtgatttgggagagcttcccgtcgacgcacgatttcctcctcgcgttccaaagtcatttccctttaacacaagccaggtgtacaagaagacgctcttcgtcgaattcaccgatcacctgttcaatatcgccaaacccagaccaccatggatgggtcttttggggcctaccatacaagcggaggtgtatgacacagttgttatcactctcaagaacatggcttctcatccggtaagtcttcacgcagtgggcgtgtcctactggaaagcttcagaaggagccgagtatgatgatcagacatcccagagggagaaagaagacgacaaggtatttccaggtgggtctcatacctatgtgtggcaagtgctcaaagagaatggccctatggcaagcgatccgccgtgtttgacttacagctacctttcacacgttgacctcgtcaaggacctcaactccgggttgattggagccttgttggtatgcagggaaggatctcttgccaaagagaagacacagacccgccacaagtttatccttctctttgctgtgttcgatgagggcaaaagttggcatagcgaaacgaagaattccctcatgcaggatcgcgacgcagccagcgccagagcttggcccaagatgcacactgtgaacggatatgtcaataggacgcttcctggcttgattgggtgtcatcggaaaagtgtctactggcacgtgatcggaatggggacaacaccagaggtccactccatatttctcgaaggccataccttccttgttcgaaaccacagacaggcatccttggggatctctcccattacctttctcactgcccaaacgctccttatggacttgggtcagttccttctcttttgccatatcccgtcacaccagcatgatggtatggaagcttatgtgaaagtcgacagttgtcctgaggagccacagttgcgcatgaagaataatgaagaagccgaggattacgacgacgatctcaccgattctgagatggacgtggtgaggtttgatgacgacaactctccctccatcattcaagctcggagcggggcgaagaaacaccccaagacttgggtccactatatagcggcggaagaggaggattgggattacgctcctcttgtattggcaccagatgaccgctcatacaaaagccagtacctcaacaacggaccgcagagaattggccggaagtataagaaagtgcgatttatggcctatacagacgaaacctttaagacaagggaggccatccagcatgagagtgggattttgggacctcttctttacggcgaagttggtgataccctcctcatcatcttcaagaatcaagcttctcgcccctataacatttacccacacgggatcactgacgttaggcctttgtatagcagaagacttcccaaaggcgtgaagcatctcaaagacttccccattttgccaggcgagatctttaagtacaaatggaccgtcacagtggaagatggaccgactaaatcagaccctcgatgccttacgcggtactattcctccttcgtgaatatggagagagatttggcaagcggactcataggaccactcctcatctgttacaaggaatctgtagaccagaggggtaaccagattatgagtgataaacgcaatgtgatcctttttagcgtcttcgacgagaaccggtcctggtacttgaccgagaatatacaaaggttccttcccaacccggcaggcgttcagctggaagaccctgagtttcaggccagcaatattatgcactcaatcaacggctatgtgtttgatagtctccagctttctgtttgcctccatgaagtagcctattggtacatcttgtcaattggtgctcaaacagacttcctctccgtcttcttctccggctacacctttaagcacaagcgtgtgtatgaggacactctcacactctttccattttctggagaaaccgtgttcatgagcatggagaatccaggcctttggatcttgggttgccacaacagtgattttcgcaatcggggaatgactgctctcctcaaagtcagcagctgtgataagaacacaggcgactattacgaagattcttacgaggacataagtgcctactttgactccaagaataacgccattgagcccagatcattctcccagaatcctcccgtgcttaaaaggcatcagcgcgaaggtaccagaactactcttcagtctgatcaagaggagattgactatgacgacaccattagcgtggaaatgaagaaggaggatttcgatatctatgacgaagatgagaaccagtctccgcggagctttcagaagaagacgcgacactacttcattgcagcagtcgaaaggctttgggactacggtatgtcatcatcccctcatgtgttgcgcaatagagctcagagtggaagtgttccacagttcaagaaagtcgtctttcaagagtttacagatggcagcttcacacagcctctctatcggggcgagcttaacgaacatttgggactccttggtccctatatccgagccgaagtggaggacaacattatggttacctttaggaatcaagcctctcgcccctacagcttctactcctccctcatcagttatgaggaggatcagagacaaggcgctgaaccacggaagaactttgtgaaaccgaatgagacgaagacctacttctggaaagtacagcaccacatggcccccacaaaagacgaattcgattgcaaagcatgggcgtatttttcagacgttgacttggagaaagatgtacattcaggacttattggtcctttgttggtgtgtcacactaacactctcaatccagcccatggcaggcaggtgacagtccaggaattcgctcttttctttaccatctttgatgagaccaagtcctggtacttcacggaaaacatggagcgcaattgcagagccccctgtaacatacagatggaggaccctacctttaaggaaaattatcggttccacgcaatcaacggatacattatggatacactccctggccttgtgatggctcaggaccaacgaatcaggtggtacctcctcagcatgggttctaatgagaacatacactccattcacttttcaggacatgtgttcactgtccggaagaaagaagagtataagatggccctctacaatttgtatccaggcgtgtttgagaccgttgaaatgcttccctctaaagctggcatctggagagtagagtgcttgatcggagaacatcttcacgcaggtatgagcaccttgttcctcgtgtacagcaacaaatgtcagaatccacttggcatggccagtggacacattcgcgactttcagatcacagcatctggccagtatggacaatgggccccaaagttggctcgcctccattactccggtagcataaatgcgtggtccactaaagaacctttcagctggattaaggtcgatcttcttgcccccatgatcatccacggcattaagacacagggagcgaggcagaaattctcctccctctacatctcacagttcattattatgtatagtttggacggcaagaagtggcaaacttatagaggtaacagtactggaacagacatggtgttcttcggcaacgttgatagctctggcatcaaacacaacatctttaatcctcccataatagctcggtacatcagattgcatccgacccactacagcattaggagtacactccgaatggagcttatgggttgcgacttgaattcctgttcaatgccactcggaatggagtctaaagccatctctgatgcacagataaccgccagtagctactttacgaacatgtttgctacgtggtcaccctctaaggcaaggcttcatttgcaaggccggtctaatgcctggagacctcaggtgaacaacccgaaagaatggctccaggtggactttcagaagaccatgaaagtaacaggtgtcactactcagggagttaagtccttggatactagcatgtatgtgaaggagttccttatttcctcatcacaagatggccaccagtggaccctcttctttcagaatggtaaggtcaaagtgtttcagggcaatcaagacagcttcacacccgtggtgaacagtcttgatcctccactcttgacacgataccttcgaatccatccacagtcttgggagcaccagattgcattgcgcatggaagtacttggatgcgaggctcaggacctctac

SEQ ID NO: 1418 - protein, 1457 aa, synthetic construct
  REGION 1..1457: note = Variant of human B-domain deleted Factor VIII
MQIELSTCFFLCLLRFCFSATRRYYLGAVELSWDYMQSDLGELPVDARFPPRVPKSFPFNTSQVYKKTLFVEFTDHLFNIAKPRPPWMGLLGPTIQAEVYDTVVITLKNMASHPVSLHAVGVSYWKASEGAEYDDQTSQREKEDDKVFPGGSHTYVWQVLKENGPMASDPPCLTYSYLSHVDLVKDLNSGLIGALLVCREGSLAKEKTQTRHKFILLFAVFDEGKSWHSETKNSLMQDRDAASARAWPKMHTVNGYVNRTLPGLIGCHRKSVYWHVIGMGTTPEVHSIFLEGHTFLVRNHRQASLGISPITFLTAQTLLMDLGQFLLFCHIPSHQHDGMEAYVKVDSCPEEPQLRMKNNEEAEDYDDDLTDSEMDVVRFDDDNSPSIIQARSGAKKHPKTWVHYIAAEEEDWDYAPLVLAPDDRSYKSQYLNNGPQRIGRKYKKVRFMAYTDETFKTREAIQHESGILGPLLYGEVGDTLLIIFKNQASRPYNIYPHGITDVRPLYSRRLPKGVKHLKDFPILPGEIFKYKWTVTVEDGPTKSDPRCLTRYYSSFVNMERDLASGLIGPLLICYKESVDQRGNQIMSDKRNVILFSVFDENRSWYLTENIQRFLPNPAGVQLEDPEFQASNIMHSINGYVFDSLQLSVCLHEVAYWYILSIGAQTDFLSVFFSGYTFKHKRVYEDTLTLFPFSGETVFMSMENPGLWILGCHNSDFRNRGMTALLKVSSCDKNTGDYYEDSYEDISAYFDSKNNAIEPRSFSQNPPVLKRHQREGTRTTLQSDQEEIDYDDTISVEMKKEDFDIYDEDENQSPRSFQKKTRHYFIAAVERLWDYGMSSSPHVLRNRAQSGSVPQFKKVVFQEFTDGSFTQPLYRGELNEHLGLLGPYIRAEVEDNIMVTFRNQASRPYSFYSSLISYEEDQRQGAEPRKNFVKPNETKTYFWKVQHHMAPTKDEFDCKAWAYFSDVDLEKDVHSGLIGPLLVCHTNTLNPAHGRQVTVQEFALFFTIFDETKSWYFTENMERNCRAPCNIQMEDPTFKENYRFHAINGYIMDTLPGLVMAQDQRIRWYLLSMGSNENIHSIHFSGHVFTVRKKEEYKMALYNLYPGVFETVEMLPSKAGIWRVECLIGEHLHAGMSTLFLVYSNKCQNPLGMASGHIRDFQITASGQYGQWAPKLARLHYSGSINAWSTKEPFSWIKVDLLAPMIIHGIKTQGARQKFSSLYISQFIIMYSLDGKKWQTYRGNSTGTDMVFFGNVDSSGIKHNIFNPPIIARYIRLHPTHYSIRSTLRMELMGCDLNSCSMPLGMESKAISDAQITASSYFTNMFATWSPSKARLHLQGRSNAWRPQVNNPKEWLQVDFQKTMKVTGVTTQGVKSLDTSMYVKEFLISSSQDGHQWTLFFQNGKVKVFQGNQDSFTPVVNSLDPPLLTRYLRIHPQSWEHQIALRMEVLGCEAQDLY

SEQ ID NO: 1419 - DNA, 4371 bp, synthetic construct
  misc_feature 1..4371: note = Variant of human B-domain deleted Factor VIII
  source 1..4371: mol_type = other DNA
atgcagattgaactgtctacctgcttcttcctctgtttgctgaggttctgctttagcgccactagacggtactaccttggcgctgtggagctgtcctgggactatatgcagagtgatttgggagagcttcccgtcgacgcacgatttcctcctcgcgttccaaagtcatttccctttaacacaagccaggtgtacaagaagacgctcttcgtcgaattcaccgatcacctgttcaatatcgccaaacccagaccaccatggatgggtcttttggggcctaccatacaagcggaggtgtatgacacagttgttatcactctcaagaacatggcttctcatccggtaagtcttcacgcagtgggcgtgtcctactggaaagcttcagaaggagccgagtatgatgatcagacatcccagagggagaaagaagacgacaaggtatttccaggtgggtctcatacctatgtgtggcaagtgctcaaagagaatggccctatggcaagcgatccgccgtgtttgacttacagctacctttcacacgttgacctcgtcaaggacctcaactccgggttgattggagccttgttggtatgcagggaaggatctcttgccaaagagaagacacagacccgccacaagtttatccttctctttgctgtgttcgatgagggcaaaagttggcatagcgaaacgaagaattccctcatgcaggatcgcgacgcagccagcgccagagcttggcccaagatgcacactgtgaacggatatgtcaataggacgcttcctggcttgattgggtgtcatcggaaaagtgtctactggcacgtgatcggaatggggacaacaccagaggtccactccatatttctcgaaggccataccttccttgttcgaaaccacagacaggcatccttggggatctctcccattacctttctcactgcccaaacgctccttatggacttgggtcagttccttctcttttgccatatcccgtcacaccagcatgatggtatggaagcttatgtgaaagtcgacagttgtcctgaggagccacagttgcgcatgaagaataatgaagaagccgaggattacgacgacgatctcaccgattctgagatggacgtggtgaggtttgatgacgacaactctccctccatcattcaagctcggagcggggcgaagaaacaccccaagacttgggtccactatatagcggcggaagaggaggattgggattacgctcctcttgtattggcaccagatgaccgctcatacaaaagccagtacctcaacaacggaccgcagagaattggccggaagtataagaaagtgcgatttatggcctatacagacgaaacctttaagacaagggaggccatccagcatgagagtgggattttgggacctcttctttacggcgaagttggtgataccctcctcatcatcttcaagaatcaagcttctcgcccctataacatttacccacacgggatcactgacgttaggcctttgtatagcagaagacttcccaaaggcgtgaagcatctcaaagacttccccattttgccaggcgagatctttaagtacaaatggaccgtcacaaaggaagatggaccgactaaatcagaccctcgatgccttacgcggtactattcctccgaggtgaatatggagagagatttggcaagcggactcataggaccactcctcatctgttacaaggaatctgtagaccagaggggtaaccagattatgagtgataaacgcaatgtgatcctttttagcgtcttcgacgagaaccggtcctggtacttgaccgagaatatacaaaggttccttcccaaccccgcaggcgttcagttggaagaccctgagtttcaggccagcaatattatgcactcaatcaacggctatgtgtttgatagtctccagctttctgtttgcctccatgaagtagcctattggtacatcttgtcaattggtgctcaaacagacttcctctccgtcttcttctccggctacacctttaagcacaagatggtgtatgaggacactctcacactctttccattttctggagaaaccgtgttcatgagcatggagaatccaggcctttggatcttgggttgccacaacagtgattttcgcaatcggggaatgactgctctcctcaaagtcagcagctgtgattggaacacaggcgactattacgaagattcttacgaggacataagtgcctactttgactccaagaataacgccattgagcccagatcattctcccagaatcctcccgtgcttaaaaggcatcagcgcgaaggtaccagaactactcttcagtctgatcaagaggagattgactatgacgacaccattagcgtggaaatgaagaaggaggatttcgatatctatgacgaagatgagaaccagtctccgcggagctttcagaagaagacgcgacactacttcattgcagcagtcgaaaggctttgggactacggtatgtcatcatcccctcatgtgttgcgcaatagagctcagagtggaagtgttccacagttcaagaaagtcgtctttcaagagtttacagatggcagcttcacacagcctctctatcggggcgagcttaacgaacatttgggactccttggtccctatatccgagccgaagtggaggacaacattatggttacctttaggaatcaagcctctcgcccctacagcttctactcctccctcatcagttatgaggaggatcagagacaaggcgctgaaccacggaagaactttgtgaaaccgaatgagacgaagacctacttctggaaagtacagcaccacatggcccccacaaaagacgaattcgattgcaaagcatgggcgtatttttcagacgttgacttggagaaagatgtacattcaggacttattggtcctttgttggtgtgtcacactaacactctcaatccagcccatggcaggcaggtgacagtccaggaattcgctcttttctttaccatctttgatgagaccaagtcctggtacttcacggaaaacatggagcgcaattgcagagccccctgtaacatacagatggaggaccctacctttaaggaaaattatcggttccacgcaatcaacggatacattatggatacactccctggccttgtgatggctcaggaccaacgaatcaggtggtacctcctcagcatgggttctaatgagaacatacactccattcacttttcaggacatgtgttcactgtccggaagaaagaagagtataagatggccctctacaatttgtatccaggcgtgtttgagaccgttgaaatgcttccctctaaagctggcatctggagagtagagtgcttgatcggagaacatcttcacgcaggtatgagcaccttgttcctcgtgtacagcaacaaatgtcagaatccacttggcatggccagtggacacattcgcgactttcagatcacagcatctggccagtatggacaatgggccccaaagttggctcgcctccattactccggtagcataaatgcgtggtccactaaagaacctttcagctggattaaggtcgatcttcttgcccccatgatcatccacggcattaagacacagggagcgaggcagaaattctcctccctctacatctcacagttcattattatgtatagtttggacggcaagaagtggcaaacttatagaggtaacagtactggaacagacatggtgttcttcggcaacgttgatagctctggcatcaaacacaacatctttaatcctcccataatagctcggtacatcagattgcatccgacccactacagcattaggagtacactccgaatggagcttatgggttgcgacttgaattcctgttcaatgccactcggaatggagtctaaagccatctctgatgcacagataaccgccagtagctactttacgaacatgtttgctacgtggtcaccctctaaggcaaggcttcatttgcaaggccggtctaatgcctggagacctcaggtgaacaacccgaaagaatggctccaggtggactttcagaagaccatgaaagtaacaggtgtcactactcagggagttaagtccttggatactagcatgtatgtgaaggagttccttatttcctcatcacaagatggccaccagtggaccctcttctttcagaatggtaaggtcaaagtgtttcagggcaatcaagacagcttcacacccgtggtgaacagtcttgatcctccactcttgacacgataccttcgaatccatccacagtcttgggagcaccagattgcattgcgcatggaagtacttggatgcgaggctcaggacctctac

SEQ ID NO: 1420 - protein, 1457 aa, synthetic construct
  REGION 1..1457: note = Variant of human B-domain deleted Factor VIII
MQIELSTCFFLCLLRFCFSATRRYYLGAVELSWDYMQSDLGELPVDARFPPRVPKSFPFNTSQVYKKTLFVEFTDHLFNIAKPRPPWMGLLGPTIQAEVYDTVVITLKNMASHPVSLHAVGVSYWKASEGAEYDDQTSQREKEDDKVFPGGSHTYVWQVLKENGPMASDPPCLTYSYLSHVDLVKDLNSGLIGALLVCREGSLAKEKTQTRHKFILLFAVFDEGKSWHSETKNSLMQDRDAASARAWPKMHTVNGYVNRTLPGLIGCHRKSVYWHVIGMGTTPEVHSIFLEGHTFLVRNHRQASLGISPITFLTAQTLLMDLGQFLLFCHIPSHQHDGMEAYVKVDSCPEEPQLRMKNNEEAEDYDDDLTDSEMDVVRFDDDNSPSIIQARSGAKKHPKTWVHYIAAEEEDWDYAPLVLAPDDRSYKSQYLNNGPQRIGRKYKKVRFMAYTDETFKTREAIQHESGILGPLLYGEVGDTLLIIFKNQASRPYNIYPHGITDVRPLYSRRLPKGVKHLKDFPILPGEIFKYKWTVTKEDGPTKSDPRCLTRYYSSEVNMERDLASGLIGPLLICYKESVDQRGNQIMSDKRNVILFSVFDENRSWYLTENIQRFLPNPAGVQLEDPEFQASNIMHSINGYVFDSLQLSVCLHEVAYWYILSIGAQTDFLSVFFSGYTFKHKMVYEDTLTLFPFSGETVFMSMENPGLWILGCHNSDFRNRGMTALLKVSSCDWNTGDYYEDSYEDISAYFDSKNNAIEPRSFSQNPPVLKRHQREGTRTTLQSDQEEIDYDDTISVEMKKEDFDIYDEDENQSPRSFQKKTRHYFIAAVERLWDYGMSSSPHVLRNRAQSGSVPQFKKVVFQEFTDGSFTQPLYRGELNEHLGLLGPYIRAEVEDNIMVTFRNQASRPYSFYSSLISYEEDQRQGAEPRKNFVKPNETKTYFWKVQHHMAPTKDEFDCKAWAYFSDVDLEKDVHSGLIGPLLVCHTNTLNPAHGRQVTVQEFALFFTIFDETKSWYFTENMERNCRAPCNIQMEDPTFKENYRFHAINGYIMDTLPGLVMAQDQRIRWYLLSMGSNENIHSIHFSGHVFTVRKKEEYKMALYNLYPGVFETVEMLPSKAGIWRVECLIGEHLHAGMSTLFLVYSNKCQNPLGMASGHIRDFQITASGQYGQWAPKLARLHYSGSINAWSTKEPFSWIKVDLLAPMIIHGIKTQGARQKFSSLYISQFIIMYSLDGKKWQTYRGNSTGTDMVFFGNVDSSGIKHNIFNPPIIARYIRLHPTHYSIRSTLRMELMGCDLNSCSMPLGMESKAISDAQITASSYFTNMFATWSPSKARLHLQGRSNAWRPQVNNPKEWLQVDFQKTMKVTGVTTQGVKSLDTSMYVKEFLISSSQDGHQWTLFFQNGKVKVFQGNQDSFTPVVNSLDPPLLTRYLRIHPQSWEHQIALRMEVLGCEAQDLY

SEQ ID NO: 1421 - DNA, 4371 bp, synthetic construct
  misc_feature 1..4371: note = Variant of human B-domain deleted Factor VIII
  source 1..4371: mol_type = other DNA
atgcagattgaactgtctacctgcttcttcctctgtttgctgaggttctgctttagcgccactagacggtactaccttggcgctgtggagctgtcctgggactatatgcagagtgatttgggagagcttcccgtcgacgcacgatttcctcctcgcgttccaaagtcatttccctttaacacaagccaggtgtacaagaagacgctcttcgtcgaattcaccgatcacctgttcaatatcgccaaacccagaccaccatggatgggtcttttggggcctaccatacaagcggaggtgtatgacacagttgttatcactctcaagaacatggcttctcatccggtaagtcttcacgcagtgggcgtgtcctactggaaagcttcagaaggagccgagtatgatgatcagacatcccagagggagaaagaagacgacaaggtatttccaggtgggtctcatacctatgtgtggcaagtgctcaaagagaatggccctatggcaagcgatccgccgtgtttgacttacagctacctttcacacgttgacctcgtcaaggacctcaactccgggttgattggagccttgttggtatgcagggaaggatctcttgccaaagagaagacacagaccctgcacaagtttatccttctctttgctgtgttcgatgagggcaaaagttggcatagcgaaacgaagaattccctcatgcaggatcgcgacgcagccagcgccagagcttggcccaagatgcacactgtgaacggatatgtcaataggacgcttcctggcttgattgggtgtcatcggaaaagtgtctactggcacgtgatcggaatggggacaacaccagaggtccactccatatttctcgaaggccataccttccttgttcgaaaccacagacaggcatccttggggatctctcccattacctttctcactgcccaaacgctccttatggacttgggtcagttccttctcttttgccatatcccgtcacaccagcatgatggtatggaagcttatgtgaaagtcgacagttgtcctgaggagccacagttgcgcatgaagaataatgaagaagccgaggattacgacgacgatctcaccgattctgagatggacgtggtgaggtttgatgacgacaactctccctccatcattcaagctcggagcggggcgaagaaacaccccaagacttgggtccactatatagcggcggaagaggaggattgggattacgctcctcttgtattggcaccagatgaccgctcatacaaaagccagtacctcaacaacggaccgcagagaattggccggaagtataagaaagtgcgatttatggcctatacagacgaaacctttaagacaagggaggccatccagcatgagagtgggattttgggacctcttctttacggcgaagttggtgataccctcctcatcatcttcaagaatcaagcttctcgcccctataacatttacccacacgggatcactgacgttaggcctttgtatagcagaagacttcccaaaggcgtgaagcatctcaaagacttccccattttgccaggcgagatctttaagtacaaatggaccgtcacacgtgaagatggaccgactaaatcagaccctcgatgccttacgcggtactattcctccttcgtgaatatggagagagatttggcaagcggactcataggaccactcctcatctgttacaaggaatctgtagaccagaggggtaaccagattatgagtgataaacgcaatgtgatcctttttagcgtcttcgacgagaaccggtcctggtacttgaccgagaatatacaaaggttccttcccaaccccgcaggcgttcagttggaagaccctgagtttcaggccagcaatattatgcactcaatcaacggctatgtgtttgatagtctccagctttctgtttgcctccatgaagtagcctattggtacatcttgtcaattggtgctcaaacagacttcctctccgtcttcttctccggctacacctttaagcacaagatggtgtatgaggacactctcacactctttccattttctggagaaaccgtgttcatgagcatggagaatccaggcctttggatcttgggttgccacaacagtgattttcgcaatcggggaatgactgctctcctcaaagtcagcagctgtgattggaacacaggcgactattacgaagattcttacgaggacataagtgcctactttgactccaagaataacgccattgagcccagatcattctcccagaatcctcccgtgcttaaaaggcatcagcgcgaaggtaccagaactactcttcagtctgatcaagaggagattgactatgacgacaccattagcgtggaaatgaagaaggaggatttcgatatctatgacgaagatgagaaccagtctccgcggagctttcagaagaagacgcgacactacttcattgcagcagtcgaaaggctttgggactacggtatgtcatcatcccctcatgtgttgcgcaatagagctcagagtggaagtgttccacagttcaagaaagtcgtctttcaagagtttacagatggcagcttcacacagcctctctatcggggcgagcttaacgaacatttgggactccttggtccctatatccgagccgaagtggaggacaacattatggttacctttaggaatcaagcctctcgcccctacagcttctactcctccctcatcagttatgaggaggatcagagacaaggcgctgaaccacggaagaactttgtgaaaccgaatgagacgaagacctacttctggaaagtacagcaccacatggcccccacaaaagacgaattcgattgcaaagcatgggcgtatttttcagacgttgacttggagaaagatgtacattcaggacttattggtcctttgttggtgtgtcacactaacactctcaatccagcccatggcaggcaggtgacagtccaggaattcgctcttttctttaccatctttgatgagaccaagtcctggtacttcacggaaaacatggagcgcaattgcagagccccctgtaacatacagatggaggaccctacctttaaggaaaattatcggttccacgcaatcaacggatacattatggatacactccctggccttgtgatggctcaggaccaacgaatcaggtggtacctcctcagcatgggttctaatgagaacatacactccattcacttttcaggacatgtgttcactgtccggaagaaagaagagtataagatggccctctacaatttgtatccaggcgtgtttgagaccgttgaaatgcttccctctaaagctggcatctggagagtagagtgcttgatcggagaacatcttcacgcaggtatgagcaccttgttcctcgtgtacagcaacaaatgtcagaatccacttggcatggccagtggacacattcgcgactttcagatcacagcatctggccagtatggacaatgggccccaaagttggctcgcctccattactccggtagcataaatgcgtggtccactaaagaacctttcagctggattaaggtcgatcttcttgcccccatgatcatccacggcattaagacacagggagcgaggcagaaattctcctccctctacatctcacagttcattattatgtatagtttggacggcaagaagtggcaaacttatagaggtaacagtactggaacagacatggtgttcttcggcaacgttgatagctctggcatcaaacacaacatctttaatcctcccataatagctcggtacatcagattgcatccgacccactacagcattaggagtacactccgaatggagcttatgggttgcgacttgaattcctgttcaatgccactcggaatggagtctaaagccatctctgatgcacagataaccgccagtagctactttacgaacatgtttgctacgtggtcaccctctaaggcaaggcttcatttgcaaggccggtctaatgcctggagacctcaggtgaacaacccgaaagaatggctccaggtggactttcagaagaccatgaaagtaacaggtgtcactactcagggagttaagtccttggatactagcatgtatgtgaaggagttccttatttcctcatcacaagatggccaccagtggaccctcttctttcagaatggtaaggtcaaagtgtttcagggcaatcaagacagcttcacacccgtggtgaacagtcttgatcctccactcttgacacgataccttcgaatccatccacagtcttgggagcaccagattgcattgcgcatggaagtacttggatgcgaggctcaggacctctac

SEQ ID NO: 1422 - protein, 1457 aa, synthetic construct
  REGION 1..1457: note = Variant of human B-domain deleted Factor VIII
MQIELSTCFFLCLLRFCFSATRRYYLGAVELSWDYMQSDLGELPVDARFPPRVPKSFPFNTSQVYKKTLFVEFTDHLFNIAKPRPPWMGLLGPTIQAEVYDTVVITLKNMASHPVSLHAVGVSYWKASEGAEYDDQTSQREKEDDKVFPGGSHTYVWQVLKENGPMASDPPCLTYSYLSHVDLVKDLNSGLIGALLVCREGSLAKEKTQTLHKFILLFAVFDEGKSWHSETKNSLMQDRDAASARAWPKMHTVNGYVNRTLPGLIGCHRKSVYWHVIGMGTTPEVHSIFLEGHTFLVRNHRQASLGISPITFLTAQTLLMDLGQFLLFCHIPSHQHDGMEAYVKVDSCPEEPQLRMKNNEEAEDYDDDLTDSEMDVVRFDDDNSPSIIQARSGAKKHPKTWVHYIAAEEEDWDYAPLVLAPDDRSYKSQYLNNGPQRIGRKYKKVRFMAYTDETFKTREAIQHESGILGPLLYGEVGDTLLIIFKNQASRPYNIYPHGITDVRPLYSRRLPKGVKHLKDFPILPGEIFKYKWTVTREDGPTKSDPRCLTRYYSSFVNMERDLASGLIGPLLICYKESVDQRGNQIMSDKRNVILFSVFDENRSWYLTENIQRFLPNPAGVQLEDPEFQASNIMHSINGYVFDSLQLSVCLHEVAYWYILSIGAQTDFLSVFFSGYTFKHKMVYEDTLTLFPFSGETVFMSMENPGLWILGCHNSDFRNRGMTALLKVSSCDWNTGDYYEDSYEDISAYFDSKNNAIEPRSFSQNPPVLKRHQREGTRTTLQSDQEEIDYDDTISVEMKKEDFDIYDEDENQSPRSFQKKTRHYFIAAVERLWDYGMSSSPHVLRNRAQSGSVPQFKKVVFQEFTDGSFTQPLYRGELNEHLGLLGPYIRAEVEDNIMVTFRNQASRPYSFYSSLISYEEDQRQGAEPRKNFVKPNETKTYFWKVQHHMAPTKDEFDCKAWAYFSDVDLEKDVHSGLIGPLLVCHTNTLNPAHGRQVTVQEFALFFTIFDETKSWYFTENMERNCRAPCNIQMEDPTFKENYRFHAINGYIMDTLPGLVMAQDQRIRWYLLSMGSNENIHSIHFSGHVFTVRKKEEYKMALYNLYPGVFETVEMLPSKAGIWRVECLIGEHLHAGMSTLFLVYSNKCQNPLGMASGHIRDFQITASGQYGQWAPKLARLHYSGSINAWSTKEPFSWIKVDLLAPMIIHGIKTQGARQKFSSLYISQFIIMYSLDGKKWQTYRGNSTGTDMVFFGNVDSSGIKHNIFNPPIIARYIRLHPTHYSIRSTLRMELMGCDLNSCSMPLGMESKAISDAQITASSYFTNMFATWSPSKARLHLQGRSNAWRPQVNNPKEWLQVDFQKTMKVTGVTTQGVKSLDTSMYVKEFLISSSQDGHQWTLFFQNGKVKVFQGNQDSFTPVVNSLDPPLLTRYLRIHPQSWEHQIALRMEVLGCEAQDLY

SEQ ID NO: 1423 - DNA, 4371 bp, synthetic construct
  misc_feature 1..4371: note = Variant of human B-domain deleted Factor VIII
  source 1..4371: mol_type = other DNA
atgcagattgaactgtctacctgcttcttcctctgtttgctgaggttctgctttagcgccactagacggtactaccttggcgctgtggagctgtcctgggactatatgcagagtgatttgggagagcttcccgtcgacgcacgatttcctcctcgcgttccaaagtcatttccctttaacacaagccaggtgtacaagaagacgctcttcgtcgaattcaccgatcacctgttcaatatcgccaaacccagaccaccatggatgggtcttttggggcctaccatacaagcggaggtgtatgacacagttgttatcactctcaagaacatggcttctcatccggtaagtcttcacgcagtgggcgtgtcctactggaaagcttcagaaggagccgagtatgatgatcagacatcccagagggagaaagaagacgacaaggtatttccaggtgggtctcatacctatgtgtggcaagtgctcaaagagaatggccctatggcaagcgatccgccgtgtttgacttacagctacctttcacacgttgacctcgtcaaggacctcaactccgggttgattggagccttgttggtatgcagggaaggatctcttgccaaagagaagacacagaccctgcacaagtttatccttctctttgctgtgttcgatgagggcaaaagttggcatagcgaaacgaagaattccctcatgcaggatcgcgacgcagccagcgccagagcttggcccaagatgcacactgtgaacggatatgtcaataggacgcttcctggcttgattgggtgtcatcggaaaagtgtctactggcacgtgatcggaatggggacaacaccagaggtccactccatatttctcgaaggccataccttccttgttcgaaaccacagacaggcatccttggggatctctcccattacctttctcactgcccaaacgctccttatggacttgggtcagttccttctcttttgccatatcccgtcacaccagcatgatggtatggaagcttatgtgaaagtcgacagttgtcctgaggagccacagttgcgcatgaagaataatgaagaagccgaggattacgacgacgatctcaccgattctgagatggacgtggtgaggtttgatgacgacaactctccctccatcattcaagctcggagcggggcgaagaaacaccccaagacttgggtccactatatagcggcggaagaggaggattgggattacgctcctcttgtattggcaccagatgaccgctcatacaaaagccagtacctcaacaacggaccgcagagaattggccggaagtataagaaagtgcgatttatggcctatacagacgaaacctttaagacaagggaggccatccagcatgagagtgggattttgggacctcttctttacggcgaagttggtgataccctcctcatcatcttcaagaatcaagcttctcgcccctataacatttacccacacgggatcactgacgttaggcctttgtatagcagaagacttcccaaaggcgtgaagcatctcaaagacttccccattttgccaggcgagatctttaagtacaaatggaccgtcacagtcgaagatggaccgactaaatcagaccctcgatgccttacgcggtactattcctccgaggtgaatatggagagagatttggcaagcggactcataggaccactcctcatctgttacaaggaatctgtagaccagaggggtaaccagattatgagtgataaacgcaatgtgatcctttttagcgtcttcgacgagaaccggtcctggtacttgaccgagaatatacaaaggttccttcccaaccccgcaggcgttcagttggaagaccctgagtttcaggccagcaatattatgcactcaatcaacggctatgtgtttgatagtctccagctttctgtttgcctccatgaagtagcctattggtacatcttgtcaattggtgctcaaacagacttcctctccgtcttcttctccggctacacctttaagcacaagatggtgtatgaggacactctcacactctttccattttctggagaaaccgtgttcatgagcatggagaatccaggcctttggatcttgggttgccacaacagtgattttcgcaatcggggaatgactgctctcctcaaagtcagcagctgtgattggaacacaggcgactattacgaagattcttacgaggacataagtgcctactttgactccaagaataacgccattgagcccagatcattctcccagaatcctcccgtgcttaaaaggcatcagcgcgaaggtaccagaactactcttcagtctgatcaagaggagattgactatgacgacaccattagcgtggaaatgaagaaggaggatttcgatatctatgacgaagatgagaaccagtctccgcggagctttcagaagaagacgcgacactacttcattgcagcagtcgaaaggctttgggactacggtatgtcatcatcccctcatgtgttgcgcaatagagctcagagtggaagtgttccacagttcaagaaagtcgtctttcaagagtttacagatggcagcttcacacagcctctctatcggggcgagcttaacgaacatttgggactccttggtccctatatccgagccgaagtggaggacaacattatggttacctttaggaatcaagcctctcgcccctacagcttctactcctccctcatcagttatgaggaggatcagagacaaggcgctgaaccacggaagaactttgtgaaaccgaatgagacgaagacctacttctggaaagtacagcaccacatggcccccacaaaagacgaattcgattgcaaagcatgggcgtatttttcagacgttgacttggagaaagatgtacattcaggacttattggtcctttgttggtgtgtcacactaacactctcaatccagcccatggcaggcaggtgacagtccaggaattcgctcttttctttaccatctttgatgagaccaagtcctggtacttcacggaaaacatggagcgcaattgcagagccccctgtaacatacagatggaggaccctacctttaaggaaaattatcggttccacgcaatcaacggatacattatggatacactccctggccttgtgatggctcaggaccaacgaatcaggtggtacctcctcagcatgggttctaatgagaacatacactccattcacttttcaggacatgtgttcactgtccggaagaaagaagagtataagatggccctctacaatttgtatccaggcgtgtttgagaccgttgaaatgcttccctctaaagctggcatctggagagtagagtgcttgatcggagaacatcttcacgcaggtatgagcaccttgttcctcgtgtacagcaacaaatgtcagaatccacttggcatggccagtggacacattcgcgactttcagatcacagcatctggccagtatggacaatgggccccaaagttggctcgcctccattactccggtagcataaatgcgtggtccactaaagaacctttcagctggattaaggtcgatcttcttgcccccatgatcatccacggcattaagacacagggagcgaggcagaaattctcctccctctacatctcacagttcattattatgtatagtttggacggcaagaagtggcaaacttatagaggtaacagtactggaacagacatggtgttcttcggcaacgttgatagctctggcatcaaacacaacatctttaatcctcccataatagctcggtacatcagattgcatccgacccactacagcattaggagtacactccgaatggagcttatgggttgcgacttgaattcctgttcaatgccactcggaatggagtctaaagccatctctgatgcacagataaccgccagtagctactttacgaacatgtttgctacgtggtcaccctctaaggcaaggcttcatttgcaaggccggtctaatgcctggagacctcaggtgaacaacccgaaagaatggctccaggtggactttcagaagaccatgaaagtaacaggtgtcactactcagggagttaagtccttggatactagcatgtatgtgaaggagttccttatttcctcatcacaagatggccaccagtggaccctcttctttcagaatggtaaggtcaaagtgtttcagggcaatcaagacagcttcacacccgtggtgaacagtcttgatcctccactcttgacacgataccttcgaatccatccacagtcttgggagcaccagattgcattgcgcatggaagtacttggatgcgaggctcaggacctctac

SEQ ID NO: 1424 - protein, 1457 aa, synthetic construct
  REGION 1..1457: note = Variant of human B-domain deleted Factor VIII
MQIELSTCFFLCLLRFCFSATRRYYLGAVELSWDYMQSDLGELPVDARFPPRVPKSFPFNTSQVYKKTLFVEFTDHLFNIAKPRPPWMGLLGPTIQAEVYDTVVITLKNMASHPVSLHAVGVSYWKASEGAEYDDQTSQREKEDDKVFPGGSHTYVWQVLKENGPMASDPPCLTYSYLSHVDLVKDLNSGLIGALLVCREGSLAKEKTQTLHKFILLFAVFDEGKSWHSETKNSLMQDRDAASARAWPKMHTVNGYVNRTLPGLIGCHRKSVYWHVIGMGTTPEVHSIFLEGHTFLVRNHRQASLGISPITFLTAQTLLMDLGQFLLFCHIPSHQHDGMEAYVKVDSCPEEPQLRMKNNEEAEDYDDDLTDSEMDVVRFDDDNSPSIIQARSGAKKHPKTWVHYIAAEEEDWDYAPLVLAPDDRSYKSQYLNNGPQRIGRKYKKVRFMAYTDETFKTREAIQHESGILGPLLYGEVGDTLLIIFKNQASRPYNIYPHGITDVRPLYSRRLPKGVKHLKDFPILPGEIFKYKWTVTVEDGPTKSDPRCLTRYYSSEVNMERDLASGLIGPLLICYKESVDQRGNQIMSDKRNVILFSVFDENRSWYLTENIQRFLPNPAGVQLEDPEFQASNIMHSINGYVFDSLQLSVCLHEVAYWYILSIGAQTDFLSVFFSGYTFKHKMVYEDTLTLFPFSGETVFMSMENPGLWILGCHNSDFRNRGMTALLKVSSCDWNTGDYYEDSYEDISAYFDSKNNAIEPRSFSQNPPVLKRHQREGTRTTLQSDQEEIDYDDTISVEMKKEDFDIYDEDENQSPRSFQKKTRHYFIAAVERLWDYGMSSSPHVLRNRAQSGSVPQFKKVVFQEFTDGSFTQPLYRGELNEHLGLLGPYIRAEVEDNIMVTFRNQASRPYSFYSSLISYEEDQRQGAEPRKNFVKPNETKTYFWKVQHHMAPTKDEFDCKAWAYFSDVDLEKDVHSGLIGPLLVCHTNTLNPAHGRQVTVQEFALFFTIFDETKSWYFTENMERNCRAPCNIQMEDPTFKENYRFHAINGYIMDTLPGLVMAQDQRIRWYLLSMGSNENIHSIHFSGHVFTVRKKEEYKMALYNLYPGVFETVEMLPSKAGIWRVECLIGEHLHAGMSTLFLVYSNKCQNPLGMASGHIRDFQITASGQYGQWAPKLARLHYSGSINAWSTKEPFSWIKVDLLAPMIIHGIKTQGARQKFSSLYISQFIIMYSLDGKKWQTYRGNSTGTDMVFFGNVDSSGIKHNIFNPPIIARYIRLHPTHYSIRSTLRMELMGCDLNSCSMPLGMESKAISDAQITASSYFTNMFATWSPSKARLHLQGRSNAWRPQVNNPKEWLQVDFQKTMKVTGVTTQGVKSLDTSMYVKEFLISSSQDGHQWTLFFQNGKVKVFQGNQDSFTPVVNSLDPPLLTRYLRIHPQSWEHQIALRMEVLGCEAQDLY

SEQ ID NO: 1425 - DNA, 4371 bp, synthetic construct
  misc_feature 1..4371: note = Variant of human B-domain deleted Factor VIII
  source 1..4371: mol_type = other DNA
atgcagattgaactgtctacctgcttcttcctctgtttgctgaggttctgctttagcgccactagacggtactaccttggcgctgtggagctgtcctgggactatatgcagagtgatttgggagagcttcccgtcgacgcacgatttcctcctcgcgttccaaagtcatttccctttaacacaagccaggtgtacaagaagacgctcttcgtcgaattcaccgatcacctgttcaatatcgccaaacccagaccaccatggatgggtcttttggggcctaccatacaagcggaggtgtatgacacagttgttatcactctcaagaacatggcttctcatccggtaagtcttcacgcagtgggcgtgtcctactggaaagcttcagaaggagccgagtatgatgatcagacatcccagagggagaaagaagacgacaaggtatttccaggtgggtctcatacctatgtgtggcaagtgctcaaagagaatggccctatggcaagcgatccgccgtgtttgacttacagctacctttcacacgttgacctcgtcaaggacctcaactccgggttgattggagccttgttggtatgcagggaaggatctcttgccaaagagaagacacagacccgccacaagtttatccttctctttgctgtgttcgatgagggcaaaagttggcatagcgaaacgaagaattccctcatgcaggatcgcgacgcagccagcgccagagcttggcccaagatgcacactgtgaacggatatgtcaataggacgcttcctggcttgattgggtgtcatcggaaaagtgtctactggcacgtgatcggaatggggacaacaccagaggtccactccatatttctcgaaggccataccttccttgttcgaaaccacagacaggcatccttggggatctctcccattacctttctcactgcccaaacgctccttatggacttgggtcagttccttctcttttgccatatcccgtcacaccagcatgatggtatggaagcttatgtgaaagtcgacagttgtcctgaggagccacagttgcgcatgaagaataatgaagaagccgaggattacgacgacgatctcaccgattctgagatggacgtggtgaggtttgatgacgacaactctccctccatcattcaagctcggagcggggcgaagaaacaccccaagacttgggtccactatatagcggcggaagaggaggattgggattacgctcctcttgtattggcaccagatgaccgctcatacaaaagccagtacctcaacaacggaccgcagagaattggccggaagtataagaaagtgcgatttatggcctatacagacgaaacctttaagacaagggaggccatccagcatgagagtgggattttgggacctcttctttacggcgaagttggtgataccctcctcatcatcttcaagaatcaagcttctcgcccctataacatttacccacacgggatcactgacgttaggcctttgtatagcagaagacttcccaaaggcgtgaagcatctcaaagacttccccattttgccaggcgagatctttaagtacaaatggaccgtcacacctgaagatggaccgactaaatcagaccctcgatgccttacgcggtactattcctccttcgtgaatatggagagagatttggcaagcggactcataggaccactcctcatctgttacaaggaatctgtagaccagaggggtaaccagattatgagtgataaacgcaatgtgatcctttttagcgtcttcgacgagaaccggtcctggtacttgaccgagaatatacaaaggttccttcccaacccggcaggcgttcagctggaagaccctgagtttcaggccagcaatattatgcactcaatcaacggctatgtgtttgatagtctccagctttctgtttgcctccatgaagtagcctattggtacatcttgtcaattggtgctcaaacagacttcctctccgtcttcttctccggctacacctttaagcacaagatggtgtatgaggacactctcacactctttccattttctggagaaaccgtgttcatgagcatggagaatccaggcctttggatcttgggttgccacaacagtgattttcgcaatcggggaatgactgctctcctcaaagtcagcagctgtgattggaacacaggcgactattacgaagattcttacgaggacataagtgcctactttgactccaagaataacgccattgagcccagatcattctcccagaatcctcccgtgcttaaaaggcatcagcgcgaaggtaccagaactactcttcagtctgatcaagaggagattgactatgacgacaccattagcgtggaaatgaagaaggaggatttcgatatctatgacgaagatgagaaccagtctccgcggagctttcagaagaagacgcgacactacttcattgcagcagtcgaaaggctttgggactacggtatgtcatcatcccctcatgtgttgcgcaatagagctcagagtggaagtgttccacagttcaagaaagtcgtctttcaagagtttacagatggcagcttcacacagcctctctatcggggcgagcttaacgaacatttgggactccttggtccctatatccgagccgaagtggaggacaacattatggttacctttaggaatcaagcctctcgcccctacagcttctactcctccctcatcagttatgaggaggatcagagacaaggcgctgaaccacggaagaactttgtgaaaccgaatgagacgaagacctacttctggaaagtacagcaccacatggcccccacaaaagacgaattcgattgcaaagcatgggcgtatttttcagacgttgacttggagaaagatgtacattcaggacttattggtcctttgttggtgtgtcacactaacactctcaatccagcccatggcaggcaggtgacagtccaggaattcgctcttttctttaccatctttgatgagaccaagtcctggtacttcacggaaaacatggagcgcaattgcagagccccctgtaacatacagatggaggaccctacctttaaggaaaattatcggttccacgcaatcaacggatacattatggatacactccctggccttgtgatggctcaggaccaacgaatcaggtggtacctcctcagcatgggttctaatgagaacatacactccattcacttttcaggacatgtgttcactgtccggaagaaagaagagtataagatggccctctacaatttgtatccaggcgtgtttgagaccgttgaaatgcttccctctaaagctggcatctggagagtagagtgcttgatcggagaacatcttcacgcaggtatgagcaccttgttcctcgtgtacagcaacaaatgtcagaatccacttggcatggccagtggacacattcgcgactttcagatcacagcatctggccagtatggacaatgggccccaaagttggctcgcctccattactccggtagcataaatgcgtggtccactaaagaacctttcagctggattaaggtcgatcttcttgcccccatgatcatccacggcattaagacacagggagcgaggcagaaattctcctccctctacatctcacagttcattattatgtatagtttggacggcaagaagtggcaaacttatagaggtaacagtactggaacagacatggtgttcttcggcaacgttgatagctctggcatcaaacacaacatctttaatcctcccataatagctcggtacatcagattgcatccgacccactacagcattaggagtacactccgaatggagcttatgggttgcgacttgaattcctgttcaatgccactcggaatggagtctaaagccatctctgatgcacagataaccgccagtagctactttacgaacatgtttgctacgtggtcaccctctaaggcaaggcttcatttgcaaggccggtctaatgcctggagacctcaggtgaacaacccgaaagaatggctccaggtggactttcagaagaccatgaaagtaacaggtgtcactactcagggagttaagtccttggatactagcatgtatgtgaaggagttccttatttcctcatcacaagatggccaccagtggaccctcttctttcagaatggtaaggtcaaagtgtttcagggcaatcaagacagcttcacacccgtggtgaacagtcttgatcctccactcttgacacgataccttcgaatccatccacagtcttgggagcaccagattgcattgcgcatggaagtacttggatgcgaggctcaggacctctac

SEQ ID NO: 1426 - protein, 1457 aa, synthetic construct
  REGION 1..1457: note = Variant of human B-domain deleted Factor VIII
MQIELSTCFFLCLLRFCFSATRRYYLGAVELSWDYMQSDLGELPVDARFPPRVPKSFPFNTSQVYKKTLFVEFTDHLFNIAKPRPPWMGLLGPTIQAEVYDTVVITLKNMASHPVSLHAVGVSYWKASEGAEYDDQTSQREKEDDKVFPGGSHTYVWQVLKENGPMASDPPCLTYSYLSHVDLVKDLNSGLIGALLVCREGSLAKEKTQTRHKFILLFAVFDEGKSWHSETKNSLMQDRDAASARAWPKMHTVNGYVNRTLPGLIGCHRKSVYWHVIGMGTTPEVHSIFLEGHTFLVRNHRQASLGISPITFLTAQTLLMDLGQFLLFCHIPSHQHDGMEAYVKVDSCPEEPQLRMKNNEEAEDYDDDLTDSEMDVVRFDDDNSPSIIQARSGAKKHPKTWVHYIAAEEEDWDYAPLVLAPDDRSYKSQYLNNGPQRIGRKYKKVRFMAYTDETFKTREAIQHESGILGPLLYGEVGDTLLIIFKNQASRPYNIYPHGITDVRPLYSRRLPKGVKHLKDFPILPGEIFKYKWTVTPEDGPTKSDPRCLTRYYSSFVNMERDLASGLIGPLLICYKESVDQRGNQIMSDKRNVILFSVFDENRSWYLTENIQRFLPNPAGVQLEDPEFQASNIMHSINGYVFDSLQLSVCLHEVAYWYILSIGAQTDFLSVFFSGYTFKHKMVYEDTLTLFPFSGETVFMSMENPGLWILGCHNSDFRNRGMTALLKVSSCDWNTGDYYEDSYEDISAYFDSKNNAIEPRSFSQNPPVLKRHQREGTRTTLQSDQEEIDYDDTISVEMKKEDFDIYDEDENQSPRSFQKKTRHYFIAAVERLWDYGMSSSPHVLRNRAQSGSVPQFKKVVFQEFTDGSFTQPLYRGELNEHLGLLGPYIRAEVEDNIMVTFRNQASRPYSFYSSLISYEEDQRQGAEPRKNFVKPNETKTYFWKVQHHMAPTKDEFDCKAWAYFSDVDLEKDVHSGLIGPLLVCHTNTLNPAHGRQVTVQEFALFFTIFDETKSWYFTENMERNCRAPCNIQMEDPTFKENYRFHAINGYIMDTLPGLVMAQDQRIRWYLLSMGSNENIHSIHFSGHVFTVRKKEEYKMALYNLYPGVFETVEMLPSKAGIWRVECLIGEHLHAGMSTLFLVYSNKCQNPLGMASGHIRDFQITASGQYGQWAPKLARLHYSGSINAWSTKEPFSWIKVDLLAPMIIHGIKTQGARQKFSSLYISQFIIMYSLDGKKWQTYRGNSTGTDMVFFGNVDSSGIKHNIFNPPIIARYIRLHPTHYSIRSTLRMELMGCDLNSCSMPLGMESKAISDAQITASSYFTNMFATWSPSKARLHLQGRSNAWRPQVNNPKEWLQVDFQKTMKVTGVTTQGVKSLDTSMYVKEFLISSSQDGHQWTLFFQNGKVKVFQGNQDSFTPVVNSLDPPLLTRYLRIHPQSWEHQIALRMEVLGCEAQDLY

SEQ ID NO: 1427 - DNA, 4371 bp, synthetic construct
  misc_feature 1..4371: note = Variant of human B-domain deleted Factor VIII
  source 1..4371: mol_type = other DNA
atgcagattgaactgtctacctgcttcttcctctgtttgctgaggttctgctttagcgccactagacggtactaccttggcgctgtggagctgtcctgggactatatgcagagtgatttgggagagcttcccgtcgacgcacgatttcctcctcgcgttccaaagtcatttccctttaacacaagccaggtgtacaagaagacgctcttcgtcgaattcaccgatcacctgttcaatatcgccaaacccagaccaccatggatgggtcttttggggcctaccatacaagcggaggtgtatgacacagttgttatcactctcaagaacatggcttctcatccggtaagtcttcacgcagtgggcgtgtcctactggaaagcttcagaaggagccgagtatgatgatcagacatcccagagggagaaagaagacgacaaggtatttccaggtgggtctcatacctatgtgtggcaagtgctcaaagagaatggccctatggcaagcgatccgccgtgtttgacttacagctacctttcacacgttgacctcgtcaaggacctcaactccgggttgattggagccttgttggtatgcagggaaggatctcttgccaaagagaagacacagacccgccccaagtttatccttctctttgctgtgttcgatgagggcaaaagttggcatagcgaaacgaagaattccctcatgcaggatcgcgacgcagccagcgccagagcttggcccaagatgcacactgtgaacggatatgtcaataggacgcttcctggcttgattgggtgtcatcggaaaagtgtctactggcacgtgatcggaatggggacaacaccagaggtccactccatatttctcgaaggccataccttccttgttcgaaaccacagacaggcatccttggggatctctcccattacctttctcactgcccaaacgctccttatggacttgggtcagttccttctcttttgccatatcccgtcacaccagcatgatggtatggaagcttatgtgaaagtcgacagttgtcctgaggagccacagttgcgcatgaagaataatgaagaagccgaggattacgacgacgatctcaccgattctgagatggacgtggtgaggtttgatgacgacaactctccctccatcattcaagctcggagcggggcgaagaaacaccccaagacttgggtccactatatagcggcggaagaggaggattgggattacgctcctcttgtattggcaccagatgaccgctcatacaaaagccagtacctcaacaacggaccgcagagaattggccggaagtataagaaagtgcgatttatggcctatacagacgaaacctttaagacaagggaggccatccagcatgagagtgggattttgggacctcttctttacggcgaagttggtgataccctcctcatcatcttcaagaatcaagcttctcgcccctataacatttacccacacgggatcactgacgttaggcctttgtatagcagaagacttcccaaaggcgtgaagcatctcaaagacttccccattttgccaggcgagatctttaagtacaaatggaccgtcacagtcgaagatggaccgactaaatcagaccctcgatgccttacgcggtactattcctccttcgtgaatatggagagagatttggcaagcggactcataggaccactcctcatctgttacaaggaatctgtagaccagaggggtaaccagattatgagtgataaacgcaatgtgatcctttttagcgtcttcgacgagaaccggtcctggtacttgaccgagaatatacaaaggttccttcccaacccggcaggcgttcagctggaagaccctgagtttcaggccagcaatattatgcactcaatcaacggctatgtgtttgatagtctccagctttctgtttgcctccatgaagtagcctattggtacatcttgtcaattggtgctcaaacagacttcctctccgtcttcttctccggctacacctttaagcacaagatggtgtatgaggacactctcacactctttccattttctggagaaaccgtgttcatgagcatggagaatccaggcctttggatcttgggttgccacaacagtgattttcgcaatcggggaatgactgctctcctcaaagtcagcagctgtgattggaacacaggcgactattacgaagattcttacgaggacataagtgcctactttgactccaagaataacgccattgagcccagatcattctcccagaatcctcccgtgcttaaaaggcatcagcgcgaaggtaccagaactactcttcagtctgatcaagaggagattgactatgacgacaccattagcgtggaaatgaagaaggaggatttcgatatctatgacgaagatgagaaccagtctccgcggagctttcagaagaagacgcgacactacttcattgcagcagtcgaaaggctttgggactacggtatgtcatcatcccctcatgtgttgcgcaatagagctcagagtggaagtgttccacagttcaagaaagtcgtctttcaagagtttacagatggcagcttcacacagcctctctatcggggcgagcttaacgaacatttgggactccttggtccctatatccgagccgaagtggaggacaacattatggttacctttaggaatcaagcctctcgcccctacagcttctactcctccctcatcagttatgaggaggatcagagacaaggcgctgaaccacggaagaactttgtgaaaccgaatgagacgaagacctacttctggaaagtacagcaccacatggcccccacaaaagacgaattcgattgcaaagcatgggcgtatttttcagacgttgacttggagaaagatgtacattcaggacttattggtcctttgttggtgtgtcacactaacactctcaatccagcccatggcaggcaggtgacagtccaggaattcgctcttttctttaccatctttgatgagaccaagtcctggtacttcacggaaaacatggagcgcaattgcagagccccctgtaacatacagatggaggaccctacctttaaggaaaattatcggttccacgcaatcaacggatacattatggatacactccctggccttgtgatggctcaggaccaacgaatcaggtggtacctcctcagcatgggttctaatgagaacatacactccattcacttttcaggacatgtgttcactgtccggaagaaagaagagtataagatggccctctacaatttgtatccaggcgtgtttgagaccgttgaaatgcttccctctaaagctggcatctggagagtagagtgcttgatcggagaacatcttcacgcaggtatgagcaccttgttcctcgtgtacagcaacaaatgtcagaatccacttggcatggccagtggacacattcgcgactttcagatcacagcatctggccagtatggacaatgggccccaaagttggctcgcctccattactccggtagcataaatgcgtggtccactaaagaacctttcagctggattaaggtcgatcttcttgcccccatgatcatccacggcattaagacacagggagcgaggcagaaattctcctccctctacatctcacagttcattattatgtatagtttggacggcaagaagtggcaaacttatagaggtaacagtactggaacagacatggtgttcttcggcaacgttgatagctctggcatcaaacacaacatctttaatcctcccataatagctcggtacatcagattgcatccgacccactacagcattaggagtacactccgaatggagcttatgggttgcgacttgaattcctgttcaatgccactcggaatggagtctaaagccatctctgatgcacagataaccgccagtagctactttacgaacatgtttgctacgtggtcaccctctaaggcaaggcttcatttgcaaggccggtctaatgcctggagacctcaggtgaacaacccgaaagaatggctccaggtggactttcagaagaccatgaaagtaacaggtgtcactactcagggagttaagtccttggatactagcatgtatgtgaaggagttccttatttcctcatcacaagatggccaccagtggaccctcttctttcagaatggtaaggtcaaagtgtttcagggcaatcaagacagcttcacacccgtggtgaacagtcttgatcctccactcttgacacgataccttcgaatccatccacagtcttgggagcaccagattgcattgcgcatggaagtacttggatgcgaggctcaggacctctac

SEQ ID NO: 1428 - protein, 1457 aa, synthetic construct
  REGION 1..1457: note = Variant of human B-domain deleted Factor VIII
MQIELSTCFFLCLLRFCFSATRRYYLGAVELSWDYMQSDLGELPVDARFPPRVPKSFPFNTSQVYKKTLFVEFTDHLFNIAKPRPPWMGLLGPTIQAEVYDTVVITLKNMASHPVSLHAVGVSYWKASEGAEYDDQTSQREKEDDKVFPGGSHTYVWQVLKENGPMASDPPCLTYSYLSHVDLVKDLNSGLIGALLVCREGSLAKEKTQTRPKFILLFAVFDEGKSWHSETKNSLMQDRDAASARAWPKMHTVNGYVNRTLPGLIGCHRKSVYWHVIGMGTTPEVHSIFLEGHTFLVRNHRQASLGISPITFLTAQTLLMDLGQFLLFCHIPSHQHDGMEAYVKVDSCPEEPQLRMKNNEEAEDYDDDLTDSEMDVVRFDDDNSPSIIQARSGAKKHPKTWVHYIAAEEEDWDYAPLVLAPDDRSYKSQYLNNGPQRIGRKYKKVRFMAYTDETFKTREAIQHESGILGPLLYGEVGDTLLIIFKNQASRPYNIYPHGITDVRPLYSRRLPKGVKHLKDFPILPGEIFKYKWTVTVEDGPTKSDPRCLTRYYSSFVNMERDLASGLIGPLLICYKESVDQRGNQIMSDKRNVILFSVFDENRSWYLTENIQRFLPNPAGVQLEDPEFQASNIMHSINGYVFDSLQLSVCLHEVAYWYILSIGAQTDFLSVFFSGYTFKHKMVYEDTLTLFPFSGETVFMSMENPGLWILGCHNSDFRNRGMTALLKVSSCDWNTGDYYEDSYEDISAYFDSKNNAIEPRSFSQNPPVLKRHQREGTRTTLQSDQEEIDYDDTISVEMKKEDFDIYDEDENQSPRSFQKKTRHYFIAAVERLWDYGMSSSPHVLRNRAQSGSVPQFKKVVFQEFTDGSFTQPLYRGELNEHLGLLGPYIRAEVEDNIMVTFRNQASRPYSFYSSLISYEEDQRQGAEPRKNFVKPNETKTYFWKVQHHMAPTKDEFDCKAWAYFSDVDLEKDVHSGLIGPLLVCHTNTLNPAHGRQVTVQEFALFFTIFDETKSWYFTENMERNCRAPCNIQMEDPTFKENYRFHAINGYIMDTLPGLVMAQDQRIRWYLLSMGSNENIHSIHFSGHVFTVRKKEEYKMALYNLYPGVFETVEMLPSKAGIWRVECLIGEHLHAGMSTLFLVYSNKCQNPLGMASGHIRDFQITASGQYGQWAPKLARLHYSGSINAWSTKEPFSWIKVDLLAPMIIHGIKTQGARQKFSSLYISQFIIMYSLDGKKWQTYRGNSTGTDMVFFGNVDSSGIKHNIFNPPIIARYIRLHPTHYSIRSTLRMELMGCDLNSCSMPLGMESKAISDAQITASSYFTNMFATWSPSKARLHLQGRSNAWRPQVNNPKEWLQVDFQKTMKVTGVTTQGVKSLDTSMYVKEFLISSSQDGHQWTLFFQNGKVKVFQGNQDSFTPVVNSLDPPLLTRYLRIHPQSWEHQIALRMEVLGCEAQDLY

SEQ ID NO: 1429 - DNA, 4371 bp, synthetic construct
  misc_feature 1..4371: note = Variant of human B-domain deleted Factor VIII
  source 1..4371: mol_type = other DNA
atgcagattgaactgtctacctgcttcttcctctgtttgctgaggttctgctttagcgccactagacggtactaccttggcgctgtggagctgtcctgggactatatgcagagtgatttgggagagcttcccgtcgacgcacgatttcctcctcgcgttccaaagtcatttccctttaacacaagccaggtgtacaagaagacgctcttcgtcgaattcaccgatcacctgttcaatatcgccaaacccagaccaccatggatgggtcttttggggcctaccatacaagcggaggtgtatgacacagttgttatcactctcaagaacatggcttctcatccggtaagtcttcacgcagtgggcgtgtcctactggaaagcttcagaaggagccgagtatgatgatcagacatcccagagggagaaagaagacgacaaggtatttccaggtgggtctcatacctatgtgtggcaagtgctcaaagagaatggccctatggcaagcgatccgccgtgtttgacttacagctacctttcacacgttgacctcgtcaaggacctcaactccgggttgattggagccttgttggtatgcagggaaggatctcttgccaaagagaagacacagacccgccacaagtttatccttctctttgctgtgttcgatgagggcaaaagttggcatagcgaaacgaagaattccctcatgcaggatcgcgacgcagccagcgccagagcttggcccaagatgcacactgtgaacggatatgtcaataggacgcttcctggcttgattgggtgtcatcggaaaagtgtctactggcacgtgatcggaatggggacaacaccagaggtccactccatatttctcgaaggccataccttccttgttcgaaaccacagacaggcatccttggggatctctcccattacctttctcactgcccaaacgctccttatggacttgggtcagttccttctcttttgccatatcccgtcacaccagcatgatggtatggaagcttatgtgaaagtcgacagttgtcctgaggagccacagttgcgcatgaagaataatgaagaagccgaggattacgacgacgatctcaccgattctgagatggacgtggtgaggtttgatgacgacaactctccctccatcattcaagctcggagcggggcgaagaaacaccccaagacttgggtccactatatagcggcggaagaggaggattgggattacgctcctcttgtattggcaccagatgaccgctcatacaaaagccagtacctcaacaacggaccgcagagaattggccggaagtataagaaagtgcgatttatggcctatacagacgaaacctttaagacaagggaggccatccagcatgagagtgggattttgggacctcttctttacggcgaagttggtgataccctcctcatcatcttcaagaatcaagcttctcgcccctataacatttacccacacgggatcactgacgttaggcctttgtatagcagaagacttcccaaaggcgtgaagcatctcaaagacttccccattttgccaggcgagatctttaagtacaaatggaccgtcacaaaggaagatggaccgactaaatcagaccctcgatgccttacgcggtactattcctccttcgtgaatatggagagagatttggcaagcggactcataggaccactcctcatctgttacaaggaatctgtagaccagaggggtaaccagattatgagtgataaacgcaatgtgatcctttttagcgtcttcgacgagaaccggtcctggtacttgaccgagaatatacaaaggttccttcccaaccccgcaggcgttcagttggaagaccctgagtttcaggccagcaatattatgcactcaatcaacggctatgtgtttgatagtctccagctttctgtttgcctccatgaagtagcctattggtacatcttgtcaattggtgctcaaacagacttcctctccgtcttcttctccggctacacctttaagcacaagatggtgtatgaggacactctcacactctttccattttctggagaaaccgtgttcatgagcatggagaatccaggcctttggatcttgggttgccacaacagtgattttcgcaatcggggaatgactgctctcctcaaagtcagcagctgtgattggaacacaggcgactattacgaagattcttacgaggacataagtgcctactttgactccaagaataacgccattgagcccagatcattctcccagaatcctcccgtgcttaaaaggcatcagcgcgaaggtaccagaactactcttcagtctgatcaagaggagattgactatgacgacaccattagcgtggaaatgaagaaggaggatttcgatatctatgacgaagatgagaaccagtctccgcggagctttcagaagaagacgcgacactacttcattgcagcagtcgaaaggctttgggactacggtatgtcatcatcccctcatgtgttgcgcaatagagctcagagtggaagtgttccacagttcaagaaagtcgtctttcaagagtttacagatggcagcttcacacagcctctctatcggggcgagcttaacgaacatttgggactccttggtccctatatccgagccgaagtggaggacaacattatggttacctttaggaatcaagcctctcgcccctacagcttctactcctccctcatcagttatgaggaggatcagagacaaggcgctgaaccacggaagaactttgtgaaaccgaatgagacgaagacctacttctggaaagtacagcaccacatggcccccacaaaagacgaattcgattgcaaagcatgggcgtatttttcagacgttgacttggagaaagatgtacattcaggacttattggtcctttgttggtgtgtcacactaacactctcaatccagcccatggcaggcaggtgacagtccaggaattcgctcttttctttaccatctttgatgagaccaagtcctggtacttcacggaaaacatggagcgcaattgcagagccccctgtaacatacagatggaggaccctacctttaaggaaaattatcggttccacgcaatcaacggatacattatggatacactccctggccttgtgatggctcaggaccaacgaatcaggtggtacctcctcagcatgggttctaatgagaacatacactccattcacttttcaggacatgtgttcactgtccggaagaaagaagagtataagatggccctctacaatttgtatccaggcgtgtttgagaccgttgaaatgcttccctctaaagctggcatctggagagtagagtgcttgatcggagaacatcttcacgcaggtatgagcaccttgttcctcgtgtacagcaacaaatgtcagaatccacttggcatggccagtggacacattcgcgactttcagatcacagcatctggccagtatggacaatgggccccaaagttggctcgcctccattactccggtagcataaatgcgtggtccactaaagaacctttcagctggattaaggtcgatcttcttgcccccatgatcatccacggcattaagacacagggagcgaggcagaaattctcctccctctacatctcacagttcattattatgtatagtttggacggcaagaagtggcaaacttatagaggtaacagtactggaacagacatggtgttcttcggcaacgttgatagctctggcatcaaacacaacatctttaatcctcccataatagctcggtacatcagattgcatccgacccactacagcattaggagtacactccgaatggagcttatgggttgcgacttgaattcctgttcaatgccactcggaatggagtctaaagccatctctgatgcacagataaccgccagtagctactttacgaacatgtttgctacgtggtcaccctctaaggcaaggcttcatttgcaaggccggtctaatgcctggagacctcaggtgaacaacccgaaagaatggctccaggtggactttcagaagaccatgaaagtaacaggtgtcactactcagggagttaagtccttggatactagcatgtatgtgaaggagttccttatttcctcatcacaagatggccaccagtggaccctcttctttcagaatggtaaggtcaaagtgtttcagggcaatcaagacagcttcacacccgtggtgaacagtcttgatcctccactcttgacacgataccttcgaatccatccacagtcttgggagcaccagattgcattgcgcatggaagtacttggatgcgaggctcaggacctctac

SEQ ID NO: 1430 - protein, 1457 aa, synthetic construct
  REGION 1..1457: note = Variant of human B-domain deleted Factor VIII
MQIELSTCFFLCLLRFCFSATRRYYLGAVELSWDYMQSDLGELPVDARFPPRVPKSFPFNTSQVYKKTLFVEFTDHLFNIAKPRPPWMGLLGPTIQAEVYDTVVITLKNMASHPVSLHAVGVSYWKASEGAEYDDQTSQREKEDDKVFPGGSHTYVWQVLKENGPMASDPPCLTYSYLSHVDLVKDLNSGLIGALLVCREGSLAKEKTQTRHKFILLFAVFDEGKSWHSETKNSLMQDRDAASARAWPKMHTVNGYVNRTLPGLIGCHRKSVYWHVIGMGTTPEVHSIFLEGHTFLVRNHRQASLGISPITFLTAQTLLMDLGQFLLFCHIPSHQHDGMEAYVKVDSCPEEPQLRMKNNEEAEDYDDDLTDSEMDVVRFDDDNSPSIIQARSGAKKHPKTWVHYIAAEEEDWDYAPLVLAPDDRSYKSQYLNNGPQRIGRKYKKVRFMAYTDETFKTREAIQHESGILGPLLYGEVGDTLLIIFKNQASRPYNIYPHGITDVRPLYSRRLPKGVKHLKDFPILPGEIFKYKWTVTKEDGPTKSDPRCLTRYYSSFVNMERDLASGLIGPLLICYKESVDQRGNQIMSDKRNVILFSVFDENRSWYLTENIQRFLPNPAGVQLEDPEFQASNIMHSINGYVFDSLQLSVCLHEVAYWYILSIGAQTDFLSVFFSGYTFKHKMVYEDTLTLFPFSGETVFMSMENPGLWILGCHNSDFRNRGMTALLKVSSCDWNTGDYYEDSYEDISAYFDSKNNAIEPRSFSQNPPVLKRHQREGTRTTLQSDQEEIDYDDTISVEMKKEDFDIYDEDENQSPRSFQKKTRHYFIAAVERLWDYGMSSSPHVLRNRAQSGSVPQFKKVVFQEFTDGSFTQPLYRGELNEHLGLLGPYIRAEVEDNIMVTFRNQASRPYSFYSSLISYEEDQRQGAEPRKNFVKPNETKTYFWKVQHHMAPTKDEFDCKAWAYFSDVDLEKDVHSGLIGPLLVCHTNTLNPAHGRQVTVQEFALFFTIFDETKSWYFTENMERNCRAPCNIQMEDPTFKENYRFHAINGYIMDTLPGLVMAQDQRIRWYLLSMGSNENIHSIHFSGHVFTVRKKEEYKMALYNLYPGVFETVEMLPSKAGIWRVECLIGEHLHAGMSTLFLVYSNKCQNPLGMASGHIRDFQITASGQYGQWAPKLARLHYSGSINAWSTKEPFSWIKVDLLAPMIIHGIKTQGARQKFSSLYISQFIIMYSLDGKKWQTYRGNSTGTDMVFFGNVDSSGIKHNIFNPPIIARYIRLHPTHYSIRSTLRMELMGCDLNSCSMPLGMESKAISDAQITASSYFTNMFATWSPSKARLHLQGRSNAWRPQVNNPKEWLQVDFQKTMKVTGVTTQGVKSLDTSMYVKEFLISSSQDGHQWTLFFQNGKVKVFQGNQDSFTPVVNSLDPPLLTRYLRIHPQSWEHQIALRMEVLGCEAQDLY

SEQ ID NO: 1431 - DNA, 4371 bp, synthetic construct
  misc_feature 1..4371: note = Variant of human B-domain deleted Factor VIII
  source 1..4371: mol_type = other DNA
atgcagattgaactgtctacctgcttcttcctctgtttgctgaggttctgctttagcgccactagacggtactaccttggcgctgtggagctgtcctgggactatatgcagagtgatttgggagagcttcccgtcgacgcacgatttcctcctcgcgttccaaagtcatttccctttaacacaagccaggtgtacaagaagacgctcttcgtcgaattcaccgatcacctgttcaatatcgccaaacccagaccaccatggatgggtcttttggggcctaccatacaagcggaggtgtatgacacagttgttatcactctcaagaacatggcttctcatccggtaagtcttcacgcagtgggcgtgtcctactggaaagcttcagaaggagccgagtatgatgatcagacatcccagagggagaaagaagacgacaaggtatttccaggtgggtctcatacctatgtgtggcaagtgctcaaagagaatggccctatggcaagcgatccgccgtgtttgacttacagctacctttcacacgttgacctcgtcaaggacctcaactccgggttgattggagccttgttggtatgcagggaaggatctcttgccaaagagaagacacagacccgccacaagtttatccttctctttgctgtgttcgatgagggcaaaagttggcatagcgaaacgaagaattccctcatgcaggatcgcgacgcagccagcgccagagcttggcccaagatgcacactgtgaacggatatgtcaataggacgcttcctggcttgattgggtgtcatcggaaaagtgtctactggcacgtgatcggaatggggacaacaccagaggtccactccatatttctcgaaggccataccttccttgttcgaaaccacagacaggcatccttggggatctctcccattacctttctcactgcccaaacgctccttatggacttgggtcagttccttctcttttgccatatcccgtcacaccagcatgatggtatggaagcttatgtgaaagtcgacagttgtcctgaggagccacagttgcgcatgaagaataatgaagaagccgaggattacgacgacgatctcaccgattctgagatggacgtggtgaggtttgatgacgacaactctccctccatcattcaagctcggagcggggcgaagaaacaccccaagacttgggtccactatatagcggcggaagaggaggattgggattacgctcctcttgtattggcaccagatgaccgctcatacaaaagccagtacctcaacaacggaccgcagagaattggccggaagtataagaaagtgcgatttatggcctatacagacgaaacctttaagacaagggaggccatccagcatgagagtgggattttgggacctcttctttacggcgaagttggtgataccctcctcatcatcttcaagaatcaagcttctcgcccctataacatttacccacacgggatcactgacgttaggcctttgtatagcagaagacttcccaaaggcgtgaagcatctcaaagacttccccattttgccaggcgagatctttaagtacaaatggaccgtcacaaaggaagatggaccgactaaatcagaccctcgatgccttacgcggtactattcctccttcgtgaatatggagagagatttggcaagcggactcataggaccactcctcatctgttacaaggaatctgtagaccagaggggtaaccagattatgagtgataaacgcaatgtgatcctttttagcgtcttcgacgagaaccggtcctggtacttgaccgagaatatacaaaggttccttcccaacggcgcaggcgttcagctggaagaccctgagtttcaggccagcaatattatgcactcaatcaacggctatgtgtttgatagtctccagctttctgtttgcctccatgaagtagcctattggtacatcttgtcaattggtgctcaaacagacttcctctccgtcttcttctccggctacacctttaagcacaaggcagtgtatgaggacactctcacactctttccattttctggagaaaccgtgttcatgagcatggagaatccaggcctttggatcttgggttgccacaacagtgattttcgcaatcggggaatgactgctctcctcaaagtcagcagctgtgataagaacacaggcgactattacgaagattcttacgaggacataagtgcctactttgactccaagaataacgccattgagcccagatcattctcccagaatcctcccgtgcttaaaaggcatcagcgcgaaggtaccagaactactcttcagtctgatcaagaggagattgactatgacgacaccattagcgtggaaatgaagaaggaggatttcgatatctatgacgaagatgagaaccagtctccgcggagctttcagaagaagacgcgacactacttcattgcagcagtcgaaaggctttgggactacggtatgtcatcatcccctcatgtgttgcgcaatagagctcagagtggaagtgttccacagttcaagaaagtcgtctttcaagagtttacagatggcagcttcacacagcctctctatcggggcgagcttaacgaacatttgggactccttggtccctatatccgagccgaagtggaggacaacattatggttacctttaggaatcaagcctctcgcccctacagcttctactcctccctcatcagttatgaggaggatcagagacaaggcgctgaaccacggaagaactttgtgaaaccgaatgagacgaagacctacttctggaaagtacagcaccacatggcccccacaaaagacgaattcgattgcaaagcatgggcgtatttttcagacgttgacttggagaaagatgtacattcaggacttattggtcctttgttggtgtgtcacactaacactctcaatccagcccatggcaggcaggtgacagtccaggaattcgctcttttctttaccatctttgatgagaccaagtcctggtacttcacggaaaacatggagcgcaattgcagagccccctgtaacatacagatggaggaccctacctttaaggaaaattatcggttccacgcaatcaacggatacattatggatacactccctggccttgtgatggctcaggaccaacgaatcaggtggtacctcctcagcatgggttctaatgagaacatacactccattcacttttcaggacatgtgttcactgtccggaagaaagaagagtataagatggccctctacaatttgtatccaggcgtgtttgagaccgttgaaatgcttccctctaaagctggcatctggagagtagagtgcttgatcggagaacatcttcacgcaggtatgagcaccttgttcctcgtgtacagcaacaaatgtcagaatccacttggcatggccagtggacacattcgcgactttcagatcacagcatctggccagtatggacaatgggccccaaagttggctcgcctccattactccggtagcataaatgcgtggtccactaaagaacctttcagctggattaaggtcgatcttcttgcccccatgatcatccacggcattaagacacagggagcgaggcagaaattctcctccctctacatctcacagttcattattatgtatagtttggacggcaagaagtggcaaacttatagaggtaacagtactggaacagacatggtgttcttcggcaacgttgatagctctggcatcaaacacaacatctttaatcctcccataatagctcggtacatcagattgcatccgacccactacagcattaggagtacactccgaatggagcttatgggttgcgacttgaattcctgttcaatgccactcggaatggagtctaaagccatctctgatgcacagataaccgccagtagctactttacgaacatgtttgctacgtggtcaccctctaaggcaaggcttcatttgcaaggccggtctaatgcctggagacctcaggtgaacaacccgaaagaatggctccaggtggactttcagaagaccatgaaagtaacaggtgtcactactcagggagttaagtccttggatactagcatgtatgtgaaggagttccttatttcctcatcacaagatggccaccagtggaccctcttctttcagaatggtaaggtcaaagtgtttcagggcaatcaagacagcttcacacccgtggtgaacagtcttgatcctccactcttgacacgataccttcgaatccatccacagtcttgggagcaccagattgcattgcgcatggaagtacttggatgcgaggctcaggacctctac

SEQ ID NO: 1432 - protein, 1457 aa, synthetic construct
  REGION 1..1457: note = Variant of human B-domain deleted Factor VIII
MQIELSTCFFLCLLRFCFSATRRYYLGAVELSWDYMQSDLGELPVDARFPPRVPKSFPFNTSQVYKKTLFVEFTDHLFNIAKPRPPWMGLLGPTIQAEVYDTVVITLKNMASHPVSLHAVGVSYWKASEGAEYDDQTSQREKEDDKVFPGGSHTYVWQVLKENGPMASDPPCLTYSYLSHVDLVKDLNSGLIGALLVCREGSLAKEKTQTRHKFILLFAVFDEGKSWHSETKNSLMQDRDAASARAWPKMHTVNGYVNRTLPGLIGCHRKSVYWHVIGMGTTPEVHSIFLEGHTFLVRNHRQASLGISPITFLTAQTLLMDLGQFLLFCHIPSHQHDGMEAYVKVDSCPEEPQLRMKNNEEAEDYDDDLTDSEMDVVRFDDDNSPSIIQARSGAKKHPKTWVHYIAAEEEDWDYAPLVLAPDDRSYKSQYLNNGPQRIGRKYKKVRFMAYTDETFKTREAIQHESGILGPLLYGEVGDTLLIIFKNQASRPYNIYPHGITDVRPLYSRRLPKGVKHLKDFPILPGEIFKYKWTVTKEDGPTKSDPRCLTRYYSSFVNMERDLASGLIGPLLICYKESVDQRGNQIMSDKRNVILFSVFDENRSWYLTENIQRFLPNGAGVQLEDPEFQASNIMHSINGYVFDSLQLSVCLHEVAYWYILSIGAQTDFLSVFFSGYTFKHKAVYEDTLTLFPFSGETVFMSMENPGLWILGCHNSDFRNRGMTALLKVSSCDKNTGDYYEDSYEDISAYFDSKNNAIEPRSFSQNPPVLKRHQREGTRTTLQSDQEEIDYDDTISVEMKKEDFDIYDEDENQSPRSFQKKTRHYFIAAVERLWDYGMSSSPHVLRNRAQSGSVPQFKKVVFQEFTDGSFTQPLYRGELNEHLGLLGPYIRAEVEDNIMVTFRNQASRPYSFYSSLISYEEDQRQGAEPRKNFVKPNETKTYFWKVQHHMAPTKDEFDCKAWAYFSDVDLEKDVHSGLIGPLLVCHTNTLNPAHGRQVTVQEFALFFTIFDETKSWYFTENMERNCRAPCNIQMEDPTFKENYRFHAINGYIMDTLPGLVMAQDQRIRWYLLSMGSNENIHSIHFSGHVFTVRKKEEYKMALYNLYPGVFETVEMLPSKAGIWRVECLIGEHLHAGMSTLFLVYSNKCQNPLGMASGHIRDFQITASGQYGQWAPKLARLHYSGSINAWSTKEPFSWIKVDLLAPMIIHGIKTQGARQKFSSLYISQFIIMYSLDGKKWQTYRGNSTGTDMVFFGNVDSSGIKHNIFNPPIIARYIRLHPTHYSIRSTLRMELMGCDLNSCSMPLGMESKAISDAQITASSYFTNMFATWSPSKARLHLQGRSNAWRPQVNNPKEWLQVDFQKTMKVTGVTTQGVKSLDTSMYVKEFLISSSQDGHQWTLFFQNGKVKVFQGNQDSFTPVVNSLDPPLLTRYLRIHPQSWEHQIALRMEVLGCEAQDLY

SEQ ID NO: 1433 - DNA, 4371 bp, synthetic construct
  misc_feature 1..4371: note = Variant of human B-domain deleted Factor VIII
  source 1..4371: mol_type = other DNA
atgcagattgaactgtctacctgcttcttcctctgtttgctgaggttctgctttagcgccactagacggtactaccttggcgctgtggagctgtcctgggactatatgcagagtgatttgggagagcttcccgtcgacgcacgatttcctcctcgcgttccaaagtcatttccctttaacacaagccaggtgtacaagaagacgctcttcgtcgaattcaccgatcacctgttcaatatcgccaaacccagaccaccatggatgggtcttttggggcctaccatacaagcggaggtgtatgacacagttgttatcactctcaagaacatggcttctcatccggtaagtcttcacgcagtgggcgtgtcctactggaaagcttcagaaggagccgagtatgatgatcagacatcccagagggagaaagaagacgacaaggtatttccaggtgggtctcatacctatgtgtggcaagtgctcaaagagaatggccctatggcaagcgatccgccgtgtttgacttacagctacctttcacacgttgacctcgtcaaggacctcaactccgggttgattggagccttgttggtatgcagggaaggatctcttgccaaagagaagacacagacccgccacaagtttatccttctctttgctgtgttcgatgagggcaaaagttggcatagcgaaacgaagaattccctcatgcaggatcgcgacgcagccagcgccagagcttggcccaagatgcacactgtgaacggatatgtcaataggacgcttcctggcttgattgggtgtcatcggaaaagtgtctactggcacgtgatcggaatggggacaacaccagaggtccactccatatttctcgaaggccataccttccttgttcgaaaccacagacaggcatccttggggatctctcccattacctttctcactgcccaaacgctccttatggacttgggtcagttccttctcttttgccatatcccgtcacaccagcatgatggtatggaagcttatgtgaaagtcgacagttgtcctgaggagccacagttgcgcatgaagaataatgaagaagccgaggattacgacgacgatctcaccgattctgagatggacgtggtgaggtttgatgacgacaactctccctccatcattcaagctcggagcggggcgaagaaacaccccaagacttgggtccactatatagcggcggaagaggaggattgggattacgctcctcttgtattggcaccagatgaccgctcatacaaaagccagtacctcaacaacggaccgcagagaattggccggaagtataagaaagtgcgatttatggcctatacagacgaaacctttaagacaagggaggccatccagcatgagagtgggattttgggacctcttctttacggcgaagttggtgataccctcctcatcatcttcaagaatcaagcttctcgcccctataacatttacccacacgggatcactgacgttaggcctttgtatagcagaagacttcccaaaggcgtgaagcatctcaaagacttccccattttgccaggcgagatctttaagtacaaatggaccgtcacagtcgaagatggaccgactaaatcagaccctcgatgccttacgcggtactattcctccttcgtgaatatggagagagatttggcaagcggactcataggaccactcctcatctgttacaaggaatctgtagaccagaggggtaaccagattatgagtgataaacgcaatgtgatcctttttagcgtcttcgacgagaaccggtcctggtacttgaccgagaatatacaaaggttccttcccaacccggcaggcgttcagctggaagaccctgagtttcaggccagcaatattatgcactcaatcaacggctatgtgtttgatagtctccagctttctgtttgcctccatgaagtagcctattggtacatcttgtcaattggtgctcaaacagacttcctctccgtcttcttctccggctacacctttaagcacaagatggtgtatgaggacactctcacactctttccattttctggagaaaccgtgttcatgagcatggagaatccaggcctttggatcttgggttgccacaacagtgattttcgcaatcggggaatgactgctctcctcaaagtcagcagctgtgattggaacacaggcgactattacgaagattcttacgaggacataagtgcctactttgactccaagaataacgccattgagcccagatcattctcccagaatcctcccgtgcttaaaaggcatcagcgcgaaggtaccagaactactcttcagtctgatcaagaggagattgactatgacgacaccattagcgtggaaatgaagaaggaggatttcgatatctatgacgaagatgagaaccagtctccgcggagctttcagaagaagacgcgacactacttcattgcagcagtcgaaaggctttgggactacggtatgtcatcatcccctcatgtgttgcgcaatagagctcagagtggaagtgttccacagttcaagaaagtcgtctttcaagagtttacagatggcagcttcacacagcctctctatcggggcgagcttaacgaacatttgggactccttggtccctatatccgagccgaagtggaggacaacattatggttacctttaggaatcaagcctctcgcccctacagcttctactcctccctcatcagttatgaggaggatcagagacaaggcgctgaaccacggaagaactttgtgaaaccgaatgagacgaagacctacttctggaaagtacagcaccacatggcccccacaaaagacgaattcgattgcaaagcatgggcgtatttttcagacgttgacttggagaaagatgtacattcaggacttattggtcctttgttggtgtgtcacactaacactctcaatccagcccatggcaggcaggtgacagtccaggaattcgctcttttctttaccatctttgatgagaccaagtcctggtacttcacggaaaacatggagcgcaattgcagagccccctgtaacatacagatggaggaccctacctttaaggaaaattatcggttccacgcaatcaacggatacattatggatacactccctggccttgtgatggctcaggaccaacgaatcaggtggtacctcctcagcatgggttctaatgagaacatacactccattcacttttcaggacatgtgttcactgtccggaagaaagaagagtataagatggccctctacaatttgtatccaggcgtgtttgagaccgttgaaatgcttccctctaaagctggcatctggagagtagagtgcttgatcggagaacatcttcacgcaggtatgagcaccttgttcctcgtgtacagcaacaaatgtcagaatccacttggcatggccagtggacacattcgcgactttcagatcacagcatctggccagtatggacaatgggccccaaagttggctcgcctccattactccggtagcataaatgcgtggtccactaaagaacctttcagctggattaaggtcgatcttcttgcccccatgatcatccacggcattaagacacagggagcgaggcagaaattctcctccctctacatctcacagttcattattatgtatagtttggacggcaagaagtggcaaacttatagaggtaacagtactggaacagacatggtgttcttcggcaacgttgatagctctggcatcaaacacaacatctttaatcctcccataatagctcggtacatcagattgcatccgacccactacagcattaggagtacactccgaatggagcttatgggttgcgacttgaattcctgttcaatgccactcggaatggagtctaaagccatctctgatgcacagataaccgccagtagctactttacgaacatgtttgctacgtggtcaccctctaaggcaaggcttcatttgcaaggccggtctaatgcctggagacctcaggtgaacaacccgaaagaatggctccaggtggactttcagaagaccatgaaagtaacaggtgtcactactcagggagttaagtccttggatactagcatgtatgtgaaggagttccttatttcctcatcacaagatggccaccagtggaccctcttctttcagaatggtaaggtcaaagtgtttcagggcaatcaagacagcttcacacccgtggtgaacagtcttgatcctccactcttgacacgataccttcgaatccatccacagtcttgggagcaccagattgcattgcgcatggaagtacttggatgcgaggctcaggacctctac

SEQ ID NO: 1434 - protein, 1457 aa, synthetic construct
  REGION 1..1457: note = Variant of human B-domain deleted Factor VIII
MQIELSTCFFLCLLRFCFSATRRYYLGAVELSWDYMQSDLGELPVDARFPPRVPKSFPFNTSQVYKKTLFVEFTDHLFNIAKPRPPWMGLLGPTIQAEVYDTVVITLKNMASHPVSLHAVGVSYWKASEGAEYDDQTSQREKEDDKVFPGGSHTYVWQVLKENGPMASDPPCLTYSYLSHVDLVKDLNSGLIGALLVCREGSLAKEKTQTRHKFILLFAVFDEGKSWHSETKNSLMQDRDAASARAWPKMHTVNGYVNRTLPGLIGCHRKSVYWHVIGMGTTPEVHSIFLEGHTFLVRNHRQASLGISPITFLTAQTLLMDLGQFLLFCHIPSHQHDGMEAYVKVDSCPEEPQLRMKNNEEAEDYDDDLTDSEMDVVRFDDDNSPSIIQARSGAKKHPKTWVHYIAAEEEDWDYAPLVLAPDDRSYKSQYLNNGPQRIGRKYKKVRFMAYTDETFKTREAIQHESGILGPLLYGEVGDTLLIIFKNQASRPYNIYPHGITDVRPLYSRRLPKGVKHLKDFPILPGEIFKYKWTVTVEDGPTKSDPRCLTRYYSSFVNMERDLASGLIGPLLICYKESVDQRGNQIMSDKRNVILFSVFDENRSWYLTENIQRFLPNPAGVQLEDPEFQASNIMHSINGYVFDSLQLSVCLHEVAYWYILSIGAQTDFLSVFFSGYTFKHKMVYEDTLTLFPFSGETVFMSMENPGLWILGCHNSDFRNRGMTALLKVSSCDWNTGDYYEDSYEDISAYFDSKNNAIEPRSFSQNPPVLKRHQREGTRTTLQSDQEEIDYDDTISVEMKKEDFDIYDEDENQSPRSFQKKTRHYFIAAVERLWDYGMSSSPHVLRNRAQSGSVPQFKKVVFQEFTDGSFTQPLYRGELNEHLGLLGPYIRAEVEDNIMVTFRNQASRPYSFYSSLISYEEDQRQGAEPRKNFVKPNETKTYFWKVQHHMAPTKDEFDCKAWAYFSDVDLEKDVHSGLIGPLLVCHTNTLNPAHGRQVTVQEFALFFTIFDETKSWYFTENMERNCRAPCNIQMEDPTFKENYRFHAINGYIMDTLPGLVMAQDQRIRWYLLSMGSNENIHSIHFSGHVFTVRKKEEYKMALYNLYPGVFETVEMLPSKAGIWRVECLIGEHLHAGMSTLFLVYSNKCQNPLGMASGHIRDFQITASGQYGQWAPKLARLHYSGSINAWSTKEPFSWIKVDLLAPMIIHGIKTQGARQKFSSLYISQFIIMYSLDGKKWQTYRGNSTGTDMVFFGNVDSSGIKHNIFNPPIIARYIRLHPTHYSIRSTLRMELMGCDLNSCSMPLGMESKAISDAQITASSYFTNMFATWSPSKARLHLQGRSNAWRPQVNNPKEWLQVDFQKTMKVTGVTTQGVKSLDTSMYVKEFLISSSQDGHQWTLFFQNGKVKVFQGNQDSFTPVVNSLDPPLLTRYLRIHPQSWEHQIALRMEVLGCEAQDLY

SEQ ID NO: 1435 - DNA, 4371 bp, synthetic construct
  misc_feature 1..4371: note = Variant of human B-domain deleted Factor VIII
  source 1..4371: mol_type = other DNA
atgcagattgaactgtctacctgcttcttcctctgtttgctgaggttctgctttagcgccactagacggtactaccttggcgctgtggagctgtcctgggactatatgcagagtgatttgggagagcttcccgtcgacgcacgatttcctcctcgcgttccaaagtcatttccctttaacacaagccaggtgtacaagaagacgctcttcgtcgaattcaccgatcacctgttcaatatcgccaaacccagaccaccatggatgggtcttttggggcctaccatacaagcggaggtgtatgacacagttgttatcactctcaagaacatggcttctcatccggtaagtcttcacgcagtgggcgtgtcctactggaaagcttcagaaggagccgagtatgatgatcagacatcccagagggagaaagaagacgacaaggtatttccaggtgggtctcatacctatgtgtggcaagtgctcaaagagaatggccctatggcaagcgatccgccgtgtttgacttacagctacctttcacacgttgacctcgtcaaggacctcaactccgggttgattggagccttgttggtatgcagggaaggatctcttgccaaagagaagacacagacccgccacaagtttatccttctctttgctgtgttcgatgagggcaaaagttggcatagcgaaacgaagaattccctcatgcaggatcgcgacgcagccagcgccagagcttggcccaagatgcacactgtgaacggatatgtcaataggacgcttcctggcttgattgggtgtcatcggaaaagtgtctactggcacgtgatcggaatggggacaacaccagaggtccactccatatttctcgaaggccataccttccttgttcgaaaccacagacaggcatccttggggatctctcccattacctttctcactgcccaaacgctccttatggacttgggtcagttccttctcttttgccatatcccgtcacaccagcatgatggtatggaagcttatgtgaaagtcgacagttgtcctgaggagccacagttgcgcatgaagaataatgaagaagccgaggattacgacgacgatctcaccgattctgagatggacgtggtgaggtttgatgacgacaactctccctccatcattcaagctcggagcggggcgaagaaacaccccaagacttgggtccactatatagcggcggaagaggaggattgggattacgctcctcttgtattggcaccagatgaccgctcatacaaaagccagtacctcaacaacggaccgcagagaattggccggaagtataagaaagtgcgatttatggcctatacagacgaaacctttaagacaagggaggccatccagcatgagagtgggattttgggacctcttctttacggcgaagttggtgataccctcctcatcatcttcaagaatcaagcttctcgcccctataacatttacccacacgggatcactgacgttaggcctttgtatagcagaagacttcccaaaggcgtgaagcatctcaaagacttccccattttgccaggcgagatctttaagtacaaatggaccgtcacacctgaagatggaccgactaaatcagaccctcgatgccttacgcggtactattcctccttcgtgaatctggagagagatttggcaagcggactcataggaccactcctcatctgttacaaggaatctgtagaccagaggggtaaccagattatgagtgataaacgcaatgtgatcctttttagcgtcttcgacgagaaccggtcctggtacttgaccgagaatatacaaaggttccttcccaacggcgcaggcgttcagctggaagaccctgagtttcaggccagcaatattatgcactcaatcaacggctatgtgtttgatagtctccagctttctgtttgcctccatgaagtagcctattggtacatcttgtcaattggtgctcaaacagacttcctctccgtcttcttctccggctacacctttaagcacaaggcagtgtatgaggacactctcacactctttccattttctggagaaaccgtgttcatgagcatggagaatccaggcctttggatcttgggttgccacaacagtgattttcgcaatcggggaatgactgctctcctcaaagtcagcagctgtgattggaacacaggcgactattacgaagattcttacgaggacataagtgcctactttgactccaagaataacgccattgagcccagatcattctcccagaatcctcccgtgcttaaaaggcatcagcgcgaaggtaccagaactactcttcagtctgatcaagaggagattgactatgacgacaccattagcgtggaaatgaagaaggaggatttcgatatctatgacgaagatgagaaccagtctccgcggagctttcagaagaagacgcgacactacttcattgcagcagtcgaaaggctttgggactacggtatgtcatcatcccctcatgtgttgcgcaatagagctcagagtggaagtgttccacagttcaagaaagtcgtctttcaagagtttacagatggcagcttcacacagcctctctatcggggcgagcttaacgaacatttgggactccttggtccctatatccgagccgaagtggaggacaacattatggttacctttaggaatcaagcctctcgcccctacagcttctactcctccctcatcagttatgaggaggatcagagacaaggcgctgaaccacggaagaactttgtgaaaccgaatgagacgaagacctacttctggaaagtacagcaccacatggcccccacaaaagacgaattcgattgcaaagcatgggcgtatttttcagacgttgacttggagaaagatgtacattcaggacttattggtcctttgttggtgtgtcacactaacactctcaatccagcccatggcaggcaggtgacagtccaggaattcgctcttttctttaccatctttgatgagaccaagtcctggtacttcacggaaaacatggagcgcaattgcagagccccctgtaacatacagatggaggaccctacctttaaggaaaattatcggttccacgcaatcaacggatacattatggatacactccctggccttgtgatggctcaggaccaacgaatcaggtggtacctcctcagcatgggttctaatgagaacatacactccattcacttttcaggacatgtgttcactgtccggaagaaagaagagtataagatggccctctacaatttgtatccaggcgtgtttgagaccgttgaaatgcttccctctaaagctggcatctggagagtagagtgcttgatcggagaacatcttcacgcaggtatgagcaccttgttcctcgtgtacagcaacaaatgtcagaatccacttggcatggccagtggacacattcgcgactttcagatcacagcatctggccagtatggacaatgggccccaaagttggctcgcctccattactccggtagcataaatgcgtggtccactaaagaacctttcagctggattaaggtcgatcttcttgcccccatgatcatccacggcattaagacacagggagcgaggcagaaattctcctccctctacatctcacagttcattattatgtatagtttggacggcaagaagtggcaaacttatagaggtaacagtactggaacagacatggtgttcttcggcaacgttgatagctctggcatcaaacacaacatctttaatcctcccataatagctcggtacatcagattgcatccgacccactacagcattaggagtacactccgaatggagcttatgggttgcgacttgaattcctgttcaatgccactcggaatggagtctaaagccatctctgatgcacagataaccgccagtagctactttacgaacatgtttgctacgtggtcaccctctaaggcaaggcttcatttgcaaggccggtctaatgcctggagacctcaggtgaacaacccgaaagaatggctccaggtggactttcagaagaccatgaaagtaacaggtgtcactactcagggagttaagtccttggatactagcatgtatgtgaaggagttccttatttcctcatcacaagatggccaccagtggaccctcttctttcagaatggtaaggtcaaagtgtttcagggcaatcaagacagcttcacacccgtggtgaacagtcttgatcctccactcttgacacgataccttcgaatccatccacagtcttgggagcaccagattgcattgcgcatggaagtacttggatgcgaggctcaggacctctac

SEQ ID NO: 1436 - protein, 1457 aa, synthetic construct
  REGION 1..1457: note = Variant of human B-domain deleted Factor VIII
MQIELSTCFFLCLLRFCFSATRRYYLGAVELSWDYMQSDLGELPVDARFPPRVPKSFPFNTSQVYKKTLFVEFTDHLFNIAKPRPPWMGLLGPTIQAEVYDTVVITLKNMASHPVSLHAVGVSYWKASEGAEYDDQTSQREKEDDKVFPGGSHTYVWQVLKENGPMASDPPCLTYSYLSHVDLVKDLNSGLIGALLVCREGSLAKEKTQTRHKFILLFAVFDEGKSWHSETKNSLMQDRDAASARAWPKMHTVNGYVNRTLPGLIGCHRKSVYWHVIGMGTTPEVHSIFLEGHTFLVRNHRQASLGISPITFLTAQTLLMDLGQFLLFCHIPSHQHDGMEAYVKVDSCPEEPQLRMKNNEEAEDYDDDLTDSEMDVVRFDDDNSPSIIQARSGAKKHPKTWVHYIAAEEEDWDYAPLVLAPDDRSYKSQYLNNGPQRIGRKYKKVRFMAYTDETFKTREAIQHESGILGPLLYGEVGDTLLIIFKNQASRPYNIYPHGITDVRPLYSRRLPKGVKHLKDFPILPGEIFKYKWTVTPEDGPTKSDPRCLTRYYSSFVNLERDLASGLIGPLLICYKESVDQRGNQIMSDKRNVILFSVFDENRSWYLTENIQRFLPNGAGVQLEDPEFQASNIMHSINGYVFDSLQLSVCLHEVAYWYILSIGAQTDFLSVFFSGYTFKHKAVYEDTLTLFPFSGETVFMSMENPGLWILGCHNSDFRNRGMTALLKVSSCDWNTGDYYEDSYEDISAYFDSKNNAIEPRSFSQNPPVLKRHQREGTRTTLQSDQEEIDYDDTISVEMKKEDFDIYDEDENQSPRSFQKKTRHYFIAAVERLWDYGMSSSPHVLRNRAQSGSVPQFKKVVFQEFTDGSFTQPLYRGELNEHLGLLGPYIRAEVEDNIMVTFRNQASRPYSFYSSLISYEEDQRQGAEPRKNFVKPNETKTYFWKVQHHMAPTKDEFDCKAWAYFSDVDLEKDVHSGLIGPLLVCHTNTLNPAHGRQVTVQEFALFFTIFDETKSWYFTENMERNCRAPCNIQMEDPTFKENYRFHAINGYIMDTLPGLVMAQDQRIRWYLLSMGSNENIHSIHFSGHVFTVRKKEEYKMALYNLYPGVFETVEMLPSKAGIWRVECLIGEHLHAGMSTLFLVYSNKCQNPLGMASGHIRDFQITASGQYGQWAPKLARLHYSGSINAWSTKEPFSWIKVDLLAPMIIHGIKTQGARQKFSSLYISQFIIMYSLDGKKWQTYRGNSTGTDMVFFGNVDSSGIKHNIFNPPIIARYIRLHPTHYSIRSTLRMELMGCDLNSCSMPLGMESKAISDAQITASSYFTNMFATWSPSKARLHLQGRSNAWRPQVNNPKEWLQVDFQKTMKVTGVTTQGVKSLDTSMYVKEFLISSSQDGHQWTLFFQNGKVKVFQGNQDSFTPVVNSLDPPLLTRYLRIHPQSWEHQIALRMEVLGCEAQDLY

SEQ ID NO: 1437 - DNA, 4371 bp, synthetic construct
  misc_feature 1..4371: note = Variant of human B-domain deleted Factor VIII
  source 1..4371: mol_type = other DNA
atgcagattgaactgtctacctgcttcttcctctgtttgctgaggttctgctttagcgccactagacggtactaccttggcgctgtggagctgtcctgggactatatgcagagtgatttgggagagcttcccgtcgacgcacgatttcctcctcgcgttccaaagtcatttccctttaacacaagccaggtgtacaagaagacgctcttcgtcgaattcaccgatcacctgttcaatatcgccaaacccagaccaccatggatgggtcttttggggcctaccatacaagcggaggtgtatgacacagttgttatcactctcaagaacatggcttctcatccggtaagtcttcacgcagtgggcgtgtcctactggaaagcttcagaaggagccgagtatgatgatcagacatcccagagggagaaagaagacgacaaggtatttccaggtgggtctcatacctatgtgtggcaagtgctcaaagagaatggccctatggcaagcgatccgccgtgtttgacttacagctacctttcacacgttgacctcgtcaaggacctcaactccgggttgattggagccttgttggtatgcagggaaggatctcttgccaaagagaagacacagaccctccacaagtttatccttctctttgctgtgttcgatgagggcaaaagttggcatagcgaaacgaagaattccctcatgcaggatcgcgacgcagccagcgccagagcttggcccaagatgcacactgtgaacggatatgtcaataggacgcttcctggcttgattgggtgtcatcggaaaagtgtctactggcacgtgatcggaatggggacaacaccagaggtccactccatatttctcgaaggccataccttccttgttcgaaaccacagacaggcatccttggggatctctcccattacctttctcactgcccaaacgctccttatggacttgggtcagttccttctcttttgccatatcccgtcacaccagcatgatggtatggaagcttatgtgaaagtcgacagttgtcctgaggagccacagttgcgcatgaagaataatgaagaagccgaggattacgacgacgatctcaccgattctgagatggacgtggtgaggtttgatgacgacaactctccctccatcattcaagctcggagcggggcgaagaaacaccccaagacttgggtccactatatagcggcggaagaggaggattgggattacgctcctcttgtattggcaccagatgaccgctcatacaaaagccagtacctcaacaacggaccgcagagaattggccggaagtataagaaagtgcgatttatggcctatacagacgaaacctttaagacaagggaggccatccagcatgagagtgggattttgggacctcttctttacggcgaagttggtgataccctcctcatcatcttcaagaatcaagcttctcgcccctataacatttacccacacgggatcactgacgttaggcctttgtatagcagaagacttcccaaaggcgtgaagcatctcaaagacttccccattttgccaggcgagatctttaagtacaaatggaccgtcacagtcgaagatggaccgactaaatcagaccctcgatgccttacgcggtactattcctccggggtgaatatggagagagatttggcaagcggactcataggaccactcctcatctgttacaaggaatctgtagaccagaggggtaaccagattatgagtgataaacgcaatgtgatcctttttagcgtcttcgacgagaaccggtcctggtacttgaccgagaatatacaaaggttccttcccaacccggcaggcgttcagctggaagaccctgagtttcaggccagcaatattatgcactcaatcaacggctatgtgtttgatagtctccagctttctgtttgcctccatgaagtagcctattggtacatcttgtcaattggtgctcaaacagacttcctctccgtcttcttctccggctacacctttaagcacaagatggtgtatgaggacactctcacactctttccattttctggagaaaccgtgttcatgagcatggagaatccaggcctttggatcttgggttgccacaacagtgattttcgcaatcggggaatgactgctctcctcaaagtcagcagctgtgataagaacacaggcgactattacgaagattcttacgaggacataagtgcctactttgactccaagaataacgccattgagcccagatcattctcccagaatcctcccgtgcttaaaaggcatcagcgcgaaggtaccagaactactcttcagtctgatcaagaggagattgactatgacgacaccattagcgtggaaatgaagaaggaggatttcgatatctatgacgaagatgagaaccagtctccgcggagctttcagaagaagacgcgacactacttcattgcagcagtcgaaaggctttgggactacggtatgtcatcatcccctcatgtgttgcgcaatagagctcagagtggaagtgttccacagttcaagaaagtcgtctttcaagagtttacagatggcagcttcacacagcctctctatcggggcgagcttaacgaacatttgggactccttggtccctatatccgagccgaagtggaggacaacattatggttacctttaggaatcaagcctctcgcccctacagcttctactcctccctcatcagttatgaggaggatcagagacaaggcgctgaaccacggaagaactttgtgaaaccgaatgagacgaagacctacttctggaaagtacagcaccacatggcccccacaaaagacgaattcgattgcaaagcatgggcgtatttttcagacgttgacttggagaaagatgtacattcaggacttattggtcctttgttggtgtgtcacactaacactctcaatccagcccatggcaggcaggtgacagtccaggaattcgctcttttctttaccatctttgatgagaccaagtcctggtacttcacggaaaacatggagcgcaattgcagagccccctgtaacatacagatggaggaccctacctttaaggaaaattatcggttccacgcaatcaacggatacattatggatacactccctggccttgtgatggctcaggaccaacgaatcaggtggtacctcctcagcatgggttctaatgagaacatacactccattcacttttcaggacatgtgttcactgtccggaagaaagaagagtataagatggccctctacaatttgtatccaggcgtgtttgagaccgttgaaatgcttccctctaaagctggcatctggagagtagagtgcttgatcggagaacatcttcacgcaggtatgagcaccttgttcctcgtgtacagcaacaaatgtcagaatccacttggcatggccagtggacacattcgcgactttcagatcacagcatctggccagtatggacaatgggccccaaagttggctcgcctccattactccggtagcataaatgcgtggtccactaaagaacctttcagctggattaaggtcgatcttcttgcccccatgatcatccacggcattaagacacagggagcgaggcagaaattctcctccctctacatctcacagttcattattatgtatagtttggacggcaagaagtggcaaacttatagaggtaacagtactggaacagacatggtgttcttcggcaacgttgatagctctggcatcaaacacaacatctttaatcctcccataatagctcggtacatcagattgcatccgacccactacagcattaggagtacactccgaatggagcttatgggttgcgacttgaattcctgttcaatgccactcggaatggagtctaaagccatctctgatgcacagataaccgccagtagctactttacgaacatgtttgctacgtggtcaccctctaaggcaaggcttcatttgcaaggccggtctaatgcctggagacctcaggtgaacaacccgaaagaatggctccaggtggactttcagaagaccatgaaagtaacaggtgtcactactcagggagttaagtccttggatactagcatgtatgtgaaggagttccttatttcctcatcacaagatggccaccagtggaccctcttctttcagaatggtaaggtcaaagtgtttcagggcaatcaagacagcttcacacccgtggtgaacagtcttgatcctccactcttgacacgataccttcgaatccatccacagtcttgggagcaccagattgcattgcgcatggaagtacttggatgcgaggctcaggacctctac

SEQ ID NO: 1438 - protein, 1457 aa, synthetic construct
  REGION 1..1457: note = Variant of human B-domain deleted Factor VIII
MQIELSTCFFLCLLRFCFSATRRYYLGAVELSWDYMQSDLGELPVDARFPPRVPKSFPFNTSQVYKKTLFVEFTDHLFNIAKPRPPWMGLLGPTIQAEVYDTVVITLKNMASHPVSLHAVGVSYWKASEGAEYDDQTSQREKEDDKVFPGGSHTYVWQVLKENGPMASDPPCLTYSYLSHVDLVKDLNSGLIGALLVCREGSLAKEKTQTLHKFILLFAVFDEGKSWHSETKNSLMQDRDAASARAWPKMHTVNGYVNRTLPGLIGCHRKSVYWHVIGMGTTPEVHSIFLEGHTFLVRNHRQASLGISPITFLTAQTLLMDLGQFLLFCHIPSHQHDGMEAYVKVDSCPEEPQLRMKNNEEAEDYDDDLTDSEMDVVRFDDDNSPSIIQARSGAKKHPKTWVHYIAAEEEDWDYAPLVLAPDDRSYKSQYLNNGPQRIGRKYKKVRFMAYTDETFKTREAIQHESGILGPLLYGEVGDTLLIIFKNQASRPYNIYPHGITDVRPLYSRRLPKGVKHLKDFPILPGEIFKYKWTVTVEDGPTKSDPRCLTRYYSSGVNMERDLASGLIGPLLICYKESVDQRGNQIMSDKRNVILFSVFDENRSWYLTENIQRFLPNPAGVQLEDPEFQASNIMHSINGYVFDSLQLSVCLHEVAYWYILSIGAQTDFLSVFFSGYTFKHKMVYEDTLTLFPFSGETVFMSMENPGLWILGCHNSDFRNRGMTALLKVSSCDKNTGDYYEDSYEDISAYFDSKNNAIEPRSFSQNPPVLKRHQREGTRTTLQSDQEEIDYDDTISVEMKKEDFDIYDEDENQSPRSFQKKTRHYFIAAVERLWDYGMSSSPHVLRNRAQSGSVPQFKKVVFQEFTDGSFTQPLYRGELNEHLGLLGPYIRAEVEDNIMVTFRNQASRPYSFYSSLISYEEDQRQGAEPRKNFVKPNETKTYFWKVQHHMAPTKDEFDCKAWAYFSDVDLEKDVHSGLIGPLLVCHTNTLNPAHGRQVTVQEFALFFTIFDETKSWYFTENMERNCRAPCNIQMEDPTFKENYRFHAINGYIMDTLPGLVMAQDQRIRWYLLSMGSNENIHSIHFSGHVFTVRKKEEYKMALYNLYPGVFETVEMLPSKAGIWRVECLIGEHLHAGMSTLFLVYSNKCQNPLGMASGHIRDFQITASGQYGQWAPKLARLHYSGSINAWSTKEPFSWIKVDLLAPMIIHGIKTQGARQKFSSLYISQFIIMYSLDGKKWQTYRGNSTGTDMVFFGNVDSSGIKHNIFNPPIIARYIRLHPTHYSIRSTLRMELMGCDLNSCSMPLGMESKAISDAQITASSYFTNMFATWSPSKARLHLQGRSNAWRPQVNNPKEWLQVDFQKTMKVTGVTTQGVKSLDTSMYVKEFLISSSQDGHQWTLFFQNGKVKVFQGNQDSFTPVVNSLDPPLLTRYLRIHPQSWEHQIALRMEVLGCEAQDLY

SEQ ID NO: 1439 - DNA, 4371 bp, synthetic construct
  misc_feature 1..4371: note = Variant of human B-domain deleted Factor VIII
  source 1..4371: mol_type = other DNA
atgcagattgaactgtctacctgcttcttcctctgtttgctgaggttctgctttagcgccactagacggtactaccttggcgctgtggagctgtcctgggactatatgcagagtgatttgggagagcttcccgtcgacgcacgatttcctcctcgcgttccaaagtcatttccctttaacacaagccaggtgtacaagaagacgctcttcgtcgaattcaccgatcacctgttcaatatcgccaaacccagaccaccatggatgggtcttttggggcctaccatacaagcggaggtgtatgacacagttgttatcactctcaagaacatggcttctcatccggtaagtcttcacgcagtgggcgtgtcctactggaaagcttcagaaggagccgagtatgatgatcagacatcccagagggagaaagaagacgacaaggtatttccaggtgggtctcatacctatgtgtggcaagtgctcaaagagaatggccctatggcaagcgatccgccgtgtttgacttacagctacctttcacacgttgacctcgtcaaggacctcaactccgggttgattggagccttgttggtatgcagggaaggatctcttgccaaagagaagacacagaccctgcacaagtttatccttctctttgctgtgttcgatgagggcaaaagttggcatagcgaaacgaagaattccctcatgcaggatcgcgacgcagccagcgccagagcttggcccaagatgcacactgtgaacggatatgtcaataggacgcttcctggcttgattgggtgtcatcggaaaagtgtctactggcacgtgatcggaatggggacaacaccagaggtccactccatatttctcgaaggccataccttccttgttcgaaaccacagacaggcatccttggggatctctcccattacctttctcactgcccaaacgctccttatggacttgggtcagttccttctcttttgccatatcccgtcacaccagcatgatggtatggaagcttatgtgaaagtcgacagttgtcctgaggagccacagttgcgcatgaagaataatgaagaagccgaggattacgacgacgatctcaccgattctgagatggacgtggtgaggtttgatgacgacaactctccctccatcattcaagctcggagcggggcgaagaaacaccccaagacttgggtccactatatagcggcggaagaggaggattgggattacgctcctcttgtattggcaccagatgaccgctcatacaaaagccagtacctcaacaacggaccgcagagaattggccggaagtataagaaagtgcgatttatggcctatacagacgaaacctttaagacaagggaggccatccagcatgagagtgggattttgggacctcttctttacggcgaagttggtgataccctcctcatcatcttcaagaatcaagcttctcgcccctataacatttacccacacgggatcactgacgttaggcctttgtatagcagaagacttcccaaaggcgtgaagcatctcaaagacttccccattttgccaggcgagatctttaagtacaaatggaccgtcacacctgaagatggaccgactaaatcagaccctcgatgccttacgcggtactattcctccgaggtgaatctggagagagatttggcaagcggactcataggaccactcctcatctgttacaaggaatctgtagaccagaggggtaaccagattatgagtgataaacgcaatgtgatcctttttagcgtcttcgacgagaaccggtcctggtacttgaccgagaatatacaaaggttccttcccaacggcgcaggcgttcagctggaagaccctgagtttcaggccagcaatattatgcactcaatcaacggctatgtgtttgatagtctccagctttctgtttgcctccatgaagtagcctattggtacatcttgtcaattggtgctcaaacagacttcctctccgtcttcttctccggctacacctttaagcacaagatggtgtatgaggacactctcacactctttccattttctggagaaaccgtgttcatgagcatggagaatccaggcctttggatcttgggttgccacaacagtgattttcgcaatcggggaatgactgctctcctcaaagtcagcagctgtgataagaacacaggcgactattacgaagattcttacgaggacataagtgcctactttgactccaagaataacgccattgagcccagatcattctcccagaatcctcccgtgcttaaaaggcatcagcgcgaaggtaccagaactactcttcagtctgatcaagaggagattgactatgacgacaccattagcgtggaaatgaagaaggaggatttcgatatctatgacgaagatgagaaccagtctccgcggagctttcagaagaagacgcgacactacttcattgcagcagtcgaaaggctttgggactacggtatgtcatcatcccctcatgtgttgcgcaatagagctcagagtggaagtgttccacagttcaagaaagtcgtctttcaagagtttacagatggcagcttcacacagcctctctatcggggcgagcttaacgaacatttgggactccttggtccctatatccgagccgaagtggaggacaacattatggttacctttaggaatcaagcctctcgcccctacagcttctactcctccctcatcagttatgaggaggatcagagacaaggcgctgaaccacggaagaactttgtgaaaccgaatgagacgaagacctacttctggaaagtacagcaccacatggcccccacaaaagacgaattcgattgcaaagcatgggcgtatttttcagacgttgacttggagaaagatgtacattcaggacttattggtcctttgttggtgtgtcacactaacactctcaatccagcccatggcaggcaggtgacagtccaggaattcgctcttttctttaccatctttgatgagaccaagtcctggtacttcacggaaaacatggagcgcaattgcagagccccctgtaacatacagatggaggaccctacctttaaggaaaattatcggttccacgcaatcaacggatacattatggatacactccctggccttgtgatggctcaggaccaacgaatcaggtggtacctcctcagcatgggttctaatgagaacatacactccattcacttttcaggacatgtgttcactgtccggaagaaagaagagtataagatggccctctacaatttgtatccaggcgtgtttgagaccgttgaaatgcttccctctaaagctggcatctggagagtagagtgcttgatcggagaacatcttcacgcaggtatgagcaccttgttcctcgtgtacagcaacaaatgtcagaatccacttggcatggccagtggacacattcgcgactttcagatcacagcatctggccagtatggacaatgggccccaaagttggctcgcctccattactccggtagcataaatgcgtggtccactaaagaacctttcagctggattaaggtcgatcttcttgcccccatgatcatccacggcattaagacacagggagcgaggcagaaattctcctccctctacatctcacagttcattattatgtatagtttggacggcaagaagtggcaaacttatagaggtaacagtactggaacagacatggtgttcttcggcaacgttgatagctctggcatcaaacacaacatctttaatcctcccataatagctcggtacatcagattgcatccgacccactacagcattaggagtacactccgaatggagcttatgggttgcgacttgaattcctgttcaatgccactcggaatggagtctaaagccatctctgatgcacagataaccgccagtagctactttacgaacatgtttgctacgtggtcaccctctaaggcaaggcttcatttgcaaggccggtctaatgcctggagacctcaggtgaacaacccgaaagaatggctccaggtggactttcagaagaccatgaaagtaacaggtgtcactactcagggagttaagtccttggatactagcatgtatgtgaaggagttccttatttcctcatcacaagatggccaccagtggaccctcttctttcagaatggtaaggtcaaagtgtttcagggcaatcaagacagcttcacacccgtggtgaacagtcttgatcctccactcttgacacgataccttcgaatccatccacagtcttgggagcaccagattgcattgcgcatggaagtacttggatgcgaggctcaggacctctac

SEQ ID NO: 1440 - protein, 1457 aa, synthetic construct
  REGION 1..1457: note = Variant of human B-domain deleted Factor VIII
MQIELSTCFFLCLLRFCFSATRRYYLGAVELSWDYMQSDLGELPVDARFPPRVPKSFPFNTSQVYKKTLFVEFTDHLFNIAKPRPPWMGLLGPTIQAEVYDTVVITLKNMASHPVSLHAVGVSYWKASEGAEYDDQTSQREKEDDKVFPGGSHTYVWQVLKENGPMASDPPCLTYSYLSHVDLVKDLNSGLIGALLVCREGSLAKEKTQTLHKFILLFAVFDEGKSWHSETKNSLMQDRDAASARAWPKMHTVNGYVNRTLPGLIGCHRKSVYWHVIGMGTTPEVHSIFLEGHTFLVRNHRQASLGISPITFLTAQTLLMDLGQFLLFCHIPSHQHDGMEAYVKVDSCPEEPQLRMKNNEEAEDYDDDLTDSEMDVVRFDDDNSPSIIQARSGAKKHPKTWVHYIAAEEEDWDYAPLVLAPDDRSYKSQYLNNGPQRIGRKYKKVRFMAYTDETFKTREAIQHESGILGPLLYGEVGDTLLIIFKNQASRPYNIYPHGITDVRPLYSRRLPKGVKHLKDFPILPGEIFKYKWTVTPEDGPTKSDPRCLTRYYSSEVNLERDLASGLIGPLLICYKESVDQRGNQIMSDKRNVILFSVFDENRSWYLTENIQRFLPNGAGVQLEDPEFQASNIMHSINGYVFDSLQLSVCLHEVAYWYILSIGAQTDFLSVFFSGYTFKHKMVYEDTLTLFPFSGETVFMSMENPGLWILGCHNSDFRNRGMTALLKVSSCDKNTGDYYEDSYEDISAYFDSKNNAIEPRSFSQNPPVLKRHQREGTRTTLQSDQEEIDYDDTISVEMKKEDFDIYDEDENQSPRSFQKKTRHYFIAAVERLWDYGMSSSPHVLRNRAQSGSVPQFKKVVFQEFTDGSFTQPLYRGELNEHLGLLGPYIRAEVEDNIMVTFRNQASRPYSFYSSLISYEEDQRQGAEPRKNFVKPNETKTYFWKVQHHMAPTKDEFDCKAWAYFSDVDLEKDVHSGLIGPLLVCHTNTLNPAHGRQVTVQEFALFFTIFDETKSWYFTENMERNCRAPCNIQMEDPTFKENYRFHAINGYIMDTLPGLVMAQDQRIRWYLLSMGSNENIHSIHFSGHVFTVRKKEEYKMALYNLYPGVFETVEMLPSKAGIWRVECLIGEHLHAGMSTLFLVYSNKCQNPLGMASGHIRDFQITASGQYGQWAPKLARLHYSGSINAWSTKEPFSWIKVDLLAPMIIHGIKTQGARQKFSSLYISQFIIMYSLDGKKWQTYRGNSTGTDMVFFGNVDSSGIKHNIFNPPIIARYIRLHPTHYSIRSTLRMELMGCDLNSCSMPLGMESKAISDAQITASSYFTNMFATWSPSKARLHLQGRSNAWRPQVNNPKEWLQVDFQKTMKVTGVTTQGVKSLDTSMYVKEFLISSSQDGHQWTLFFQNGKVKVFQGNQDSFTPVVNSLDPPLLTRYLRIHPQSWEHQIALRMEVLGCEAQDLY

SEQ ID NO: 1441 - DNA, 4371 bp, synthetic construct
  misc_feature 1..4371: note = Variant of human B-domain deleted Factor VIII
  source 1..4371: mol_type = other DNA
atgcagattgaactgtctacctgcttcttcctctgtttgctgaggttctgctttagcgccactagacggtactaccttggcgctgtggagctgtcctgggactatatgcagagtgatttgggagagcttcccgtcgacgcacgatttcctcctcgcgttccaaagtcatttccctttaacacaagccaggtgtacaagaagacgctcttcgtcgaattcaccgatcacctgttcaatatcgccaaacccagaccaccatggatgggtcttttggggcctaccatacaagcggaggtgtatgacacagttgttatcactctcaagaacatggcttctcatccggtaagtcttcacgcagtgggcgtgtcctactggaaagcttcagaaggagccgagtatgatgatcagacatcccagagggagaaagaagacgacaaggtatttccaggtgggtctcatacctatgtgtggcaagtgctcaaagagaatggccctatggcaagcgatccgccgtgtttgacttacagctacctttcacacgttgacctcgtcaaggacctcaactccgggttgattggagccttgttggtatgcagggaaggatctcttgccaaagagaagacacagaccctgcacaagtttatccttctctttgctgtgttcgatgagggcaaaagttggcatagcgaaacgaagaattccctcatgcaggatcgcgacgcagccagcgccagagcttggcccaagatgcacactgtgaacggatatgtcaataggacgcttcctggcttgattgggtgtcatcggaaaagtgtctactggcacgtgatcggaatggggacaacaccagaggtccactccatatttctcgaaggccataccttccttgttcgaaaccacagacaggcatccttggggatctctcccattacctttctcactgcccaaacgctccttatggacttgggtcagttccttctcttttgccatatcccgtcacaccagcatgatggtatggaagcttatgtgaaagtcgacagttgtcctgaggagccacagttgcgcatgaagaataatgaagaagccgaggattacgacgacgatctcaccgattctgagatggacgtggtgaggtttgatgacgacaactctccctccatcattcaagctcggagcggggcgaagaaacaccccaagacttgggtccactatatagcggcggaagaggaggattgggattacgctcctcttgtattggcaccagatgaccgctcatacaaaagccagtacctcaacaacggaccgcagagaattggccggaagtataagaaagtgcgatttatggcctatacagacgaaacctttaagacaagggaggccatccagcatgagagtgggattttgggacctcttctttacggcgaagttggtgataccctcctcatcatcttcaagaatcaagcttctcgcccctataacatttacccacacgggatcactgacgttaggcctttgtatagcagaagacttcccaaaggcgtgaagcatctcaaagacttccccattttgccaggcgagatctttaagtacaaatggaccgtcacaaaggaagatggaccgactaaatcagaccctcgatgccttacgcggtactattcctccttcgtgaatatggagagagatttggcaagcggactcataggaccactcctcatctgttacaaggaatctgtagaccagaggggtaaccagattatgagtgataaacgcaatgtgatcctttttagcgtcttcgacgagaaccggtcctggtacttgaccgagaatatacaaaggttccttcccaacggcgcaggcgttcagctggaagaccctgagtttcaggccagcaatattatgcactcaatcaacggctatgtgtttgatagtctccagctttctgtttgcctccatgaagtagcctattggtacatcttgtcaattggtgctcaaacagacttcctctccgtcttcttctccggctacacctttaagcacaaggcagtgtatgaggacactctcacactctttccattttctggagaaaccgtgttcatgagcatggagaatccaggcctttggatcttgggttgccacaacagtgattttcgcaatcggggaatgactgctctcctcaaagtcagcagctgtgataagaacacaggcgactattacgaagattcttacgaggacataagtgcctactttgactccaagaataacgccattgagcccagatcattctcccagaatcctcccgtgcttaaaaggcatcagcgcgaaggtaccagaactactcttcagtctgatcaagaggagattgactatgacgacaccattagcgtggaaatgaagaaggaggatttcgatatctatgacgaagatgagaaccagtctccgcggagctttcagaagaagacgcgacactacttcattgcagcagtcgaaaggctttgggactacggtatgtcatcatcccctcatgtgttgcgcaatagagctcagagtggaagtgttccacagttcaagaaagtcgtctttcaagagtttacagatggcagcttcacacagcctctctatcggggcgagcttaacgaacatttgggactccttggtccctatatccgagccgaagtggaggacaacattatggttacctttaggaatcaagcctctcgcccctacagcttctactcctccctcatcagttatgaggaggatcagagacaaggcgctgaaccacggaagaactttgtgaaaccgaatgagacgaagacctacttctggaaagtacagcaccacatggcccccacaaaagacgaattcgattgcaaagcatgggcgtatttttcagacgttgacttggagaaagatgtacattcaggacttattggtcctttgttggtgtgtcacactaacactctcaatccagcccatggcaggcaggtgacagtccaggaattcgctcttttctttaccatctttgatgagaccaagtcctggtacttcacggaaaacatggagcgcaattgcagagccccctgtaacatacagatggaggaccctacctttaaggaaaattatcggttccacgcaatcaacggatacattatggatacactccctggccttgtgatggctcaggaccaacgaatcaggtggtacctcctcagcatgggttctaatgagaacatacactccattcacttttcaggacatgtgttcactgtccggaagaaagaagagtataagatggccctctacaatttgtatccaggcgtgtttgagaccgttgaaatgcttccctctaaagctggcatctggagagtagagtgcttgatcggagaacatcttcacgcaggtatgagcaccttgttcctcgtgtacagcaacaaatgtcagaatccacttggcatggccagtggacacattcgcgactttcagatcacagcatctggccagtatggacaatgggccccaaagttggctcgcctccattactccggtagcataaatgcgtggtccactaaagaacctttcagctggattaaggtcgatcttcttgcccccatgatcatccacggcattaagacacagggagcgaggcagaaattctcctccctctacatctcacagttcattattatgtatagtttggacggcaagaagtggcaaacttatagaggtaacagtactggaacagacatggtgttcttcggcaacgttgatagctctggcatcaaacacaacatctttaatcctcccataatagctcggtacatcagattgcatccgacccactacagcattaggagtacactccgaatggagcttatgggttgcgacttgaattcctgttcaatgccactcggaatggagtctaaagccatctctgatgcacagataaccgccagtagctactttacgaacatgtttgctacgtggtcaccctctaaggcaaggcttcatttgcaaggccggtctaatgcctggagacctcaggtgaacaacccgaaagaatggctccaggtggactttcagaagaccatgaaagtaacaggtgtcactactcagggagttaagtccttggatactagcatgtatgtgaaggagttccttatttcctcatcacaagatggccaccagtggaccctcttctttcagaatggtaaggtcaaagtgtttcagggcaatcaagacagcttcacacccgtggtgaacagtcttgatcctccactcttgacacgataccttcgaatccatccacagtcttgggagcaccagattgcattgcgcatggaagtacttggatgcgaggctcaggacctctac

SEQ ID NO: 1442 - protein, 1457 aa, synthetic construct
  REGION 1..1457: note = Variant of human B-domain deleted Factor VIII
MQIELSTCFFLCLLRFCFSATRRYYLGAVELSWDYMQSDLGELPVDARFPPRVPKSFPFNTSQVYKKTLFVEFTDHLFNIAKPRPPWMGLLGPTIQAEVYDTVVITLKNMASHPVSLHAVGVSYWKASEGAEYDDQTSQREKEDDKVFPGGSHTYVWQVLKENGPMASDPPCLTYSYLSHVDLVKDLNSGLIGALLVCREGSLAKEKTQTLHKFILLFAVFDEGKSWHSETKNSLMQDRDAASARAWPKMHTVNGYVNRTLPGLIGCHRKSVYWHVIGMGTTPEVHSIFLEGHTFLVRNHRQASLGISPITFLTAQTLLMDLGQFLLFCHIPSHQHDGMEAYVKVDSCPEEPQLRMKNNEEAEDYDDDLTDSEMDVVRFDDDNSPSIIQARSGAKKHPKTWVHYIAAEEEDWDYAPLVLAPDDRSYKSQYLNNGPQRIGRKYKKVRFMAYTDETFKTREAIQHESGILGPLLYGEVGDTLLIIFKNQASRPYNIYPHGITDVRPLYSRRLPKGVKHLKDFPILPGEIFKYKWTVTKEDGPTKSDPRCLTRYYSSFVNMERDLASGLIGPLLICYKESVDQRGNQIMSDKRNVILFSVFDENRSWYLTENIQRFLPNGAGVQLEDPEFQASNIMHSINGYVFDSLQLSVCLHEVAYWYILSIGAQTDFLSVFFSGYTFKHKAVYEDTLTLFPFSGETVFMSMENPGLWILGCHNSDFRNRGMTALLKVSSCDKNTGDYYEDSYEDISAYFDSKNNAIEPRSFSQNPPVLKRHQREGTRTTLQSDQEEIDYDDTISVEMKKEDFDIYDEDENQSPRSFQKKTRHYFIAAVERLWDYGMSSSPHVLRNRAQSGSVPQFKKVVFQEFTDGSFTQPLYRGELNEHLGLLGPYIRAEVEDNIMVTFRNQASRPYSFYSSLISYEEDQRQGAEPRKNFVKPNETKTYFWKVQHHMAPTKDEFDCKAWAYFSDVDLEKDVHSGLIGPLLVCHTNTLNPAHGRQVTVQEFALFFTIFDETKSWYFTENMERNCRAPCNIQMEDPTFKENYRFHAINGYIMDTLPGLVMAQDQRIRWYLLSMGSNENIHSIHFSGHVFTVRKKEEYKMALYNLYPGVFETVEMLPSKAGIWRVECLIGEHLHAGMSTLFLVYSNKCQNPLGMASGHIRDFQITASGQYGQWAPKLARLHYSGSINAWSTKEPFSWIKVDLLAPMIIHGIKTQGARQKFSSLYISQFIIMYSLDGKKWQTYRGNSTGTDMVFFGNVDSSGIKHNIFNPPIIARYIRLHPTHYSIRSTLRMELMGCDLNSCSMPLGMESKAISDAQITASSYFTNMFATWSPSKARLHLQGRSNAWRPQVNNPKEWLQVDFQKTMKVTGVTTQGVKSLDTSMYVKEFLISSSQDGHQWTLFFQNGKVKVFQGNQDSFTPVVNSLDPPLLTRYLRIHPQSWEHQIALRMEVLGCEAQDLY

SEQ ID NO: 1443 - DNA, 4371 bp, synthetic construct
  misc_feature 1..4371: note = Variant of human B-domain deleted Factor VIII
  source 1..4371: mol_type = other DNA
atgcagattgaactgtctacctgcttcttcctctgtttgctgaggttctgctttagcgccactagacggtactaccttggcgctgtggagctgtcctgggactatatgcagagtgatttgggagagcttcccgtcgacgcacgatttcctcctcgcgttccaaagtcatttccctttaacacaagccaggtgtacaagaagacgctcttcgtcgaattcaccgatcacctgttcaatatcgccaaacccagaccaccatggatgggtcttttggggcctaccatacaagcggaggtgtatgacacagttgttatcactctcaagaacatggcttctcatccggtaagtcttcacgcagtgggcgtgtcctactggaaagcttcagaaggagccgagtatgatgatcagacatcccagagggagaaagaagacgacaaggtatttccaggtgggtctcatacctatgtgtggcaagtgctcaaagagaatggccctatggcaagcgatccgccgtgtttgacttacagctacctttcacacgttgacctcgtcaaggacctcaactccgggttgattggagccttgttggtatgcagggaaggatctcttgccaaagagaagacacagaccctgcacaagtttatccttctctttgctgtgttcgatgagggcaaaagttggcatagcgaaacgaagaattccctcatgcaggatcgcgacgcagccagcgccagagcttggcccaagatgcacactgtgaacggatatgtcaataggacgcttcctggcttgattgggtgtcatcggaaaagtgtctactggcacgtgatcggaatggggacaacaccagaggtccactccatatttctcgaaggccataccttccttgttcgaaaccacagacaggcatccttggggatctctcccattacctttctcactgcccaaacgctccttatggacttgggtcagttccttctcttttgccatatcccgtcacaccagcatgatggtatggaagcttatgtgaaagtcgacagttgtcctgaggagccacagttgcgcatgaagaataatgaagaagccgaggattacgacgacgatctcaccgattctgagatggacgtggtgaggtttgatgacgacaactctccctccatcattcaagctcggagcggggcgaagaaacaccccaagacttgggtccactatatagcggcggaagaggaggattgggattacgctcctcttgtattggcaccagatgaccgctcatacaaaagccagtacctcaacaacggaccgcagagaattggccggaagtataagaaagtgcgatttatggcctatacagacgaaacctttaagacaagggaggccatccagcatgagagtgggattttgggacctcttctttacggcgaagttggtgataccctcctcatcatcttcaagaatcaagcttctcgcccctataacatttacccacacgggatcactgacgttaggcctttgtatagcagaagacttcccaaaggcgtgaagcatctcaaagacttccccattttgccaggcgagatctttaagtacaaatggaccgtcacaaaggaagatggaccgactaaatcagaccctcgatgccttacgcggtactattcctccggggtgaatatggagagagatttggcaagcggactcataggaccactcctcatctgttacaaggaatctgtagaccagaggggtaaccagattatgagtgataaacgcaatgtgatcctttttagcgtcttcgacgagaaccggtcctggtacttgaccgagaatatacaaaggttccttcccaacccggcaggcgttcagctggaagaccctgagtttcaggccagcaatattatgcactcaatcaacggctatgtgtttgatagtctccagctttctgtttgcctccatgaagtagcctattggtacatcttgtcaattggtgctcaaacagacttcctctccgtcttcttctccggctacacctttaagcacaagatggtgtatgaggacactctcacactctttccattttctggagaaaccgtgttcatgagcatggagaatccaggcctttggatcttgggttgccacaacagtgattttcgcaatcggggaatgactgctctcctcaaagtcagcagctgtgattggaacacaggcgactattacgaagattcttacgaggacataagtgcctactttgactccaagaataacgccattgagcccagatcattctcccagaatcctcccgtgcttaaaaggcatcagcgcgaaggtaccagaactactcttcagtctgatcaagaggagattgactatgacgacaccattagcgtggaaatgaagaaggaggatttcgatatctatgacgaagatgagaaccagtctccgcggagctttcagaagaagacgcgacactacttcattgcagcagtcgaaaggctttgggactacggtatgtcatcatcccctcatgtgttgcgcaatagagctcagagtggaagtgttccacagttcaagaaagtcgtctttcaagagtttacagatggcagcttcacacagcctctctatcggggcgagcttaacgaacatttgggactccttggtccctatatccgagccgaagtggaggacaacattatggttacctttaggaatcaagcctctcgcccctacagcttctactcctccctcatcagttatgaggaggatcagagacaaggcgctgaaccacggaagaactttgtgaaaccgaatgagacgaagacctacttctggaaagtacagcaccacatggcccccacaaaagacgaattcgattgcaaagcatgggcgtatttttcagacgttgacttggagaaagatgtacattcaggacttattggtcctttgttggtgtgtcacactaacactctcaatccagcccatggcaggcaggtgacagtccaggaattcgctcttttctttaccatctttgatgagaccaagtcctggtacttcacggaaaacatggagcgcaattgcagagccccctgtaacatacagatggaggaccctacctttaaggaaaattatcggttccacgcaatcaacggatacattatggatacactccctggccttgtgatggctcaggaccaacgaatcaggtggtacctcctcagcatgggttctaatgagaacatacactccattcacttttcaggacatgtgttcactgtccggaagaaagaagagtataagatggccctctacaatttgtatccaggcgtgtttgagaccgttgaaatgcttccctctaaagctggcatctggagagtagagtgcttgatcggagaacatcttcacgcaggtatgagcaccttgttcctcgtgtacagcaacaaatgtcagaatccacttggcatggccagtggacacattcgcgactttcagatcacagcatctggccagtatggacaatgggccccaaagttggctcgcctccattactccggtagcataaatgcgtggtccactaaagaacctttcagctggattaaggtcgatcttcttgcccccatgatcatccacggcattaagacacagggagcgaggcagaaattctcctccctctacatctcacagttcattattatgtatagtttggacggcaagaagtggcaaacttatagaggtaacagtactggaacagacatggtgttcttcggcaacgttgatagctctggcatcaaacacaacatctttaatcctcccataatagctcggtacatcagattgcatccgacccactacagcattaggagtacactccgaatggagcttatgggttgcgacttgaattcctgttcaatgccactcggaatggagtctaaagccatctctgatgcacagataaccgccagtagctactttacgaacatgtttgctacgtggtcaccctctaaggcaaggcttcatttgcaaggccggtctaatgcctggagacctcaggtgaacaacccgaaagaatggctccaggtggactttcagaagaccatgaaagtaacaggtgtcactactcagggagttaagtccttggatactagcatgtatgtgaaggagttccttatttcctcatcacaagatggccaccagtggaccctcttctttcagaatggtaaggtcaaagtgtttcagggcaatcaagacagcttcacacccgtggtgaacagtcttgatcctccactcttgacacgataccttcgaatccatccacagtcttgggagcaccagattgcattgcgcatggaagtacttggatgcgaggctcaggacctctac

SEQ ID NO: 1444 - protein, 1457 aa, synthetic construct
  REGION 1..1457: note = Variant of human B-domain deleted Factor VIII
MQIELSTCFFLCLLRFCFSATRRYYLGAVELSWDYMQSDLGELPVDARFPPRVPKSFPFNTSQVYKKTLFVEFTDHLFNIAKPRPPWMGLLGPTIQAEVYDTVVITLKNMASHPVSLHAVGVSYWKASEGAEYDDQTSQREKEDDKVFPGGSHTYVWQVLKENGPMASDPPCLTYSYLSHVDLVKDLNSGLIGALLVCREGSLAKEKTQTLHKFILLFAVFDEGKSWHSETKNSLMQDRDAASARAWPKMHTVNGYVNRTLPGLIGCHRKSVYWHVIGMGTTPEVHSIFLEGHTFLVRNHRQASLGISPITFLTAQTLLMDLGQFLLFCHIPSHQHDGMEAYVKVDSCPEEPQLRMKNNEEAEDYDDDLTDSEMDVVRFDDDNSPSIIQARSGAKKHPKTWVHYIAAEEEDWDYAPLVLAPDDRSYKSQYLNNGPQRIGRKYKKVRFMAYTDETFKTREAIQHESGILGPLLYGEVGDTLLIIFKNQASRPYNIYPHGITDVRPLYSRRLPKGVKHLKDFPILPGEIFKYKWTVTKEDGPTKSDPRCLTRYYSSGVNMERDLASGLIGPLLICYKESVDQRGNQIMSDKRNVILFSVFDENRSWYLTENIQRFLPNPAGVQLEDPEFQASNIMHSINGYVFDSLQLSVCLHEVAYWYILSIGAQTDFLSVFFSGYTFKHKMVYEDTLTLFPFSGETVFMSMENPGLWILGCHNSDFRNRGMTALLKVSSCDWNTGDYYEDSYEDISAYFDSKNNAIEPRSFSQNPPVLKRHQREGTRTTLQSDQEEIDYDDTISVEMKKEDFDIYDEDENQSPRSFQKKTRHYFIAAVERLWDYGMSSSPHVLRNRAQSGSVPQFKKVVFQEFTDGSFTQPLYRGELNEHLGLLGPYIRAEVEDNIMVTFRNQASRPYSFYSSLISYEEDQRQGAEPRKNFVKPNETKTYFWKVQHHMAPTKDEFDCKAWAYFSDVDLEKDVHSGLIGPLLVCHTNTLNPAHGRQVTVQEFALFFTIFDETKSWYFTENMERNCRAPCNIQMEDPTFKENYRFHAINGYIMDTLPGLVMAQDQRIRWYLLSMGSNENIHSIHFSGHVFTVRKKEEYKMALYNLYPGVFETVEMLPSKAGIWRVECLIGEHLHAGMSTLFLVYSNKCQNPLGMASGHIRDFQITASGQYGQWAPKLARLHYSGSINAWSTKEPFSWIKVDLLAPMIIHGIKTQGARQKFSSLYISQFIIMYSLDGKKWQTYRGNSTGTDMVFFGNVDSSGIKHNIFNPPIIARYIRLHPTHYSIRSTLRMELMGCDLNSCSMPLGMESKAISDAQITASSYFTNMFATWSPSKARLHLQGRSNAWRPQVNNPKEWLQVDFQKTMKVTGVTTQGVKSLDTSMYVKEFLISSSQDGHQWTLFFQNGKVKVFQGNQDSFTPVVNSLDPPLLTRYLRIHPQSWEHQIALRMEVLGCEAQDLY

SEQ ID NO: 1445 - DNA, 4371 bp, synthetic construct
  misc_feature 1..4371: note = Variant of human B-domain deleted Factor VIII
  source 1..4371: mol_type = other DNA
atgcagattgaactgtctacctgcttcttcctctgtttgctgaggttctgctttagcgccactagacggtactaccttggcgctgtggagctgtcctgggactatatgcagagtgatttgggagagcttcccgtcgacgcacgatttcctcctcgcgttccaaagtcatttccctttaacacaagccaggtgtacaagaagacgctcttcgtcgaattcaccgatcacctgttcaatatcgccaaacccagaccaccatggatgggtcttttggggcctaccatacaagcggaggtgtatgacacagttgttatcactctcaagaacatggcttctcatccggtaagtcttcacgcagtgggcgtgtcctactggaaagcttcagaaggagccgagtatgatgatcagacatcccagagggagaaagaagacgacaaggtatttccaggtgggtctcatacctatgtgtggcaagtgctcaaagagaatggccctatggcaagcgatccgccgtgtttgacttacagctacctttcacacgttgacctcgtcaaggacctcaactccgggttgattggagccttgttggtatgcagggaaggatctcttgccaaagagaagacacagaccctgcacaagtttatccttctctttgctgtgttcgatgagggcaaaagttggcatagcgaaacgaagaattccctcatgcaggatcgcgacgcagccagcgccagagcttggcccaagatgcacactgtgaacggatatgtcaataggacgcttcctggcttgattgggtgtcatcggaaaagtgtctactggcacgtgatcggaatggggacaacaccagaggtccactccatatttctcgaaggccataccttccttgttcgaaaccacagacaggcatccttggggatctctcccattacctttctcactgcccaaacgctccttatggacttgggtcagttccttctcttttgccatatcccgtcacaccagcatgatggtatggaagcttatgtgaaagtcgacagttgtcctgaggagccacagttgcgcatgaagaataatgaagaagccgaggattacgacgacgatctcaccgattctgagatggacgtggtgaggtttgatgacgacaactctccctccatcattcaagctcggagcggggcgaagaaacaccccaagacttgggtccactatatagcggcggaagaggaggattgggattacgctcctcttgtattggcaccagatgaccgctcatacaaaagccagtacctcaacaacggaccgcagagaattggccggaagtataagaaagtgcgatttatggcctatacagacgaaacctttaagacaagggaggccatccagcatgagagtgggattttgggacctcttctttacggcgaagttggtgataccctcctcatcatcttcaagaatcaagcttctcgcccctataacatttacccacacgggatcactgacgttaggcctttgtatagcagaagacttcccaaaggcgtgaagcatctcaaagacttccccattttgccaggcgagatctttaagtacaaatggaccgtcacacctgaagatggaccgactaaatcagaccctcgatgccttacgcggtactattcctccttcgtgaatatggagagagatttggcaagcggactcataggaccactcctcatctgttacaaggaatctgtagaccagaggggtaaccagattatgagtgataaacgcaatgtgatcctttttagcgtcttcgacgagaaccggtcctggtacttgaccgagaatatacaaaggttccttcccaacccggcaggcgttcaggacgaagaccctgagtttcaggccagcaatattatgcactcaatcaacggctatgtgtttgatagtctccagctttctgtttgcctccatgaagtagcctattggtacatcttgtcaattggtgctcaaacagacttcctctccgtcttcttctccggctacacctttaagcacaaggcagtgtatgaggacactctcacactctttccattttctggagaaaccgtgttcatgagcatggagaatccaggcctttggatcttgggttgccacaacagtgattttcgcaatcggggaatgactgctctcctcaaagtcagcagctgtgattggaacacaggcgactattacgaagattcttacgaggacataagtgcctactttgactccaagaataacgccattgagcccagatcattctcccagaatcctcccgtgcttaaaaggcatcagcgcgaaggtaccagaactactcttcagtctgatcaagaggagattgactatgacgacaccattagcgtggaaatgaagaaggaggatttcgatatctatgacgaagatgagaaccagtctccgcggagctttcagaagaagacgcgacactacttcattgcagcagtcgaaaggctttgggactacggtatgtcatcatcccctcatgtgttgcgcaatagagctcagagtggaagtgttccacagttcaagaaagtcgtctttcaagagtttacagatggcagcttcacacagcctctctatcggggcgagcttaacgaacatttgggactccttggtccctatatccgagccgaagtggaggacaacattatggttacctttaggaatcaagcctctcgcccctacagcttctactcctccctcatcagttatgaggaggatcagagacaaggcgctgaaccacggaagaactttgtgaaaccgaatgagacgaagacctacttctggaaagtacagcaccacatggcccccacaaaagacgaattcgattgcaaagcatgggcgtatttttcagacgttgacttggagaaagatgtacattcaggacttattggtcctttgttggtgtgtcacactaacactctcaatccagcccatggcaggcaggtgacagtccaggaattcgctcttttctttaccatctttgatgagaccaagtcctggtacttcacggaaaacatggagcgcaattgcagagccccctgtaacatacagatggaggaccctacctttaaggaaaattatcggttccacgcaatcaacggatacattatggatacactccctggccttgtgatggctcaggaccaacgaatcaggtggtacctcctcagcatgggttctaatgagaacatacactccattcacttttcaggacatgtgttcactgtccggaagaaagaagagtataagatggccctctacaatttgtatccaggcgtgtttgagaccgttgaaatgcttccctctaaagctggcatctggagagtagagtgcttgatcggagaacatcttcacgcaggtatgagcaccttgttcctcgtgtacagcaacaaatgtcagaatccacttggcatggccagtggacacattcgcgactttcagatcacagcatctggccagtatggacaatgggccccaaagttggctcgcctccattactccggtagcataaatgcgtggtccactaaagaacctttcagctggattaaggtcgatcttcttgcccccatgatcatccacggcattaagacacagggagcgaggcagaaattctcctccctctacatctcacagttcattattatgtatagtttggacggcaagaagtggcaaacttatagaggtaacagtactggaacagacatggtgttcttcggcaacgttgatagctctggcatcaaacacaacatctttaatcctcccataatagctcggtacatcagattgcatccgacccactacagcattaggagtacactccgaatggagcttatgggttgcgacttgaattcctgttcaatgccactcggaatggagtctaaagccatctctgatgcacagataaccgccagtagctactttacgaacatgtttgctacgtggtcaccctctaaggcaaggcttcatttgcaaggccggtctaatgcctggagacctcaggtgaacaacccgaaagaatggctccaggtggactttcagaagaccatgaaagtaacaggtgtcactactcagggagttaagtccttggatactagcatgtatgtgaaggagttccttatttcctcatcacaagatggccaccagtggaccctcttctttcagaatggtaaggtcaaagtgtttcagggcaatcaagacagcttcacacccgtggtgaacagtcttgatcctccactcttgacacgataccttcgaatccatccacagtcttgggagcaccagattgcattgcgcatggaagtacttggatgcgaggctcaggacctctac

SEQ ID NO: 1446 - protein, 1457 aa, synthetic construct
  REGION 1..1457: note = Variant of human B-domain deleted Factor VIII
MQIELSTCFFLCLLRFCFSATRRYYLGAVELSWDYMQSDLGELPVDARFPPRVPKSFPFNTSQVYKKTLFVEFTDHLFNIAKPRPPWMGLLGPTIQAEVYDTVVITLKNMASHPVSLHAVGVSYWKASEGAEYDDQTSQREKEDDKVFPGGSHTYVWQVLKENGPMASDPPCLTYSYLSHVDLVKDLNSGLIGALLVCREGSLAKEKTQTLHKFILLFAVFDEGKSWHSETKNSLMQDRDAASARAWPKMHTVNGYVNRTLPGLIGCHRKSVYWHVIGMGTTPEVHSIFLEGHTFLVRNHRQASLGISPITFLTAQTLLMDLGQFLLFCHIPSHQHDGMEAYVKVDSCPEEPQLRMKNNEEAEDYDDDLTDSEMDVVRFDDDNSPSIIQARSGAKKHPKTWVHYIAAEEEDWDYAPLVLAPDDRSYKSQYLNNGPQRIGRKYKKVRFMAYTDETFKTREAIQHESGILGPLLYGEVGDTLLIIFKNQASRPYNIYPHGITDVRPLYSRRLPKGVKHLKDFPILPGEIFKYKWTVTPEDGPTKSDPRCLTRYYSSFVNMERDLASGLIGPLLICYKESVDQRGNQIMSDKRNVILFSVFDENRSWYLTENIQRFLPNPAGVQDEDPEFQASNIMHSINGYVFDSLQLSVCLHEVAYWYILSIGAQTDFLSVFFSGYTFKHKAVYEDTLTLFPFSGETVFMSMENPGLWILGCHNSDFRNRGMTALLKVSSCDWNTGDYYEDSYEDISAYFDSKNNAIEPRSFSQNPPVLKRHQREGTRTTLQSDQEEIDYDDTISVEMKKEDFDIYDEDENQSPRSFQKKTRHYFIAAVERLWDYGMSSSPHVLRNRAQSGSVPQFKKVVFQEFTDGSFTQPLYRGELNEHLGLLGPYIRAEVEDNIMVTFRNQASRPYSFYSSLISYEEDQRQGAEPRKNFVKPNETKTYFWKVQHHMAPTKDEFDCKAWAYFSDVDLEKDVHSGLIGPLLVCHTNTLNPAHGRQVTVQEFALFFTIFDETKSWYFTENMERNCRAPCNIQMEDPTFKENYRFHAINGYIMDTLPGLVMAQDQRIRWYLLSMGSNENIHSIHFSGHVFTVRKKEEYKMALYNLYPGVFETVEMLPSKAGIWRVECLIGEHLHAGMSTLFLVYSNKCQNPLGMASGHIRDFQITASGQYGQWAPKLARLHYSGSINAWSTKEPFSWIKVDLLAPMIIHGIKTQGARQKFSSLYISQFIIMYSLDGKKWQTYRGNSTGTDMVFFGNVDSSGIKHNIFNPPIIARYIRLHPTHYSIRSTLRMELMGCDLNSCSMPLGMESKAISDAQITASSYFTNMFATWSPSKARLHLQGRSNAWRPQVNNPKEWLQVDFQKTMKVTGVTTQGVKSLDTSMYVKEFLISSSQDGHQWTLFFQNGKVKVFQGNQDSFTPVVNSLDPPLLTRYLRIHPQSWEHQIALRMEVLGCEAQDLY

SEQ ID NO: 1447 - DNA, 4371 bp, synthetic construct
  misc_feature 1..4371: note = Variant of human B-domain deleted Factor VIII
  source 1..4371: mol_type = other DNA
atgcagattgaactgtctacctgcttcttcctctgtttgctgaggttctgctttagcgccactagacggtactaccttggcgctgtggagctgtcctgggactatatgcagagtgatttgggagagcttcccgtcgacgcacgatttcctcctcgcgttccaaagtcatttccctttaacacaagccaggtgtacaagaagacgctcttcgtcgaattcaccgatcacctgttcaatatcgccaaacccagaccaccatggatgggtcttttggggcctaccatacaagcggaggtgtatgacacagttgttatcactctcaagaacatggcttctcatccggtaagtcttcacgcagtgggcgtgtcctactggaaagcttcagaaggagccgagtatgatgatcagacatcccagagggagaaagaagacgacaaggtatttccaggtgggtctcatacctatgtgtggcaagtgctcaaagagaatggccctatggcaagcgatccgccgtgtttgacttacagctacctttcacacgttgacctcgtcaaggacctcaactccgggttgattggagccttgttggtatgcagggaaggatctcttgccaaagagaagacacagaccctgcacaagtttatccttctctttgctgtgttcgatgagggcaaaagttggcatagcgaaacgaagaattccctcatgcaggatcgcgacgcagccagcgccagagcttggcccaagatgcacactgtgaacggatatgtcaataggacgcttcctggcttgattgggtgtcatcggaaaagtgtctactggcacgtgatcggaatggggacaacaccagaggtccactccatatttctcgaaggccataccttccttgttcgaaaccacagacaggcatccttggggatctctcccattacctttctcactgcccaaacgctccttatggacttgggtcagttccttctcttttgccatatcccgtcacaccagcatgatggtatggaagcttatgtgaaagtcgacagttgtcctgaggagccacagttgcgcatgaagaataatgaagaagccgaggattacgacgacgatctcaccgattctgagatggacgtggtgaggtttgatgacgacaactctccctccatcattcaagctcggagcggggcgaagaaacaccccaagacttgggtccactatatagcggcggaagaggaggattgggattacgctcctcttgtattggcaccagatgaccgctcatacaaaagccagtacctcaacaacggaccgcagagaattggccggaagtataagaaagtgcgatttatggcctatacagacgaaacctttaagacaagggaggccatccagcatgagagtgggattttgggacctcttctttacggcgaagttggtgataccctcctcatcatcttcaagaatcaagcttctcgcccctataacatttacccacacgggatcactgacgttaggcctttgtatagcagaagacttcccaaaggcgtgaagcatctcaaagacttccccattttgccaggcgagatctttaagtacaaatggaccgtcacagtggaagatggaccgactaaatcagaccctcgatgccttacgcggtactattcctccttcgtgaatatggagagagatttggcaagcggactcataggaccactcctcatctgttacaaggaatctgtagaccagaggggtaaccagattatgagtgataaacgcaatgtgatcctttttagcgtcttcgacgagaaccggtcctggtacttgaccgagaatatacaaaggttccttcccaacccggcaggcgttcagctggaagaccctgagtttcaggccagcaatattatgcactcaatcaacggctatgtgtttgatagtctccagctttctgtttgcctccatgaagtagcctattggtacatcttgtcaattggtgctcaaacagacttcctctccgtcttcttctccggctacacctttaagcacaagatggtgtatgaggacactctcacactctttccattttctggagaaaccgtgttcatgagcatggagaatccaggcctttggatcttgggttgccacaacagtgattttcgcaatcggggaatgactgctctcctcaaagtcagcagctgtgataagaacacaggcgactattacgaagattcttacgaggacataagtgcctactttgactccaagaataacgccattgagcccagatcattctcccagaatcctcccgtgcttaaaaggcatcagcgcgaaggtaccagaactactcttcagtctgatcaagaggagattgactatgacgacaccattagcgtggaaatgaagaaggaggatttcgatatctatgacgaagatgagaaccagtctccgcggagctttcagaagaagacgcgacactacttcattgcagcagtcgaaaggctttgggactacggtatgtcatcatcccctcatgtgttgcgcaatagagctcagagtggaagtgttccacagttcaagaaagtcgtctttcaagagtttacagatggcagcttcacacagcctctctatcggggcgagcttaacgaacatttgggactccttggtccctatatccgagccgaagtggaggacaacattatggttacctttaggaatcaagcctctcgcccctacagcttctactcctccctcatcagttatgaggaggatcagagacaaggcgctgaaccacggaagaactttgtgaaaccgaatgagacgaagacctacttctggaaagtacagcaccacatggcccccacaaaagacgaattcgattgcaaagcatgggcgtatttttcagacgttgacttggagaaagatgtacattcaggacttattggtcctttgttggtgtgtcacactaacactctcaatccagcccatggcaggcaggtgacagtccaggaattcgctcttttctttaccatctttgatgagaccaagtcctggtacttcacggaaaacatggagcgcaattgcagagccccctgtaacatacagatggaggaccctacctttaaggaaaattatcggttccacgcaatcaacggatacattatggatacactccctggccttgtgatggctcaggaccaacgaatcaggtggtacctcctcagcatgggttctaatgagaacatacactccattcacttttcaggacatgtgttcactgtccggaagaaagaagagtataagatggccctctacaatttgtatccaggcgtgtttgagaccgttgaaatgcttccctctaaagctggcatctggagagtagagtgcttgatcggagaacatcttcacgcaggtatgagcaccttgttcctcgtgtacagcaacaaatgtcagaatccacttggcatggccagtggacacattcgcgactttcagatcacagcatctggccagtatggacaatgggccccaaagttggctcgcctccattactccggtagcataaatgcgtggtccactaaagaacctttcagctggattaaggtcgatcttcttgcccccatgatcatccacggcattaagacacagggagcgaggcagaaattctcctccctctacatctcacagttcattattatgtatagtttggacggcaagaagtggcaaacttatagaggtaacagtactggaacagacatggtgttcttcggcaacgttgatagctctggcatcaaacacaacatctttaatcctcccataatagctcggtacatcagattgcatccgacccactacagcattaggagtacactccgaatggagcttatgggttgcgacttgaattcctgttcaatgccactcggaatggagtctaaagccatctctgatgcacagataaccgccagtagctactttacgaacatgtttgctacgtggtcaccctctaaggcaaggcttcatttgcaaggccggtctaatgcctggagacctcaggtgaacaacccgaaagaatggctccaggtggactttcagaagaccatgaaagtaacaggtgtcactactcagggagttaagtccttggatactagcatgtatgtgaaggagttccttatttcctcatcacaagatggccaccagtggaccctcttctttcagaatggtaaggtcaaagtgtttcagggcaatcaagacagcttcacacccgtggtgaacagtcttgatcctccactcttgacacgataccttcgaatccatccacagtcttgggagcaccagattgcattgcgcatggaagtacttggatgcgaggctcaggacctctac

SEQ ID NO: 1448 - protein, 1457 aa, synthetic construct
  REGION 1..1457: note = Variant of human B-domain deleted Factor VIII
MQIELSTCFFLCLLRFCFSATRRYYLGAVELSWDYMQSDLGELPVDARFPPRVPKSFPFNTSQVYKKTLFVEFTDHLFNIAKPRPPWMGLLGPTIQAEVYDTVVITLKNMASHPVSLHAVGVSYWKASEGAEYDDQTSQREKEDDKVFPGGSHTYVWQVLKENGPMASDPPCLTYSYLSHVDLVKDLNSGLIGALLVCREGSLAKEKTQTLHKFILLFAVFDEGKSWHSETKNSLMQDRDAASARAWPKMHTVNGYVNRTLPGLIGCHRKSVYWHVIGMGTTPEVHSIFLEGHTFLVRNHRQASLGISPITFLTAQTLLMDLGQFLLFCHIPSHQHDGMEAYVKVDSCPEEPQLRMKNNEEAEDYDDDLTDSEMDVVRFDDDNSPSIIQARSGAKKHPKTWVHYIAAEEEDWDYAPLVLAPDDRSYKSQYLNNGPQRIGRKYKKVRFMAYTDETFKTREAIQHESGILGPLLYGEVGDTLLIIFKNQASRPYNIYPHGITDVRPLYSRRLPKGVKHLKDFPILPGEIFKYKWTVTVEDGPTKSDPRCLTRYYSSFVNMERDLASGLIGPLLICYKESVDQRGNQIMSDKRNVILFSVFDENRSWYLTENIQRFLPNPAGVQLEDPEFQASNIMHSINGYVFDSLQLSVCLHEVAYWYILSIGAQTDFLSVFFSGYTFKHKMVYEDTLTLFPFSGETVFMSMENPGLWILGCHNSDFRNRGMTALLKVSSCDKNTGDYYEDSYEDISAYFDSKNNAIEPRSFSQNPPVLKRHQREGTRTTLQSDQEEIDYDDTISVEMKKEDFDIYDEDENQSPRSFQKKTRHYFIAAVERLWDYGMSSSPHVLRNRAQSGSVPQFKKVVFQEFTDGSFTQPLYRGELNEHLGLLGPYIRAEVEDNIMVTFRNQASRPYSFYSSLISYEEDQRQGAEPRKNFVKPNETKTYFWKVQHHMAPTKDEFDCKAWAYFSDVDLEKDVHSGLIGPLLVCHTNTLNPAHGRQVTVQEFALFFTIFDETKSWYFTENMERNCRAPCNIQMEDPTFKENYRFHAINGYIMDTLPGLVMAQDQRIRWYLLSMGSNENIHSIHFSGHVFTVRKKEEYKMALYNLYPGVFETVEMLPSKAGIWRVECLIGEHLHAGMSTLFLVYSNKCQNPLGMASGHIRDFQITASGQYGQWAPKLARLHYSGSINAWSTKEPFSWIKVDLLAPMIIHGIKTQGARQKFSSLYISQFIIMYSLDGKKWQTYRGNSTGTDMVFFGNVDSSGIKHNIFNPPIIARYIRLHPTHYSIRSTLRMELMGCDLNSCSMPLGMESKAISDAQITASSYFTNMFATWSPSKARLHLQGRSNAWRPQVNNPKEWLQVDFQKTMKVTGVTTQGVKSLDTSMYVKEFLISSSQDGHQWTLFFQNGKVKVFQGNQDSFTPVVNSLDPPLLTRYLRIHPQSWEHQIALRMEVLGCEAQDLY

SEQ ID NO: 1449 - DNA, 4371 bp, synthetic construct
  misc_feature 1..4371: note = Variant of human B-domain deleted Factor VIII
  source 1..4371: mol_type = other DNA
atgcagattgaactgtctacctgcttcttcctctgtttgctgaggttctgctttagcgccactagacggtactaccttggcgctgtggagctgtcctgggactatatgcagagtgatttgggagagcttcccgtcgacgcacgatttcctcctcgcgttccaaagtcatttccctttaacacaagccaggtgtacaagaagacgctcttcgtcgaattcaccgatcacctgttcaatatcgccaaacccagaccaccatggatgggtcttttggggcctaccatacaagcggaggtgtatgacacagttgttatcactctcaagaacatggcttctcatccggtaagtcttcacgcagtgggcgtgtcctactggaaagcttcagaaggagccgagtatgatgatcagacatcccagagggagaaagaagacgacaaggtatttccaggtgggtctcatacctatgtgtggcaagtgctcaaagagaatggccctatggcaagcgatccgccgtgtttgacttacagctacctttcacacgttgacctcgtcaaggacctcaactccgggttgattggagccttgttggtatgcagggaaggatctcttgccaaagagaagacacagaccctggccaagtttatccttctctttgctgtgttcgatgagggcaaaagttggcatagcgaaacgaagaattccctcatgcaggatcgcgacgcagccagcgccagagcttggcccaagatgcacactgtgaacggatatgtcaataggacgcttcctggcttgattgggtgtcatcggaaaagtgtctactggcacgtgatcggaatggggacaacaccagaggtccactccatatttctcgaaggccataccttccttgttcgaaaccacagacaggcatccttggggatctctcccattacctttctcactgcccaaacgctccttcaagacttgggtcagttccttctcttttgccatatcccgtcacaccagcatgatggtatggaagcttatgtgaaagtcgacagttgtcctgaggagccacagttgcgcatgaagaataatgaagaagccgaggattacgacgacgatctcaccgattctgagatggacgtggtgaggtttgatgacgacaactctccctccatcattcaagctcggagcggggcgaagaaacaccccaagacttgggtccactatatagcggcggaagaggaggattgggattacgctcctcttgtattggcaccagatgaccgctcatacaaaagccagtacctcaacaacggaccgcagagaattggccggaagtataagaaagtgcgatttatggcctatacagacgaaacctttaagacaagggaggccatccagcatgagagtgggattttgggacctcttctttacggcgaagttggtgataccctcctcatcatcttcaagaatcaagcttctcgcccctataacatttacccacacgggatcactgacgttaggcctttgtatagcagaagacttcccaaaggcgtgaagcatctcaaagacttccccattttgccaggcgagatctttaagtacaaatggcgcgttacagtggaagatggaccgactaaatcagaccctcgatgccttacgcggtactattcctccttcgtgaatatggagagagatttggcaagcggactcataggaccactcctcatctgttacaaggaatctgtagaccagaggggtaaccagattatgagtgataaacgcaatgtgatcctttttagcgtcttcgacgagaaccggtcctggtacttgaccgagaatatacaaaggttccttcccaacgaagcaggggttcagttggaagaccctgagtttcaggccagcaatattatgcactcaatcaacggctatgtgtttgatagtctccagctttctgtttgcctccatgaagtagcctattggtacatcttgtcaattggtgctcaaacagacttcctctccgtcttcttctccggctacacctttaagcacaagggcgtgtatgaggacactctcacactctttccattttctggagaaaccgtgttcatgagcatggagaatccaggcctttggatcttgggttgccacaacagtgattttcgcaatcggggaatgactgctctcctcaaagtcagcagctgtgattggaacacaggcgactattacgaagattcttacgaggacataagtgcctactttgactccaagaataacgccattgagcccagatcattctcccagaatcctcccgtgcttaaaaggcatcagcgcgaaggtaccagaactactcttcagtctgatcaagaggagattgactatgacgacaccattagcgtggaaatgaagaaggaggatttcgatatctatgacgaagatgagaaccagtctccgcggagctttcagaagaagacgcgacactacttcattgcagcagtcgaaaggctttgggactacggtatgtcatcatcccctcatgtgttgcgcaatagagctcagagtggaagtgttccacagttcaagaaagtcgtctttcaagagtttacagatggcagcttcacacagcctctctatcggggcgagcttaacgaacatttgggactccttggtccctatatccgagccgaagtggaggacaacattatggttacctttaggaatcaagcctctcgcccctacagcttctactcctccctcatcagttatgaggaggatcagagacaaggcgctgaaccacggaagaactttgtgaaaccgaatgagacgaagacctacttctggaaagtacagcaccacatggcccccacaaaagacgaattcgattgcaaagcatgggcgtatttttcagacgttgacttggagaaagatgtacattcaggacttattggtcctttgttggtgtgtcacactaacactctcaatccagcccatggcaggcaggtgacagtccaggaattcgctcttttctttaccatctttgatgagaccaagtcctggtacttcacggaaaacatggagcgcaattgcagagccccctgtaacatacagatggaggaccctacctttaaggaaaattatcggttccacgcaatcaacggatacattatggatacactccctggccttgtgatggctcaggaccaacgaatcaggtggtacctcctcagcatgggttctaatgagaacatacactccattcacttttcaggacatgtgttcactgtccggaagaaagaagagtataagatggccctctacaatttgtatccaggcgtgtttgagaccgttgaaatgcttccctctaaagctggcatctggagagtagagtgcttgatcggagaacatcttcacgcaggtatgagcaccttgttcctcgtgtacagcaacaaatgtcagaatccacttggcatggccagtggacacattcgcgactttcagatcacagcatctggccagtatggacaatgggccccaaagttggctcgcctccattactccggtagcataaatgcgtggtccactaaagaacctttcagctggattaaggtcgatcttcttgcccccatgatcatccacggcattaagacacagggagcgaggcagaaattctcctccctctacatctcacagttcattattatgtatagtttggacggcaagaagtggcaaacttatagaggtaacagtactggaacagacatggtgttcttcggcaacgttgatagctctggcatcaaacacaacatctttaatcctcccataatagctcggtacatcagattgcatccgacccactacagcattaggagtacactccgaatggagcttatgggttgcgacttgaattcctgttcaatgccactcggaatggagtctaaagccatctctgatgcacagataaccgccagtagctactttacgaacatgtttgctacgtggtcaccctctaaggcaaggcttcatttgcaaggccggtctaatgcctggagacctcaggtgaacaacccgaaagaatggctccaggtggactttcagaagaccatgaaagtaacaggtgtcactactcagggagttaagtccttggatactagcatgtatgtgaaggagttccttatttcctcatcacaagatggccaccagtggaccctcttctttcagaatggtaaggtcaaagtgtttcagggcaatcaagacagcttcacacccgtggtgaacagtcttgatcctccactcttgacacgataccttcgaatccatccacagtcttgggagcaccagattgcattgcgcatggaagtacttggatgcgaggctcaggacctctac

SEQ ID NO: 1450 - protein, 1457 aa, synthetic construct
  REGION 1..1457: note = Variant of human B-domain deleted Factor VIII
MQIELSTCFFLCLLRFCFSATRRYYLGAVELSWDYMQSDLGELPVDARFPPRVPKSFPFNTSQVYKKTLFVEFTDHLFNIAKPRPPWMGLLGPTIQAEVYDTVVITLKNMASHPVSLHAVGVSYWKASEGAEYDDQTSQREKEDDKVFPGGSHTYVWQVLKENGPMASDPPCLTYSYLSHVDLVKDLNSGLIGALLVCREGSLAKEKTQTLAKFILLFAVFDEGKSWHSETKNSLMQDRDAASARAWPKMHTVNGYVNRTLPGLIGCHRKSVYWHVIGMGTTPEVHSIFLEGHTFLVRNHRQASLGISPITFLTAQTLLQDLGQFLLFCHIPSHQHDGMEAYVKVDSCPEEPQLRMKNNEEAEDYDDDLTDSEMDVVRFDDDNSPSIIQARSGAKKHPKTWVHYIAAEEEDWDYAPLVLAPDDRSYKSQYLNNGPQRIGRKYKKVRFMAYTDETFKTREAIQHESGILGPLLYGEVGDTLLIIFKNQASRPYNIYPHGITDVRPLYSRRLPKGVKHLKDFPILPGEIFKYKWRVTVEDGPTKSDPRCLTRYYSSFVNMERDLASGLIGPLLICYKESVDQRGNQIMSDKRNVILFSVFDENRSWYLTENIQRFLPNEAGVQLEDPEFQASNIMHSINGYVFDSLQLSVCLHEVAYWYILSIGAQTDFLSVFFSGYTFKHKGVYEDTLTLFPFSGETVFMSMENPGLWILGCHNSDFRNRGMTALLKVSSCDWNTGDYYEDSYEDISAYFDSKNNAIEPRSFSQNPPVLKRHQREGTRTTLQSDQEEIDYDDTISVEMKKEDFDIYDEDENQSPRSFQKKTRHYFIAAVERLWDYGMSSSPHVLRNRAQSGSVPQFKKVVFQEFTDGSFTQPLYRGELNEHLGLLGPYIRAEVEDNIMVTFRNQASRPYSFYSSLISYEEDQRQGAEPRKNFVKPNETKTYFWKVQHHMAPTKDEFDCKAWAYFSDVDLEKDVHSGLIGPLLVCHTNTLNPAHGRQVTVQEFALFFTIFDETKSWYFTENMERNCRAPCNIQMEDPTFKENYRFHAINGYIMDTLPGLVMAQDQRIRWYLLSMGSNENIHSIHFSGHVFTVRKKEEYKMALYNLYPGVFETVEMLPSKAGIWRVECLIGEHLHAGMSTLFLVYSNKCQNPLGMASGHIRDFQITASGQYGQWAPKLARLHYSGSINAWSTKEPFSWIKVDLLAPMIIHGIKTQGARQKFSSLYISQFIIMYSLDGKKWQTYRGNSTGTDMVFFGNVDSSGIKHNIFNPPIIARYIRLHPTHYSIRSTLRMELMGCDLNSCSMPLGMESKAISDAQITASSYFTNMFATWSPSKARLHLQGRSNAWRPQVNNPKEWLQVDFQKTMKVTGVTTQGVKSLDTSMYVKEFLISSSQDGHQWTLFFQNGKVKVFQGNQDSFTPVVNSLDPPLLTRYLRIHPQSWEHQIALRMEVLGCEAQDLY

SEQ ID NO: 1451 - DNA, 4371 bp, synthetic construct
  misc_feature 1..4371: note = Variant of human B-domain deleted Factor VIII
  source 1..4371: mol_type = other DNA
atgcagattgaactgtctacctgcttcttcctctgtttgctgaggttctgctttagcgccactagacggtactaccttggcgctgtggagctgtcctgggactatatgcagagtgatttgggagagcttcccgtcgacgcacgatttcctcctcgcgttccaaagtcatttccctttaacacaagccaggtgtacaagaagacgctcttcgtcgaattcaccgatcacctgttcaatatcgccaaacccagaccaccatggatgggtcttttggggcctaccatacaagcggaggtgtatgacacagttgttatcactctcaagaacatggcttctcatccggtaagtcttcacgcagtgggcgtgtcctactggaaagcttcagaaggagccgagtatgatgatcagacatcccagagggagaaagaagacgacaaggtatttccaggtgggtctcatacctatgtgtggcaagtgctcaaagagaatggccctatggcaagcgatccgccgtgtttgacttacagctacctttcacacgttgacctcgtcaaggacctcaactccgggttgattggagccttgttggtatgcagggaaggatctcttgccaaagagaagacacagaccaaacacaagtttatccttctctttgctgtgttcgatgagggcaaaagttggcatagcgaaacgaagaattccctcatgcaggatcgcgacgcagccagcgccagagcttggcccaagatgcacactgtgaacggatatgtcaataggacgcttcctggcttgattgggtgtcatcggaaaagtgtctactggcacgtgatcggaatggggacaacaccagaggtccactccatatttctcgaaggccataccttccttgttcgaaaccacagacaggcatccttggggatctctcccattaccctgctcactgcccaaacgctccttatggacttgggtcagttccttctcttttgccatatcccgtcacaccagcatgatggtatggaagcttatgtgaaagtcgacagttgtcctgaggagccacagttgcgcatgaagaataatgaagaagccgaggattacgacgacgatctcaccgattctgagatggacgtggtgaggtttgatgacgacaactctccctccatcattcaagctcggagcggggcgaagaaacaccccaagacttgggtccactatatagcggcggaagaggaggattgggattacgctcctcttgtattggcaccagatgaccgctcatacaaaagccagtacctcaacaacggaccgcagagaattggccggaagtataagaaagtgcgatttatggcctatacagacgaaacctttaagacaagggaggccatccagcatgagagtgggattttgggacctcttctttacggcgaagttggtgataccctcctcatcatcttcaagaatcaagcttctcgcccctataacatttacccacacgggatcactgacgttaggcctttgtatagcagaagacttcccaaaggcgtgaagcatctcaaagacttccccattttgccaggcgagatctttaagtacaaatggcgcattacagtggaagatggaccgactaaatcagaccctcgatgccttacgcggtactattcctccttcgtgaatatggagagagatttggcaagcggactcataggaccactcctcatctgttacaaggaatctgtagaccagaggggtaaccagattatgagtgataaacgcaatgtgatcctttttagcgtcttcgacgagaaccggtcctggtacttgaccgagaatatacaaaggttccttcccaacgacgcagaggttcagttggaagaccctgagtttcaggccagcaatattatgcactcaatcaacggctatgtgtttgatagtctccagctttctgtttgcctccatgaagtagcctattggtacatcttgtcaattggtgctcaaacagacttcctctccgtcttcttctccggctacacctttaagcacaagaacgtgtatgaggacactctcacactctttccattttctggagaaaccgtgttcatgagcatggagaatccaggcctttggatcttgggttgccacaacagtgattttcgcaatcggggaatgactgctctcctcaaagtcagcagctgtgattggaacacaggcgactattacgaagattcttacgaggacataagtgcctactttgactccaagaataacgccattgagcccagatcattctcccagaatcctcccgtgcttaaaaggcatcagcgcgaaggtaccagaactactcttcagtctgatcaagaggagattgactatgacgacaccattagcgtggaaatgaagaaggaggatttcgatatctatgacgaagatgagaaccagtctccgcggagctttcagaagaagacgcgacactacttcattgcagcagtcgaaaggctttgggactacggtatgtcatcaaaacctcatgtgttgcgcaatagagctcagagtggaagtgttccacagttcaagaaagtcgtctttcaagagtttacagatggcagcttcacacagcctctctatcggggcgagcttaacgaacatttgggactccttggtccctatatccgagccgaagtggaggacaacattatggttacctttaggaatcaagcctctcgcccctacagcttctactcctccctcatcagttatgaggaggatcagagacaaggcgctgaaccacggaagaactttgtgaaaccgaatgagacgaagacctacttctggaaagtacagcaccacatggcccccacaaaagacgaattcgattgcaaagcatgggcgtatttttcagacgttgacttggagaaagatgtacattcaggacttattggtcctttgttggtgtgtcacactaacactctcaatccagcccatggcaggcaggtgacagtccaggaattcgctcttttctttaccatctttgatgagaccaagtcctggtacttcacggaaaacatggagcgcaattgcagagccccctgtaacatacagatggaggaccctacctttaaggaaaattatcggttccacgcaatcaacggatacattatggatacactccctggccttgtgatggctcaggaccaacgaatcaggtggtacctcctcagcatgggttctaatgagaacatacactccattcacttttcaggacatgtgttcactgtccggaagaaagaagagtataagatggccctctacaatttgtatccaggcgtgtttgagaccgttgaaatgcttccctctaaagctggcatctggagagtagagtgcttgatcggagaacatcttcacgcaggtatgagcaccttgttcctcgtgtacagcaacaaatgtcagaatccacttggcatggccagtggacacattcgcgactttcagatcacagcatctggccagtatggacaatgggccccaaagttggctcgcctccattactccggtagcataaatgcgtggtccactaaagaacctttcagctggattaaggtcgatcttcttgcccccatgatcatccacggcattaagacacagggagcgaggcagaaattctcctccctctacatctcacagttcattattatgtatagtttggacggcaagaagtggcaaacttatagaggtaacagtactggaacagacatggtgttcttcggcaacgttgatagctctggcatcaaacacaacatctttaatcctcccataatagctcggtacatcagattgcatccgacccactacagcattaggagtacactccgaatggagcttatgggttgcgacttgaattcctgttcaatgccactcggaatggagtctaaagccatctctgatgcacagataaccgccagtagctactttacgaacatgtttgctacgtggtcaccctctaaggcaaggcttcatttgcaaggccggtctaatgcctggagacctcaggtgaacaacccgaaagaatggctccaggtggactttcagaagaccatgaaagtaacaggtgtcactactcagggagttaagtccttggatactagcatgtatgtgaaggagttccttatttcctcatcacaagatggccaccagtggaccctcttctttcagaatggtaaggtcaaagtgtttcagggcaatcaagacagcttcacacccgtggtgaacagtcttgatcctccactcttgacacgataccttcgaatccatccacagtcttgggagcaccagattgcattgcgcatggaagtacttggatgcgaggctcaggacctctac

SEQ ID NO: 1452 - protein, 1457 aa, synthetic construct
  REGION 1..1457: note = Variant of human B-domain deleted Factor VIII
MQIELSTCFFLCLLRFCFSATRRYYLGAVELSWDYMQSDLGELPVDARFPPRVPKSFPFNTSQVYKKTLFVEFTDHLFNIAKPRPPWMGLLGPTIQAEVYDTVVITLKNMASHPVSLHAVGVSYWKASEGAEYDDQTSQREKEDDKVFPGGSHTYVWQVLKENGPMASDPPCLTYSYLSHVDLVKDLNSGLIGALLVCREGSLAKEKTQTKHKFILLFAVFDEGKSWHSETKNSLMQDRDAASARAWPKMHTVNGYVNRTLPGLIGCHRKSVYWHVIGMGTTPEVHSIFLEGHTFLVRNHRQASLGISPITLLTAQTLLMDLGQFLLFCHIPSHQHDGMEAYVKVDSCPEEPQLRMKNNEEAEDYDDDLTDSEMDVVRFDDDNSPSIIQARSGAKKHPKTWVHYIAAEEEDWDYAPLVLAPDDRSYKSQYLNNGPQRIGRKYKKVRFMAYTDETFKTREAIQHESGILGPLLYGEVGDTLLIIFKNQASRPYNIYPHGITDVRPLYSRRLPKGVKHLKDFPILPGEIFKYKWRITVEDGPTKSDPRCLTRYYSSFVNMERDLASGLIGPLLICYKESVDQRGNQIMSDKRNVILFSVFDENRSWYLTENIQRFLPNDAEVQLEDPEFQASNIMHSINGYVFDSLQLSVCLHEVAYWYILSIGAQTDFLSVFFSGYTFKHKNVYEDTLTLFPFSGETVFMSMENPGLWILGCHNSDFRNRGMTALLKVSSCDWNTGDYYEDSYEDISAYFDSKNNAIEPRSFSQNPPVLKRHQREGTRTTLQSDQEEIDYDDTISVEMKKEDFDIYDEDENQSPRSFQKKTRHYFIAAVERLWDYGMSSKPHVLRNRAQSGSVPQFKKVVFQEFTDGSFTQPLYRGELNEHLGLLGPYIRAEVEDNIMVTFRNQASRPYSFYSSLISYEEDQRQGAEPRKNFVKPNETKTYFWKVQHHMAPTKDEFDCKAWAYFSDVDLEKDVHSGLIGPLLVCHTNTLNPAHGRQVTVQEFALFFTIFDETKSWYFTENMERNCRAPCNIQMEDPTFKENYRFHAINGYIMDTLPGLVMAQDQRIRWYLLSMGSNENIHSIHFSGHVFTVRKKEEYKMALYNLYPGVFETVEMLPSKAGIWRVECLIGEHLHAGMSTLFLVYSNKCQNPLGMASGHIRDFQITASGQYGQWAPKLARLHYSGSINAWSTKEPFSWIKVDLLAPMIIHGIKTQGARQKFSSLYISQFIIMYSLDGKKWQTYRGNSTGTDMVFFGNVDSSGIKHNIFNPPIIARYIRLHPTHYSIRSTLRMELMGCDLNSCSMPLGMESKAISDAQITASSYFTNMFATWSPSKARLHLQGRSNAWRPQVNNPKEWLQVDFQKTMKVTGVTTQGVKSLDTSMYVKEFLISSSQDGHQWTLFFQNGKVKVFQGNQDSFTPVVNSLDPPLLTRYLRIHPQSWEHQIALRMEVLGCEAQDLY

SEQ ID NO: 1453 - DNA, 4371 bp, synthetic construct
  misc_feature 1..4371: note = Variant of human B-domain deleted Factor VIII
  source 1..4371: mol_type = other DNA
atgcagattgaactgtctacctgcttcttcctctgtttgctgaggttctgctttagcgccactagacggtactaccttggcgctgtggagctgtcctgggactatatgcagagtgatttgggagagcttcccgtcgacgcacgatttcctcctcgcgttccaaagtcatttccctttaacacaagccaggtgtacaagaagacgctcttcgtcgaattcaccgatcacctgttcaatatcgccaaacccagaccaccatggatgggtcttttggggcctaccatacaagcggaggtgtatgacacagttgttatcactctcaagaacatggcttctcatccggtaagtcttcacgcagtgggcgtgtcctactggaaagcttcagaaggagccgagtatgatgatcagacatcccagagggagaaagaagacgacaaggtatttccaggtgggtctcatacctatgtgtggcaagtgctcaaagagaatggccctatggcaagcgatccgccgtgtttgacttacagctacctttcacacgttgacctcgtcaaggacctcaactccgggttgattggagccttgttggtatgcagggaaggatctcttgccaaagagaagacacagaccctggccaagtttatccttctctttgctgtgttcgatgagggcaaaagttggcatagcgaaacgaagaattccctcatgcaggatcgcgacgcagccagcgccagagcttggcccaagatgcacactgtgaacggatatgtcaataggacgcttcctggcttgattgggtgtcatcggaaaagtgtctactggcacgtgatcggaatggggacaacaccagaggtccactccatatttctcgaaggccataccttccttgttcgaaaccacagacaggcatccttggggatctctcccattacctttctcactgcccaaacgctccttatggacttgggtcagttccttctcttttgccatatcccgtcacaccagcatgatggtatggaagcttatgtgaaagtcgacagttgtcctgaggagccacagttgcgcatgaagaataatgaagaagccgaggattacgacgacgatctcaccgattctgagatggacgtggtgaggtttgatgacgacaactctccctccatcattcaagctcggagcggggcgaagaaacaccccaagacttgggtccactatatagcggcggaagaggaggattgggattacgctcctcttgtattggcaccagatgaccgctcatacaaaagccagtacctcaacaacggaccgcagagaattggccggaagtataagaaagtgcgatttatggcctatacagacgaaacctttaagacaagggaggccatccagcatgagagtgggattttgggacctcttctttacggcgaagttggtgataccctcctcatcatcttcaagaatcaagcttctcgcccctataacatttacccacacgggatcactgacgttaggcctttgtatagcagaagacttcccaaaggcgtgaagcatctcaaagacttccccattttgccaggcgagatctttaagtacaaatggaccgtcacagtggaagatggaccgactaaatcagaccctcgatgccttacgcggtactattcctccttcgtgaatatggagagagatttggcaagcggactcataggaccactcctcatctgttacaaggaatctgtagaccagaggggtaaccagattatgagtgataaacgcaatgtgatcctttttagcgtcttcgacgagaaccggtcctggtacttgaccgagaatatacaaaggttccttcccaaccccgcaggcgttcagttggaagaccctgagtttcaggccagcaatattatgcactcaatcaacggctatgtgtttgatagtctccagctttctgtttgcctccatgaagtagcctattggtacatcttgtcaattggtgctcaaacagacttcctctccgtcttcttctccggctacacctttaagcacaagatggtgtatgaggacactctcacactctttccattttctggagaaaccgtgttcatgagcatggagaatccaggcctttggatcttgggttgccacaacagtgattttcgcaatcggggaatgactgctctcctcaaagtcagcagctgtgattggaacacaggcgactattacgaagattcttacgaggacataagtgcctactttgactccaagaataacgccattgagcccagatcattctcccagaatcctcccgtgcttaaaaggcatcagcgcgaaggtaccagaactactcttcagtctgatcaagaggagattgactatgacgacaccattagcgtggaaatgaagaaggaggatttcgatatctatgacgaagatgagaaccagtctccgcggagctttcagaagaagacgcgacactacttcattgcagcagtcgaaaggctttgggactacggtatgtcatcatcccctcatgtgttgcgcaatagagctcagagtggaagtgttccacagttcaagaaagtcgtctttcaagagtttacagatggcagcttcacacagcctctctatcggggcgagcttaacgaacatttgggactccttggtccctatatccgagccgaagtggaggacaacattatggttacctttaggaatcaagcctctcgcccctacagcttctactcctccctcatcagttatgaggaggatcagagacaaggcgctgaaccacggaagaactttgtgaaaccgaatgagacgaagacctacttctggaaagtacagcaccacatggcccccacaaaagacgaattcgattgcaaagcatgggcgtatttttcagacgttgacttggagaaagatgtacattcaggacttattggtcctttgttggtgtgtcacactaacactctcaatccagcccatggcaggcaggtgacagtccaggaattcgctcttttctttaccatctttgatgagaccaagtcctggtacttcacggaaaacatggagcgcaattgcagagccccctgtaacatacagatggaggaccctacctttaaggaaaattatcggttccacgcaatcaacggatacattatggatacactccctggccttgtgatggctcaggaccaacgaatcaggtggtacctcctcagcatgggttctaatgagaacatacactccattcacttttcaggacatgtgttcactgtccggaagaaagaagagtataagatggccctctacaatttgtatccaggcgtgtttgagaccgttgaaatgcttccctctaaagctggcatctggagagtagagtgcttgatcggagaacatcttcacgcaggtatgagcaccttgttcctcgtgtacagcaacaaatgtcagaatccacttggcatggccagtggacacattcgcgactttcagatcacagcatctggccagtatggacaatgggccccaaagttggctcgcctccattactccggtagcataaatgcgtggtccactaaagaacctttcagctggattaaggtcgatcttcttgcccccatgatcatccacggcattaagacacagggagcgaggcagaaattctcctccctctacatctcacagttcattattatgtatagtttggacggcaagaagtggcaaacttatagaggtaacagtactggaacagacatggtgttcttcggcaacgttgatagctctggcatcaaacacaacatctttaatcctcccataatagctcggtacatcagattgcatccgacccactacagcattaggagtacactccgaatggagcttatgggttgcgacttgaattcctgttcaatgccactcggaatggagtctaaagccatctctgatgcacagataaccgccagtagctactttacgaacatgtttgctacgtggtcaccctctaaggcaaggcttcatttgcaaggccggtctaatgcctggagacctcaggtgaacaacccgaaagaatggctccaggtggactttcagaagaccatgaaagtaacaggtgtcactactcagggagttaagtccttggatactagcatgtatgtgaaggagttccttatttcctcatcacaagatggccaccagtggaccctcttctttcagaatggtaaggtcaaagtgtttcagggcaatcaagacagcttcacacccgtggtgaacagtcttgatcctccactcttgacacgataccttcgaatccatccacagtcttgggagcaccagattgcattgcgcatggaagtacttggatgcgaggctcaggacctctac

SEQ ID NO: 1454 - protein, 1457 aa, synthetic construct
  REGION 1..1457: note = Variant of human B-domain deleted Factor VIII
MQIELSTCFFLCLLRFCFSATRRYYLGAVELSWDYMQSDLGELPVDARFPPRVPKSFPFNTSQVYKKTLFVEFTDHLFNIAKPRPPWMGLLGPTIQAEVYDTVVITLKNMASHPVSLHAVGVSYWKASEGAEYDDQTSQREKEDDKVFPGGSHTYVWQVLKENGPMASDPPCLTYSYLSHVDLVKDLNSGLIGALLVCREGSLAKEKTQTLAKFILLFAVFDEGKSWHSETKNSLMQDRDAASARAWPKMHTVNGYVNRTLPGLIGCHRKSVYWHVIGMGTTPEVHSIFLEGHTFLVRNHRQASLGISPITFLTAQTLLMDLGQFLLFCHIPSHQHDGMEAYVKVDSCPEEPQLRMKNNEEAEDYDDDLTDSEMDVVRFDDDNSPSIIQARSGAKKHPKTWVHYIAAEEEDWDYAPLVLAPDDRSYKSQYLNNGPQRIGRKYKKVRFMAYTDETFKTREAIQHESGILGPLLYGEVGDTLLIIFKNQASRPYNIYPHGITDVRPLYSRRLPKGVKHLKDFPILPGEIFKYKWTVTVEDGPTKSDPRCLTRYYSSFVNMERDLASGLIGPLLICYKESVDQRGNQIMSDKRNVILFSVFDENRSWYLTENIQRFLPNPAGVQLEDPEFQASNIMHSINGYVFDSLQLSVCLHEVAYWYILSIGAQTDFLSVFFSGYTFKHKMVYEDTLTLFPFSGETVFMSMENPGLWILGCHNSDFRNRGMTALLKVSSCDWNTGDYYEDSYEDISAYFDSKNNAIEPRSFSQNPPVLKRHQREGTRTTLQSDQEEIDYDDTISVEMKKEDFDIYDEDENQSPRSFQKKTRHYFIAAVERLWDYGMSSSPHVLRNRAQSGSVPQFKKVVFQEFTDGSFTQPLYRGELNEHLGLLGPYIRAEVEDNIMVTFRNQASRPYSFYSSLISYEEDQRQGAEPRKNFVKPNETKTYFWKVQHHMAPTKDEFDCKAWAYFSDVDLEKDVHSGLIGPLLVCHTNTLNPAHGRQVTVQEFALFFTIFDETKSWYFTENMERNCRAPCNIQMEDPTFKENYRFHAINGYIMDTLPGLVMAQDQRIRWYLLSMGSNENIHSIHFSGHVFTVRKKEEYKMALYNLYPGVFETVEMLPSKAGIWRVECLIGEHLHAGMSTLFLVYSNKCQNPLGMASGHIRDFQITASGQYGQWAPKLARLHYSGSINAWSTKEPFSWIKVDLLAPMIIHGIKTQGARQKFSSLYISQFIIMYSLDGKKWQTYRGNSTGTDMVFFGNVDSSGIKHNIFNPPIIARYIRLHPTHYSIRSTLRMELMGCDLNSCSMPLGMESKAISDAQITASSYFTNMFATWSPSKARLHLQGRSNAWRPQVNNPKEWLQVDFQKTMKVTGVTTQGVKSLDTSMYVKEFLISSSQDGHQWTLFFQNGKVKVFQGNQDSFTPVVNSLDPPLLTRYLRIHPQSWEHQIALRMEVLGCEAQDLY

SEQ ID NO: 1455 - DNA, 4371 bp, synthetic construct
  misc_feature 1..4371: note = Variant of human B-domain deleted Factor VIII
  source 1..4371: mol_type = other DNA
atgcagattgaactgtctacctgcttcttcctctgtttgctgaggttctgctttagcgccactagacggtactaccttggcgctgtggagctgtcctgggactatatgcagagtgatttgggagagcttcccgtcgacgcacgatttcctcctcgcgttccaaagtcatttccctttaacacaagccaggtgtacaagaagacgctcttcgtcgaattcaccgatcacctgttcaatatcgccaaacccagaccaccatggatgggtcttttggggcctaccatacaagcggaggtgtatgacacagttgttatcactctcaagaacatggcttctcatccggtaagtcttcacgcagtgggcgtgtcctactggaaagcttcagaaggagccgagtatgatgatcagacatcccagagggagaaagaagacgacaaggtatttccaggtgggtctcatacctatgtgtggcaagtgctcaaagagaatggccctatggcaagcgatccgccgtgtttgacttacagctacctttcacacgttgacctcgtcaaggacctcaactccgggttgattggagccttgttggtatgcagggaaggatctcttgccaaagagaagacacagaccaaagccaagtttatccttctctttgctgtgttcgatgagggcaaaagttggcatagcgaaacgaagaattccctcatgcaggatcgcgacgcagccagcgccagagcttggcccaagatgcacactgtgaacggatatgtcaataggacgcttcctggcttgattgggtgtcatcggaaaagtgtctactggcacgtgatcggaatggggacaacaccagaggtccactccatatttctcgaaggccataccttccttgttcgaaaccacagacaggcatccttggggatctctcccattacctttctcactgcccaaacgctccttcaagacttgggtcagttccttctcttttgccatatcccgtcacaccagcatgatggtatggaagcttatgtgaaagtcgacagttgtcctgaggagccacagttgcgcatgaagaataatgaagaagccgaggattacgacgacgatctcaccgattctgagatggacgtggtgaggtttgatgacgacaactctccctccatcattcaagctcggagcggggcgaagaaacaccccaagacttgggtccactatatagcggcggaagaggaggattgggattacgctcctcttgtattggcaccagatgaccgctcatacaaaagccagtacctcaacaacggaccgcagagaattggccggaagtataagaaagtgcgatttatggcctatacagacgaaacctttaagacaagggaggccatccagcatgagagtgggattttgggacctcttctttacggcgaagttggtgataccctcctcatcatcttcaagaatcaagcttctcgcccctataacatttacccacacgggatcactgacgttaggcctttgtatagcagaagacttcccaaaggcgtgaagcatctcaaagacttccccattttgccaggcgagatctttaagtacaaatggaccgttacagtggaagatggaccgactaaatcagaccctcgatgccttacgcggtactattcctccttcgtgaatatggagagagatttggcaagcggactcataggaccactcctcatctgttacaaggaatctgtagaccagaggggtaaccagattatgagtgataaacgcaatgtgatcctttttagcgtcttcgacgagaaccggtcctggtacttgaccgagaatatacaaaggttccttcccaaccctgcagaggttcagttggaagaccctgagtttcaggccagcaatattatgcactcaatcaacggctatgtgtttgatagtctccagctttctgtttgcctccatgaagtagcctattggtacatcttgtcaattggtgctcaaacagacttcctctccgtcttcttctccggctacacctttaagcacaagggcgtgtatgaggacactctcacactctttccattttctggagaaaccgtgttcatgagcatggagaatccaggcctttggatcttgggttgccacaacagtgattttcgcaatcggggaatgactgctctcctcaaagtcagcagctgtgattggaacacaggcgactattacgaagattcttacgaggacataagtgcctactttgactccaagaataacgccattgagcccagatcattctcccagaatcctcccgtgcttaaaaggcatcagcgcgaaggtaccagaactactcttcagtctgatcaagaggagattgactatgacgacaccattagcgtggaaatgaagaaggaggatttcgatatctatgacgaagatgagaaccagtctccgcggagctttcagaagaagacgcgacactacttcattgcagcagtcgaaaggctttgggactacggtatgtcatcaaaacctcatgtgttgcgcaatagagctcagagtggaagtgttccacagttcaagaaagtcgtctttcaagagtttacagatggcagcttcacacagcctctctatcggggcgagcttaacgaacatttgggactccttggtccctatatccgagccgaagtggaggacaacattatggttacctttaggaatcaagcctctcgcccctacagcttctactcctccctcatcagttatgaggaggatcagagacaaggcgctgaaccacggaagaactttgtgaaaccgaatgagacgaagacctacttctggaaagtacagcaccacatggcccccacaaaagacgaattcgattgcaaagcatgggcgtatttttcagacgttgacttggagaaagatgtacattcaggacttattggtcctttgttggtgtgtcacactaacactctcaatccagcccatggcaggcaggtgacagtccaggaattcgctcttttctttaccatctttgatgagaccaagtcctggtacttcacggaaaacatggagcgcaattgcagagccccctgtaacatacagatggaggaccctacctttaaggaaaattatcggttccacgcaatcaacggatacattatggatacactccctggccttgtgatggctcaggaccaacgaatcaggtggtacctcctcagcatgggttctaatgagaacatacactccattcacttttcaggacatgtgttcactgtccggaagaaagaagagtataagatggccctctacaatttgtatccaggcgtgtttgagaccgttgaaatgcttccctctaaagctggcatctggagagtagagtgcttgatcggagaacatcttcacgcaggtatgagcaccttgttcctcgtgtacagcaacaaatgtcagaatccacttggcatggccagtggacacattcgcgactttcagatcacagcatctggccagtatggacaatgggccccaaagttggctcgcctccattactccggtagcataaatgcgtggtccactaaagaacctttcagctggattaaggtcgatcttcttgcccccatgatcatccacggcattaagacacagggagcgaggcagaaattctcctccctctacatctcacagttcattattatgtatagtttggacggcaagaagtggcaaacttatagaggtaacagtactggaacagacatggtgttcttcggcaacgttgatagctctggcatcaaacacaacatctttaatcctcccataatagctcggtacatcagattgcatccgacccactacagcattaggagtacactccgaatggagcttatgggttgcgacttgaattcctgttcaatgccactcggaatggagtctaaagccatctctgatgcacagataaccgccagtagctactttacgaacatgtttgctacgtggtcaccctctaaggcaaggcttcatttgcaaggccggtctaatgcctggagacctcaggtgaacaacccgaaagaatggctccaggtggactttcagaagaccatgaaagtaacaggtgtcactactcagggagttaagtccttggatactagcatgtatgtgaaggagttccttatttcctcatcacaagatggccaccagtggaccctcttctttcagaatggtaaggtcaaagtgtttcagggcaatcaagacagcttcacacccgtggtgaacagtcttgatcctccactcttgacacgataccttcgaatccatccacagtcttgggagcaccagattgcattgcgcatggaagtacttggatgcgaggctcaggacctctac

SEQ ID NO: 1456 - protein, 1457 aa, synthetic construct
  REGION 1..1457: note = Variant of human B-domain deleted Factor VIII
MQIELSTCFFLCLLRFCFSATRRYYLGAVELSWDYMQSDLGELPVDARFPPRVPKSFPFNTSQVYKKTLFVEFTDHLFNIAKPRPPWMGLLGPTIQAEVYDTVVITLKNMASHPVSLHAVGVSYWKASEGAEYDDQTSQREKEDDKVFPGGSHTYVWQVLKENGPMASDPPCLTYSYLSHVDLVKDLNSGLIGALLVCREGSLAKEKTQTKAKFILLFAVFDEGKSWHSETKNSLMQDRDAASARAWPKMHTVNGYVNRTLPGLIGCHRKSVYWHVIGMGTTPEVHSIFLEGHTFLVRNHRQASLGISPITFLTAQTLLQDLGQFLLFCHIPSHQHDGMEAYVKVDSCPEEPQLRMKNNEEAEDYDDDLTDSEMDVVRFDDDNSPSIIQARSGAKKHPKTWVHYIAAEEEDWDYAPLVLAPDDRSYKSQYLNNGPQRIGRKYKKVRFMAYTDETFKTREAIQHESGILGPLLYGEVGDTLLIIFKNQASRPYNIYPHGITDVRPLYSRRLPKGVKHLKDFPILPGEIFKYKWTVTVEDGPTKSDPRCLTRYYSSFVNMERDLASGLIGPLLICYKESVDQRGNQIMSDKRNVILFSVFDENRSWYLTENIQRFLPNPAEVQLEDPEFQASNIMHSINGYVFDSLQLSVCLHEVAYWYILSIGAQTDFLSVFFSGYTFKHKGVYEDTLTLFPFSGETVFMSMENPGLWILGCHNSDFRNRGMTALLKVSSCDWNTGDYYEDSYEDISAYFDSKNNAIEPRSFSQNPPVLKRHQREGTRTTLQSDQEEIDYDDTISVEMKKEDFDIYDEDENQSPRSFQKKTRHYFIAAVERLWDYGMSSKPHVLRNRAQSGSVPQFKKVVFQEFTDGSFTQPLYRGELNEHLGLLGPYIRAEVEDNIMVTFRNQASRPYSFYSSLISYEEDQRQGAEPRKNFVKPNETKTYFWKVQHHMAPTKDEFDCKAWAYFSDVDLEKDVHSGLIGPLLVCHTNTLNPAHGRQVTVQEFALFFTIFDETKSWYFTENMERNCRAPCNIQMEDPTFKENYRFHAINGYIMDTLPGLVMAQDQRIRWYLLSMGSNENIHSIHFSGHVFTVRKKEEYKMALYNLYPGVFETVEMLPSKAGIWRVECLIGEHLHAGMSTLFLVYSNKCQNPLGMASGHIRDFQITASGQYGQWAPKLARLHYSGSINAWSTKEPFSWIKVDLLAPMIIHGIKTQGARQKFSSLYISQFIIMYSLDGKKWQTYRGNSTGTDMVFFGNVDSSGIKHNIFNPPIIARYIRLHPTHYSIRSTLRMELMGCDLNSCSMPLGMESKAISDAQITASSYFTNMFATWSPSKARLHLQGRSNAWRPQVNNPKEWLQVDFQKTMKVTGVTTQGVKSLDTSMYVKEFLISSSQDGHQWTLFFQNGKVKVFQGNQDSFTPVVNSLDPPLLTRYLRIHPQSWEHQIALRMEVLGCEAQDLY

SEQ ID NO: 1457 - DNA, 4371 bp, synthetic construct
  misc_feature 1..4371: note = Variant of human B-domain deleted Factor VIII
  source 1..4371: mol_type = other DNA
atgcagattgaactgtctacctgcttcttcctctgtttgctgaggttctgctttagcgccactagacggtactaccttggcgctgtggagctgtcctgggactatatgcagagtgatttgggagagcttcccgtcgacgcacgatttcctcctcgcgttccaaagtcatttccctttaacacaagccaggtgtacaagaagacgctcttcgtcgaattcaccgatcacctgttcaatatcgccaaacccagaccaccatggatgggtcttttggggcctaccatacaagcggaggtgtatgacacagttgttatcactctcaagaacatggcttctcatccggtaagtcttcacgcagtgggcgtgtcctactggaaagcttcagaaggagccgagtatgatgatcagacatcccagagggagaaagaagacgacaaggtatttccaggtgggtctcatacctatgtgtggcaagtgctcaaagagaatggccctatggcaagcgatccgccgtgtttgacttacagctacctttcacacgttgacctcgtcaaggacctcaactccgggttgattggagccttgttggtatgcagggaaggatctcttgccaaagagaagacacagaccctgcacaagtttatccttctctttgctgtgttcgatgagggcaaaagttggcatagcgaaacgaagaattccctcatgcaggatcgcgacgcagccagcgccagagcttggcccaagatgcacactgtgaacggatatgtcaataggacgcttcctggcttgattgggtgtcatcggaaaagtgtctactggcacgtgatcggaatggggacaacaccagaggtccactccatatttctcgaaggccataccttccttgttcgaaaccacagacaggcatccttggggatctctcccattacctttctcactgcccaaacgctccttatggacttgggtcagttccttctcttttgccatatcccgtcacaccagcatgatggtatggaagcttatgtgaaagtcgacagttgtcctgaggagccacagttgcgcatgaagaataatgaagaagccgaggattacgacgacgatctcaccgattctgagatggacgtggtgaggtttgatgacgacaactctccctccatcattcaagctcggagcggggcgaagaaacaccccaagacttgggtccactatatagcggcggaagaggaggattgggattacgctcctcttgtattggcaccagatgaccgctcatacaaaagccagtacctcaacaacggaccgcagagaattggccggaagtataagaaagtgcgatttatggcctatacagacgaaacctttaagacaagggaggccatccagcatgagagtgggattttgggacctcttctttacggcgaagttggtgataccctcctcatcatcttcaagaatcaagcttctcgcccctataacatttacccacacgggatcactgacgttaggcctttgtatagcagaagacttcccaaaggcgtgaagcatctcaaagacttccccattttgccaggcgagatctttaagtacaaatggaccgtcacagtggaagatggaccgactaaatcagaccctcgatgccttacgcggtactattcctccttcgtgaatatggagagagatttggcaagcggactcataggaccactcctcatctgttacaaggaatctgtagaccagaggggtaaccagattatgagtgataaacgcaatgtgatcctttttagcgtcttcgacgagaaccggtcctggtacttgaccgagaatatacagaggttccttcccaaccccgcaggcgttcagttggaagaccctgagtttcaggccagcaatattatgcactcaatcaacggctatgtgtttgatagtctccagctttctgtttgcctccatgaagtagcctattggtacatcttgtcaattggtgctcaaacagacttcctctccgtcttcttctccggctacacctttaagcacaagatggtgtatgaggacactctcacactctttccattttctggagaaaccgtgttcatgagcatggagaatccaggcctttggatcttgggttgccacaacagtgattttcgcaatcggggaatgactgctctcctcaaagtcagcagctgtgattggaacacaggcgactattacgaagattcttacgaggacataagtgcctactttgactccaagaataacgccattgagcccagatcattctcccagaatcctcccgtgcttaaaaggcatcagcgcgaaggtaccagaactactcttcagtctgatcaagaggagattgactatgacgacaccattagcgtggaatggaagaaggaggatttcgatatctatgacgaagatgagaaccagtctccgcggagctttcagaagaagacgcgacactacttcattgcagcagtcgaaaggctttgggactacggtatgtcatcaaaacctcatgtgttgcgcaatagagctcagagtggaagtgttccacagttcaagaaagtcgtctttcaagagtttacagatggcagcttcacacagcctctctatcggggcgagcttaacgaacatttgggactccttggtccctatatccgagccgaagtggaggacaacattatggttacctttaggaatcaagcctctcgcccctacagcttctactcctccctcatcagttatgaggaggatcagagacaaggcgctgaaccacggaagaactttgtgaaaccgaatgagacgaagacctacttctggaaagtacagcaccacatggcccccacaaaagacgaattcgattgcaaagcatgggcgtatttttcagacgttgacttggagaaagatgtacattcaggacttattggtcctttgttggtgtgtcacactaacactctcaatccagcccatggcaggcaggtgacagtccaggaattcgctcttttctttaccatctttgatgagaccaagtcctggtacttcacggaaaacatggagcgcaattgcagagccccctgtaacatacagatggaggaccctacctttaaggaaaattatcggttccacgcaatcaacggatacattatggatacactccctggccttgtgatggctcaggaccaacgaatcaggtggtacctcctcagcatgggttctaatgagaacatacactccattcacttttcaggacatgtgttcactgtccggaagaaagaagagtataagatggccctctacaatttgtatccaggcgtgtttgagaccgttgaaatgcttccctctaaagctggcatctggagagtagagtgcttgatcggagaacatcttcacgcaggtatgagcaccttgttcctcgtgtacagcaacaaatgtcagaatccacttggcatggccagtggacacattcgcgactttcagatcacagcatctggccagtatggacaatgggccccaaagttggctcgcctccattactccggtagcataaatgcgtggtccactaaagaacctttcagctggattaaggtcgatcttcttgcccccatgatcatccacggcattaagacacagggagcgaggcagaaattctcctccctctacatctcacagttcattattatgtatagtttggacggcaagaagtggcaaacttatagaggtaacagtactggaacagacatggtgttcttcggcaacgttgatagctctggcatcaaacacaacatctttaatcctcccataatagctcggtacatcagattgcatccgacccactacagcattaggagtacactccgaatggagcttatgggttgcgacttgaattcctgttcaatgccactcggaatggagtctaaagccatctctgatgcacagataaccgccagtagctactttacgaacatgtttgctacgtggtcaccctctaaggcaaggcttcatttgcaaggccggtctaatgcctggagacctcaggtgaacaacccgaaagaatggctccaggtggactttcagaagaccatgaaagtaacaggtgtcactactcagggagttaagtccttggatactagcatgtatgtgaaggagttccttatttcctcatcacaagatggccaccagtggaccctcttctttcagaatggtaaggtcaaagtgtttcagggcaatcaagacagcttcacacccgtggtgaacagtcttgatcctccactcttgacacgataccttcgaatccatccacagtcttgggagcaccagattgcattgcgcatggaagtacttggatgcgaggctcaggacctctac

SEQ ID NO: 1458 - protein, 1457 aa, synthetic construct
  REGION 1..1457: note = Variant of human B-domain deleted Factor VIII
MQIELSTCFFLCLLRFCFSATRRYYLGAVELSWDYMQSDLGELPVDARFPPRVPKSFPFNTSQVYKKTLFVEFTDHLFNIAKPRPPWMGLLGPTIQAEVYDTVVITLKNMASHPVSLHAVGVSYWKASEGAEYDDQTSQREKEDDKVFPGGSHTYVWQVLKENGPMASDPPCLTYSYLSHVDLVKDLNSGLIGALLVCREGSLAKEKTQTLHKFILLFAVFDEGKSWHSETKNSLMQDRDAASARAWPKMHTVNGYVNRTLPGLIGCHRKSVYWHVIGMGTTPEVHSIFLEGHTFLVRNHRQASLGISPITFLTAQTLLMDLGQFLLFCHIPSHQHDGMEAYVKVDSCPEEPQLRMKNNEEAEDYDDDLTDSEMDVVRFDDDNSPSIIQARSGAKKHPKTWVHYIAAEEEDWDYAPLVLAPDDRSYKSQYLNNGPQRIGRKYKKVRFMAYTDETFKTREAIQHESGILGPLLYGEVGDTLLIIFKNQASRPYNIYPHGITDVRPLYSRRLPKGVKHLKDFPILPGEIFKYKWTVTVEDGPTKSDPRCLTRYYSSFVNMERDLASGLIGPLLICYKESVDQRGNQIMSDKRNVILFSVFDENRSWYLTENIQRFLPNPAGVQLEDPEFQASNIMHSINGYVFDSLQLSVCLHEVAYWYILSIGAQTDFLSVFFSGYTFKHKMVYEDTLTLFPFSGETVFMSMENPGLWILGCHNSDFRNRGMTALLKVSSCDWNTGDYYEDSYEDISAYFDSKNNAIEPRSFSQNPPVLKRHQREGTRTTLQSDQEEIDYDDTISVEWKKEDFDIYDEDENQSPRSFQKKTRHYFIAAVERLWDYGMSSKPHVLRNRAQSGSVPQFKKVVFQEFTDGSFTQPLYRGELNEHLGLLGPYIRAEVEDNIMVTFRNQASRPYSFYSSLISYEEDQRQGAEPRKNFVKPNETKTYFWKVQHHMAPTKDEFDCKAWAYFSDVDLEKDVHSGLIGPLLVCHTNTLNPAHGRQVTVQEFALFFTIFDETKSWYFTENMERNCRAPCNIQMEDPTFKENYRFHAINGYIMDTLPGLVMAQDQRIRWYLLSMGSNENIHSIHFSGHVFTVRKKEEYKMALYNLYPGVFETVEMLPSKAGIWRVECLIGEHLHAGMSTLFLVYSNKCQNPLGMASGHIRDFQITASGQYGQWAPKLARLHYSGSINAWSTKEPFSWIKVDLLAPMIIHGIKTQGARQKFSSLYISQFIIMYSLDGKKWQTYRGNSTGTDMVFFGNVDSSGIKHNIFNPPIIARYIRLHPTHYSIRSTLRMELMGCDLNSCSMPLGMESKAISDAQITASSYFTNMFATWSPSKARLHLQGRSNAWRPQVNNPKEWLQVDFQKTMKVTGVTTQGVKSLDTSMYVKEFLISSSQDGHQWTLFFQNGKVKVFQGNQDSFTPVVNSLDPPLLTRYLRIHPQSWEHQIALRMEVLGCEAQDLY

SEQ ID NO: 1459 - DNA, 4371 bp, synthetic construct
  misc_feature 1..4371: note = Variant of human B-domain deleted Factor VIII
  source 1..4371: mol_type = other DNA
atgcagattgaactgtctacctgcttcttcctctgtttgctgaggttctgctttagcgccactagacggtactaccttggcgctgtggagctgtcctgggactatatgcagagtgatttgggagagcttcccgtcgacgcacgatttcctcctcgcgttccaaagtcatttccctttaacacaagccaggtgtacaagaagacgctcttcgtcgaattcaccgatcacctgttcaatatcgccaaacccagaccaccatggatgggtcttttggggcctaccatacaagcggaggtgtatgacacagttgttatcactctcaagaacatggcttctcatccggtaagtcttcacgcagtgggcgtgtcctactggaaagcttcagaaggagccgagtatgatgatcagacatcccagagggagaaagaagacgacaaggtatttccaggtgggtctcatacctatgtgtggcaagtgctcaaagagaatggccctatggcaagcgatccgccgtgtttgacttacagctacctttcacacgttgacctcgtcaaggacctcaactccgggttgattggagccttgttggtatgcagggaaggatctcttgccaaagagaagacacagaccctggccaagtttatccttctctttgctgtgttcgatgagggcaaaagttggcatagcgaaacgaagaattccctcatgcaggatcgcgacgcagccagcgccagagcttggcccaagatgcacactgtgaacggatatgtcaataggacgcttcctggcttgattgggtgtcatcggaaaagtgtctactggcacgtgatcggaatggggacaacaccagaggtccactccatatttctcgaaggccataccttccttgttcgaaaccacagacaggcatccttggggatctctcccattaccctgctcactgcccaaacgctccttcaagacttgggtcagttccttctcttttgccatatcccgtcacaccagcatgatggtatggaagcttatgtgaaagtcgacagttgtcctgaggagccacagttgcgcatgaagaataatgaagaagccgaggattacgacgacgatctcaccgattctgagatggacgtggtgaggtttgatgacgacaactctccctccatcattcaagctcggagcggggcgaagaaacaccccaagacttgggtccactatatagcggcggaagaggaggattgggattacgctcctcttgtattggcaccagatgaccgctcatacaaaagccagtacctcaacaacggaccgcagagaattggccggaagtataagaaagtgcgatttatggcctatacagacgaaacctttaagacaagggaggccatccagcatgagagtgggattttgggacctcttctttacggcgaagttggtgataccctcctcatcatcttcaagaatcaagcttctcgcccctataacatttacccacacgggatcactgacgttaggcctttgtatagcagaagacttcccaaaggcgtgaagcatctcaaagacttccccattttgccaggcgagatctttaagtacaaatggcgcattacagtggaagatggaccgactaaatcagaccctcgatgccttacgcggtactattcctccttcgtgaatatggagagagatttggcaagcggactcataggaccactcctcatctgttacaaggaatctgtagaccagaggggtaaccagattatgagtgataaacgcaatgtgatcctttttagcgtcttcgacgagaaccggtcctggtacttgaccgagaatatacaaaggttccttcccaacgaagcaggggttcagttggaagaccctgagtttcaggccagcaatattatgcactcaatcaacggctatgtgtttgatagtctccagctttctgtttgcctccatgaagtagcctattggtacatcttgtcaattggtgctcaaacagacttcctctccgtcttcttctccggctacacctttaagcacaagggcgtgtatgaggacactctcacactctttccattttctggagaaaccgtgttcatgagcatggagaatccaggcctttggatcttgggttgccacaacagtgattttcgcaatcggggaatgactgctctcctcaaagtcagcagctgtgattggaacacaggcgactattacgaagattcttacgaggacataagtgcctactttgactccaagaataacgccattgagcccagatcattctcccagaatcctcccgtgcttaaaaggcatcagcgcgaaggtaccagaactactcttcagtctgatcaagaggagattgactatgacgacaccattagcgtggaaatgaagaaggaggatttcgatatctatgacgaagatgagaaccagtctccgcggagctttcagaagaagacgcgacactacttcattgcagcagtcgaaaggctttgggactacggtatgtcatcatcgcctcatgtgttgcgcaatagagctcagagtggaagtgttccacagttcaagaaagtcgtctttcaagagtttacagatggcagcttcacacagcctctctatcggggcgagcttaacgaacatttgggactccttggtccctatatccgagccgaagtggaggacaacattatggttacctttaggaatcaagcctctcgcccctacagcttctactcctccctcatcagttatgaggaggatcagagacaaggcgctgaaccacggaagaactttgtgaaaccgaatgagacgaagacctacttctggaaagtacagcaccacatggcccccacaaaagacgaattcgattgcaaagcatgggcgtatttttcagacgttgacttggagaaagatgtacattcaggacttattggtcctttgttggtgtgtcacactaacactctcaatccagcccatggcaggcaggtgacagtccaggaattcgctcttttctttaccatctttgatgagaccaagtcctggtacttcacggaaaacatggagcgcaattgcagagccccctgtaacatacagatggaggaccctacctttaaggaaaattatcggttccacgcaatcaacggatacattatggatacactccctggccttgtgatggctcaggaccaacgaatcaggtggtacctcctcagcatgggttctaatgagaacatacactccattcacttttcaggacatgtgttcactgtccggaagaaagaagagtataagatggccctctacaatttgtatccaggcgtgtttgagaccgttgaaatgcttccctctaaagctggcatctggagagtagagtgcttgatcggagaacatcttcacgcaggtatgagcaccttgttcctcgtgtacagcaacaaatgtcagaatccacttggcatggccagtggacacattcgcgactttcagatcacagcatctggccagtatggacaatgggccccaaagttggctcgcctccattactccggtagcataaatgcgtggtccactaaagaacctttcagctggattaaggtcgatcttcttgcccccatgatcatccacggcattaagacacagggagcgaggcagaaattctcctccctctacatctcacagttcattattatgtatagtttggacggcaagaagtggcaaacttatagaggtaacagtactggaacagacatggtgttcttcggcaacgttgatagctctggcatcaaacacaacatctttaatcctcccataatagctcggtacatcagattgcatccgacccactacagcattaggagtacactccgaatggagcttatgggttgcgacttgaattcctgttcaatgccactcggaatggagtctaaagccatctctgatgcacagataaccgccagtagctactttacgaacatgtttgctacgtggtcaccctctaaggcaaggcttcatttgcaaggccggtctaatgcctggagacctcaggtgaacaacccgaaagaatggctccaggtggactttcagaagaccatgaaagtaacaggtgtcactactcagggagttaagtccttggatactagcatgtatgtgaaggagttccttatttcctcatcacaagatggccaccagtggaccctcttctttcagaatggtaaggtcaaagtgtttcagggcaatcaagacagcttcacacccgtggtgaacagtcttgatcctccactcttgacacgataccttcgaatccatccacagtcttgggagcaccagattgcattgcgcatggaagtacttggatgcgaggctcaggacctctac

SEQ ID NO: 1460 - protein, 1457 aa, synthetic construct
  REGION 1..1457: note = Variant of human B-domain deleted Factor VIII
MQIELSTCFFLCLLRFCFSATRRYYLGAVELSWDYMQSDLGELPVDARFPPRVPKSFPFNTSQVYKKTLFVEFTDHLFNIAKPRPPWMGLLGPTIQAEVYDTVVITLKNMASHPVSLHAVGVSYWKASEGAEYDDQTSQREKEDDKVFPGGSHTYVWQVLKENGPMASDPPCLTYSYLSHVDLVKDLNSGLIGALLVCREGSLAKEKTQTLAKFILLFAVFDEGKSWHSETKNSLMQDRDAASARAWPKMHTVNGYVNRTLPGLIGCHRKSVYWHVIGMGTTPEVHSIFLEGHTFLVRNHRQASLGISPITLLTAQTLLQDLGQFLLFCHIPSHQHDGMEAYVKVDSCPEEPQLRMKNNEEAEDYDDDLTDSEMDVVRFDDDNSPSIIQARSGAKKHPKTWVHYIAAEEEDWDYAPLVLAPDDRSYKSQYLNNGPQRIGRKYKKVRFMAYTDETFKTREAIQHESGILGPLLYGEVGDTLLIIFKNQASRPYNIYPHGITDVRPLYSRRLPKGVKHLKDFPILPGEIFKYKWRITVEDGPTKSDPRCLTRYYSSFVNMERDLASGLIGPLLICYKESVDQRGNQIMSDKRNVILFSVFDENRSWYLTENIQRFLPNEAGVQLEDPEFQASNIMHSINGYVFDSLQLSVCLHEVAYWYILSIGAQTDFLSVFFSGYTFKHKGVYEDTLTLFPFSGETVFMSMENPGLWILGCHNSDFRNRGMTALLKVSSCDWNTGDYYEDSYEDISAYFDSKNNAIEPRSFSQNPPVLKRHQREGTRTTLQSDQEEIDYDDTISVEMKKEDFDIYDEDENQSPRSFQKKTRHYFIAAVERLWDYGMSSSPHVLRNRAQSGSVPQFKKVVFQEFTDGSFTQPLYRGELNEHLGLLGPYIRAEVEDNIMVTFRNQASRPYSFYSSLISYEEDQRQGAEPRKNFVKPNETKTYFWKVQHHMAPTKDEFDCKAWAYFSDVDLEKDVHSGLIGPLLVCHTNTLNPAHGRQVTVQEFALFFTIFDETKSWYFTENMERNCRAPCNIQMEDPTFKENYRFHAINGYIMDTLPGLVMAQDQRIRWYLLSMGSNENIHSIHFSGHVFTVRKKEEYKMALYNLYPGVFETVEMLPSKAGIWRVECLIGEHLHAGMSTLFLVYSNKCQNPLGMASGHIRDFQITASGQYGQWAPKLARLHYSGSINAWSTKEPFSWIKVDLLAPMIIHGIKTQGARQKFSSLYISQFIIMYSLDGKKWQTYRGNSTGTDMVFFGNVDSSGIKHNIFNPPIIARYIRLHPTHYSIRSTLRMELMGCDLNSCSMPLGMESKAISDAQITASSYFTNMFATWSPSKARLHLQGRSNAWRPQVNNPKEWLQVDFQKTMKVTGVTTQGVKSLDTSMYVKEFLISSSQDGHQWTLFFQNGKVKVFQGNQDSFTPVVNSLDPPLLTRYLRIHPQSWEHQIALRMEVLGCEAQDLY

SEQ ID NO: 1461 - DNA, 4371 bp, synthetic construct
  misc_feature 1..4371: note = Variant of human B-domain deleted Factor VIII
  source 1..4371: mol_type = other DNA
atgcagattgaactgtctacctgcttcttcctctgtttgctgaggttctgctttagcgccactagacggtactaccttggcgctgtggagctgtcctgggactatatgcagagtgatttgggagagcttcccgtcgacgcacgatttcctcctcgcgttccaaagtcatttccctttaacacaagccaggtgtacaagaagacgctcttcgtcgaattcaccgatcacctgttcaatatcgccaaacccagaccaccatggatgggtcttttggggcctaccatacaagcggaggtgtatgacacagttgttatcactctcaagaacatggcttctcatccggtaagtcttcacgcagtgggcgtgtcctactggaaagcttcagaaggagccgagtatgatgatcagacatcccagagggagaaagaagacgacaaggtatttccaggtgggtctcatacctatgtgtggcaagtgctcaaagagaatggccctatggcaagcgatccgccgtgtttgacttacagctacctttcacacgttgacctcgtcaaggacctcaactccgggttgattggagccttgttggtatgcagggaaggatctcttgccaaagagaagacacagaccctgcacaagtttatccttctctttgctgtgttcgatgagggcaaaagttggcatagcgaaacgaagaattccctcatgcaggatcgcgacgcagccagcgccagagcttggcccaagatgcacactgtgaacggatatgtcaataggacgcttcctggcttgattgggtgtcatcggaaaagtgtctactggcacgtgatcggaatggggacaacaccagaggtccactccatatttctcgaaggccataccttccttgttcgaaaccacagacaggcatccttggggatctctcccattaccttcctcactgcccaaacgctccttatggacttgggtcagttccttctcttttgccatatcccgtcacaccagcatgatggtatggaagcttatgtgaaagtcgacagttgtcctgaggagccacagttgcgcatgaagaataatgaagaagccgaggattacgacgacgatctcaccgattctgagatggacgtggtgaggtttgatgacgacaactctccctccatcattcaagctcggagcggggcgaagaaacaccccaagacttgggtccactatatagcggcggaagaggaggattgggattacgctcctcttgtattggcaccagatgaccgctcatacaaaagccagtacctcaacaacggaccgcagagaattggccggaagtataagaaagtgcgatttatggcctatacagacgaaacctttaagacaagggaggccatccagcatgagagtgggattttgggacctcttctttacggcgaagttggtgataccctcctcatcatcttcaagaatcaagcttctcgcccctataacatttacccacacgggatcactgacgttaggcctttgtatagcagaagacttcccaaaggcgtgaagcatctcaaagacttccccattttgccaggcgagatctttaagtacaaatggaccgttacagtggaagatggaccgactaaatcagaccctcgatgccttacgcggtactattcctccttcgtgaattgggagagagatttggcaagcggactcataggaccactcctcatctgttacaaggaatctgtagaccagaggggtaaccagattatgagtgataaacgcaatgtgatcctttttagcgtcttcgacgagaaccggtcctggtacttgaccgagaatatacaaaggttccttcccaaccctgcagaggttcagttggaagaccctgagtttcaggccagcaatattatgcactcaatcaacggctatgtgtttgatagtctccagctttctgtttgcctccatgaagtagcctattggtacatcttgtcaattggtgctcaaacagacttcctctccgtcttcttctccggctacacctttaagcacaagggcgtgtatgaggacactctcacactctttccattttctggagaaaccgtgttcatgagcatggagaatccaggcctttggatcttgggttgccacaacagtgattttcgcaatcggggaatgactgctctcctcaaagtcagcagctgtgattggaacacaggcgactattacgaagattcttacgaggacataagtgcctactttgactccaagaataacgccattgagcccagatcattctcccagaatcctcccgtgcttaaaaggcatcagcgcgaaggtaccagaactactcttcagtctgatcaagaggagattgactatgacgacaccattagcgtggaaatgaagaaggaggatttcgatatctatgacgaagatgagaaccagtctccgcggagctttcagaagaagacgcgacactacttcattgcagcagtcgaaaggctttgggactacggtatgtcatcatcgcctcatgtgttgcgcaatagagctcagagtggaagtgttccacagttcaagaaagtcgtctttcaagagtttacagatggcagcttcacacagcctctctatcggggcgagcttaacgaacatttgggactccttggtccctatatccgagccgaagtggaggacaacattatggttacctttaggaatcaagcctctcgcccctacagcttctactcctccctcatcagttatgaggaggatcagagacaaggcgctgaaccacggaagaactttgtgaaaccgaatgagacgaagacctacttctggaaagtacagcaccacatggcccccacaaaagacgaattcgattgcaaagcatgggcgtatttttcagacgttgacttggagaaagatgtacattcaggacttattggtcctttgttggtgtgtcacactaacactctcaatccagcccatggcaggcaggtgacagtccaggaattcgctcttttctttaccatctttgatgagaccaagtcctggtacttcacggaaaacatggagcgcaattgcagagccccctgtaacatacagatggaggaccctacctttaaggaaaattatcggttccacgcaatcaacggatacattatggatacactccctggccttgtgatggctcaggaccaacgaatcaggtggtacctcctcagcatgggttctaatgagaacatacactccattcacttttcaggacatgtgttcactgtccggaagaaagaagagtataagatggccctctacaatttgtatccaggcgtgtttgagaccgttgaaatgcttccctctaaagctggcatctggagagtagagtgcttgatcggagaacatcttcacgcaggtatgagcaccttgttcctcgtgtacagcaacaaatgtcagaatccacttggcatggccagtggacacattcgcgactttcagatcacagcatctggccagtatggacaatgggccccaaagttggctcgcctccattactccggtagcataaatgcgtggtccactaaagaacctttcagctggattaaggtcgatcttcttgcccccatgatcatccacggcattaagacacagggagcgaggcagaaattctcctccctctacatctcacagttcattattatgtatagtttggacggcaagaagtggcaaacttatagaggtaacagtactggaacagacatggtgttcttcggcaacgttgatagctctggcatcaaacacaacatctttaatcctcccataatagctcggtacatcagattgcatccgacccactacagcattaggagtacactccgaatggagcttatgggttgcgacttgaattcctgttcaatgccactcggaatggagtctaaagccatctctgatgcacagataaccgccagtagctactttacgaacatgtttgctacgtggtcaccctctaaggcaaggcttcatttgcaaggccggtctaatgcctggagacctcaggtgaacaacccgaaagaatggctccaggtggactttcagaagaccatgaaagtaacaggtgtcactactcagggagttaagtccttggatactagcatgtatgtgaaggagttccttatttcctcatcacaagatggccaccagtggaccctcttctttcagaatggtaaggtcaaagtgtttcagggcaatcaagacagcttcacacccgtggtgaacagtcttgatcctccactcttgacacgataccttcgaatccatccacagtcttgggagcaccagattgcattgcgcatggaagtacttggatgcgaggctcaggacctctac

SEQ ID NO: 1462 - protein, 1457 aa, synthetic construct
  REGION 1..1457: note = Variant of human B-domain deleted Factor VIII
MQIELSTCFFLCLLRFCFSATRRYYLGAVELSWDYMQSDLGELPVDARFPPRVPKSFPFNTSQVYKKTLFVEFTDHLFNIAKPRPPWMGLLGPTIQAEVYDTVVITLKNMASHPVSLHAVGVSYWKASEGAEYDDQTSQREKEDDKVFPGGSHTYVWQVLKENGPMASDPPCLTYSYLSHVDLVKDLNSGLIGALLVCREGSLAKEKTQTLHKFILLFAVFDEGKSWHSETKNSLMQDRDAASARAWPKMHTVNGYVNRTLPGLIGCHRKSVYWHVIGMGTTPEVHSIFLEGHTFLVRNHRQASLGISPITFLTAQTLLMDLGQFLLFCHIPSHQHDGMEAYVKVDSCPEEPQLRMKNNEEAEDYDDDLTDSEMDVVRFDDDNSPSIIQARSGAKKHPKTWVHYIAAEEEDWDYAPLVLAPDDRSYKSQYLNNGPQRIGRKYKKVRFMAYTDETFKTREAIQHESGILGPLLYGEVGDTLLIIFKNQASRPYNIYPHGITDVRPLYSRRLPKGVKHLKDFPILPGEIFKYKWTVTVEDGPTKSDPRCLTRYYSSFVNWERDLASGLIGPLLICYKESVDQRGNQIMSDKRNVILFSVFDENRSWYLTENIQRFLPNPAEVQLEDPEFQASNIMHSINGYVFDSLQLSVCLHEVAYWYILSIGAQTDFLSVFFSGYTFKHKGVYEDTLTLFPFSGETVFMSMENPGLWILGCHNSDFRNRGMTALLKVSSCDWNTGDYYEDSYEDISAYFDSKNNAIEPRSFSQNPPVLKRHQREGTRTTLQSDQEEIDYDDTISVEMKKEDFDIYDEDENQSPRSFQKKTRHYFIAAVERLWDYGMSSSPHVLRNRAQSGSVPQFKKVVFQEFTDGSFTQPLYRGELNEHLGLLGPYIRAEVEDNIMVTFRNQASRPYSFYSSLISYEEDQRQGAEPRKNFVKPNETKTYFWKVQHHMAPTKDEFDCKAWAYFSDVDLEKDVHSGLIGPLLVCHTNTLNPAHGRQVTVQEFALFFTIFDETKSWYFTENMERNCRAPCNIQMEDPTFKENYRFHAINGYIMDTLPGLVMAQDQRIRWYLLSMGSNENIHSIHFSGHVFTVRKKEEYKMALYNLYPGVFETVEMLPSKAGIWRVECLIGEHLHAGMSTLFLVYSNKCQNPLGMASGHIRDFQITASGQYGQWAPKLARLHYSGSINAWSTKEPFSWIKVDLLAPMIIHGIKTQGARQKFSSLYISQFIIMYSLDGKKWQTYRGNSTGTDMVFFGNVDSSGIKHNIFNPPIIARYIRLHPTHYSIRSTLRMELMGCDLNSCSMPLGMESKAISDAQITASSYFTNMFATWSPSKARLHLQGRSNAWRPQVNNPKEWLQVDFQKTMKVTGVTTQGVKSLDTSMYVKEFLISSSQDGHQWTLFFQNGKVKVFQGNQDSFTPVVNSLDPPLLTRYLRIHPQSWEHQIALRMEVLGCEAQDLY

SEQ ID NO: 1463 - DNA, 4371 bp, synthetic construct
  misc_feature 1..4371: note = Variant of human B-domain deleted Factor VIII
  source 1..4371: mol_type = other DNA
atgcagattgaactgtctacctgcttcttcctctgtttgctgaggttctgctttagcgccactagacggtactaccttggcgctgtggagctgtcctgggactatatgcagagtgatttgggagagcttcccgtcgacgcacgatttcctcctcgcgttccaaagtcatttccctttaacacaagccaggtgtacaagaagacgctcttcgtcgaattcaccgatcacctgttcaatatcgccaaacccagaccaccatggatgggtcttttggggcctaccatacaagcggaggtgtatgacacagttgttatcactctcaagaacatggcttctcatccggtaagtcttcacgcagtgggcgtgtcctactggaaagcttcagaaggagccgagtatgatgatcagacatcccagagggagaaagaagacgacaaggtatttccaggtgggtctcatacctatgtgtggcaagtgctcaaagagaatggccctatggcaagcgatccgccgtgtttgacttacagctacctttcacacgttgacctcgtcaaggacctcaactccgggttgattggagccttgttggtatgcagggaaggatctcttgccaaagagaagacacagaccctgcacaagtttatccttctctttgctgtgttcgatgagggcaaaagttggcatagcgaaacgaagaattccctcatgcaggatcgcgacgcagccagcgccagagcttggcccaagatgcacactgtgaacggatatgtcaataggacgcttcctggcttgattgggtgtcatcggaaaagtgtctactggcacgtgatcggaatggggacaacaccagaggtccactccatatttctcgaaggccataccttccttgttcgaaaccacagacaggcatccttggggatctctcccattacctttctcactgcccaaacgctccttcaagacttgggtcagttccttctcttttgccatatcccgtcacaccagcatgatggtatggaagcttatgtgaaagtcgacagttgtcctgaggagccacagttgcgcatgaagaataatgaagaagccgaggattacgacgacgatctcaccgattctgagatggacgtggtgaggtttgatgacgacaactctccctccatcattcaagctcggagcggggcgaagaaacaccccaagacttgggtccactatatagcggcggaagaggaggattgggattacgctcctcttgtattggcaccagatgaccgctcatacaaaagccagtacctcaacaacggaccgcagagaattggccggaagtataagaaagtgcgatttatggcctatacagacgaaacctttaagacaagggaggccatccagcatgagagtgggattttgggacctcttctttacggcgaagttggtgataccctcctcatcatcttcaagaatcaagcttctcgcccctataacatttacccacacgggatcactgacgttaggcctttgtatagcagaagacttcccaaaggcgtgaagcatctcaaagacttccccattttgccaggcgagatctttaagtacaaatggaccgttacagtggaagatggaccgactaaatcagaccctcgatgccttacgcggtactattcctccttcgtgaattgggagagagatttggcaagcggactcataggaccactcctcatctgttacaaggaatctgtagaccagaggggtaaccagattatgagtgataaacgcaatgtgatcctttttagcgtcttcgacgagaaccggtcctggtacttgaccgagaatatacagaggttccttcccaaccccgcaggcgttcagttggaagaccctgagtttcaggccagcaatattatgcactcaatcaacggctatgtgtttgatagtctccagctttctgtttgcctccatgaagtagcctattggtacatcttgtcaattggtgctcaaacagacttcctctccgtcttcttctccggctacacctttaagcacaagggcgtgtatgaggacactctcacactctttccattttctggagaaaccgtgttcatgagcatggagaatccaggcctttggatcttgggttgccacaacagtgattttcgcaatcggggaatgactgctctcctcaaagtcagcagctgtgattggaacacaggcgactattacgaagattcttacgaggacataagtgcctactttgactccaagaataacgccattgagcccagatcattctcccagaatcctcccgtgcttaaaaggcatcagcgcgaaggtaccagaactactcttcagtctgatcaagaggagattgactatgacgacaccattagcgtggaaatgaagaaggaggatttcgatatctatgacgaagatgagaaccagtctccgcggagctttcagaagaagacgcgacactacttcattgcagcagtcgaaaggctttgggactacggtatgtcatcatcccctcatgtgttgcgcaatagagctcagagtggaagtgttccacagttcaagaaagtcgtctttcaagagtttacagatggcagcttcacacagcctctctatcggggcgagcttaacgaacatttgggactccttggtccctatatccgagccgaagtggaggacaacattatggttacctttaggaatcaagcctctcgcccctacagcttctactcctccctcatcagttatgaggaggatcagagacaaggcgctgaaccacggaagaactttgtgaaaccgaatgagacgaagacctacttctggaaagtacagcaccacatggcccccacaaaagacgaattcgattgcaaagcatgggcgtatttttcagacgttgacttggagaaagatgtacattcaggacttattggtcctttgttggtgtgtcacactaacactctcaatccagcccatggcaggcaggtgacagtccaggaattcgctcttttctttaccatctttgatgagaccaagtcctggtacttcacggaaaacatggagcgcaattgcagagccccctgtaacatacagatggaggaccctacctttaaggaaaattatcggttccacgcaatcaacggatacattatggatacactccctggccttgtgatggctcaggaccaacgaatcaggtggtacctcctcagcatgggttctaatgagaacatacactccattcacttttcaggacatgtgttcactgtccggaagaaagaagagtataagatggccctctacaatttgtatccaggcgtgtttgagaccgttgaaatgcttccctctaaagctggcatctggagagtagagtgcttgatcggagaacatcttcacgcaggtatgagcaccttgttcctcgtgtacagcaacaaatgtcagaatccacttggcatggccagtggacacattcgcgactttcagatcacagcatctggccagtatggacaatgggccccaaagttggctcgcctccattactccggtagcataaatgcgtggtccactaaagaacctttcagctggattaaggtcgatcttcttgcccccatgatcatccacggcattaagacacagggagcgaggcagaaattctcctccctctacatctcacagttcattattatgtatagtttggacggcaagaagtggcaaacttatagaggtaacagtactggaacagacatggtgttcttcggcaacgttgatagctctggcatcaaacacaacatctttaatcctcccataatagctcggtacatcagattgcatccgacccactacagcattaggagtacactccgaatggagcttatgggttgcgacttgaattcctgttcaatgccactcggaatggagtctaaagccatctctgatgcacagataaccgccagtagctactttacgaacatgtttgctacgtggtcaccctctaaggcaaggcttcatttgcaaggccggtctaatgcctggagacctcaggtgaacaacccgaaagaatggctccaggtggactttcagaagaccatgaaagtaacaggtgtcactactcagggagttaagtccttggatactagcatgtatgtgaaggagttccttatttcctcatcacaagatggccaccagtggaccctcttctttcagaatggtaaggtcaaagtgtttcagggcaatcaagacagcttcacacccgtggtgaacagtcttgatcctccactcttgacacgataccttcgaatccatccacagtcttgggagcaccagattgcattgcgcatggaagtacttggatgcgaggctcaggacctctac

SEQ ID NO: 1464 - protein, 1457 aa, synthetic construct
  REGION 1..1457: note = Variant of human B-domain deleted Factor VIII
MQIELSTCFFLCLLRFCFSATRRYYLGAVELSWDYMQSDLGELPVDARFPPRVPKSFPFNTSQVYKKTLFVEFTDHLFNIAKPRPPWMGLLGPTIQAEVYDTVVITLKNMASHPVSLHAVGVSYWKASEGAEYDDQTSQREKEDDKVFPGGSHTYVWQVLKENGPMASDPPCLTYSYLSHVDLVKDLNSGLIGALLVCREGSLAKEKTQTLHKFILLFAVFDEGKSWHSETKNSLMQDRDAASARAWPKMHTVNGYVNRTLPGLIGCHRKSVYWHVIGMGTTPEVHSIFLEGHTFLVRNHRQASLGISPITFLTAQTLLQDLGQFLLFCHIPSHQHDGMEAYVKVDSCPEEPQLRMKNNEEAEDYDDDLTDSEMDVVRFDDDNSPSIIQARSGAKKHPKTWVHYIAAEEEDWDYAPLVLAPDDRSYKSQYLNNGPQRIGRKYKKVRFMAYTDETFKTREAIQHESGILGPLLYGEVGDTLLIIFKNQASRPYNIYPHGITDVRPLYSRRLPKGVKHLKDFPILPGEIFKYKWTVTVEDGPTKSDPRCLTRYYSSFVNWERDLASGLIGPLLICYKESVDQRGNQIMSDKRNVILFSVFDENRSWYLTENIQRFLPNPAGVQLEDPEFQASNIMHSINGYVFDSLQLSVCLHEVAYWYILSIGAQTDFLSVFFSGYTFKHKGVYEDTLTLFPFSGETVFMSMENPGLWILGCHNSDFRNRGMTALLKVSSCDWNTGDYYEDSYEDISAYFDSKNNAIEPRSFSQNPPVLKRHQREGTRTTLQSDQEEIDYDDTISVEMKKEDFDIYDEDENQSPRSFQKKTRHYFIAAVERLWDYGMSSSPHVLRNRAQSGSVPQFKKVVFQEFTDGSFTQPLYRGELNEHLGLLGPYIRAEVEDNIMVTFRNQASRPYSFYSSLISYEEDQRQGAEPRKNFVKPNETKTYFWKVQHHMAPTKDEFDCKAWAYFSDVDLEKDVHSGLIGPLLVCHTNTLNPAHGRQVTVQEFALFFTIFDETKSWYFTENMERNCRAPCNIQMEDPTFKENYRFHAINGYIMDTLPGLVMAQDQRIRWYLLSMGSNENIHSIHFSGHVFTVRKKEEYKMALYNLYPGVFETVEMLPSKAGIWRVECLIGEHLHAGMSTLFLVYSNKCQNPLGMASGHIRDFQITASGQYGQWAPKLARLHYSGSINAWSTKEPFSWIKVDLLAPMIIHGIKTQGARQKFSSLYISQFIIMYSLDGKKWQTYRGNSTGTDMVFFGNVDSSGIKHNIFNPPIIARYIRLHPTHYSIRSTLRMELMGCDLNSCSMPLGMESKAISDAQITASSYFTNMFATWSPSKARLHLQGRSNAWRPQVNNPKEWLQVDFQKTMKVTGVTTQGVKSLDTSMYVKEFLISSSQDGHQWTLFFQNGKVKVFQGNQDSFTPVVNSLDPPLLTRYLRIHPQSWEHQIALRMEVLGCEAQDLY

SEQ ID NO: 1465 - DNA, 4371 bp, synthetic construct
  misc_feature 1..4371: note = Variant of human B-domain deleted Factor VIII
  source 1..4371: mol_type = other DNA
atgcagattgaactgtctacctgcttcttcctctgtttgctgaggttctgctttagcgccactagacggtactaccttggcgctgtggagctgtcctgggactatatgcagagtgatttgggagagcttcccgtcgacgcacgatttcctcctcgcgttccaaagtcatttccctttaacacaagccaggtgtacaagaagacgctcttcgtcgaattcaccgatcacctgttcaatatcgccaaacccagaccaccatggatgggtcttttggggcctaccatacaagcggaggtgtatgacacagttgttatcactctcaagaacatggcttctcatccggtaagtcttcacgcagtgggcgtgtcctactggaaagcttcagaaggagccgagtatgatgatcagacatcccagagggagaaagaagacgacaaggtatttccaggtgggtctcatacctatgtgtggcaagtgctcaaagagaatggccctatggcaagcgatccgccgtgtttgacttacagctacctttcacacgttgacctcgtcaaggacctcaactccgggttgattggagccttgttggtatgcagggaaggatctcttgccaaagagaagacacagaccctggccaagtttatccttctctttgctgtgttcgatgagggcaaaagttggcatagcgaaacgaagaattccctcatgcaggatcgcgacgcagccagcgccagagcttggcccaagatgcacactgtgaacggatatgtcaataggacgcttcctggcttgattgggtgtcatcggaaaagtgtctactggcacgtgatcggaatggggacaacaccagaggtccactccatatttctcgaaggccataccttccttgttcgaaaccacagacaggcatccttggggatctctcccattacctttctcactgcccaaacgctccttcaagacttgggtcagttccttctcttttgccatatcccgtcacaccagcatgatggtatggaagcttatgtgaaagtcgacagttgtcctgaggagccacagttgcgcatgaagaataatgaagaagccgaggattacgacgacgatctcaccgattctgagatggacgtggtgaggtttgatgacgacaactctccctccatcattcaagctcggagcggggcgaagaaacaccccaagacttgggtccactatatagcggcggaagaggaggattgggattacgctcctcttgtattggcaccagatgaccgctcatacaaaagccagtacctcaacaacggaccgcagagaattggccggaagtataagaaagtgcgatttatggcctatacagacgaaacctttaagacaagggaggccatccagcatgagagtgggattttgggacctcttctttacggcgaagttggtgataccctcctcatcatcttcaagaatcaagcttctcgcccctataacatttacccacacgggatcactgacgttaggcctttgtatagcagaagacttcccaaaggcgtgaagcatctcaaagacttccccattttgccaggcgagatctttaagtacaaatggaccattacagtggaagatggaccgactaaatcagaccctcgatgccttacgcggtactattcctccttcgtgaatatggagagagatttggcaagcggactcataggaccactcctcatctgttacaaggaatctgtagaccagaggggtaaccagattatgagtgataaacgcaatgtgatcctttttagcgtcttcgacgagaaccggtcctggtacttgaccgagaatatacaaaggttccttcccaaccctgcagaggttcagttggaagaccctgagtttcaggccagcaatattatgcactcaatcaacggctatgtgtttgatagtctccagctttctgtttgcctccatgaagtagcctattggtacatcttgtcaattggtgctcaaacagacttcctctccgtcttcttctccggctacacctttaagcacaagggcgtgtatgaggacactctcacactctttccattttctggagaaaccgtgttcatgagcatggagaatccaggcctttggatcttgggttgccacaacagtgattttcgcaatcggggaatgactgctctcctcaaagtcagcagctgtgattggaacacaggcgactattacgaagattcttacgaggacataagtgcctactttgactccaagaataacgccattgagcccagatcattctcccagaatcctcccgtgcttaaaaggcatcagcgcgaaggtaccagaactactcttcagtctgatcaagaggagattgactatgacgacaccattagcgtggaatggaagaaggaggatttcgatatctatgacgaagatgagaaccagtctccgcggagctttcagaagaagacgcgacactacttcattgcagcagtcgaaaggctttgggactacggtatgtcatcaaaacctcatgtgttgcgcaatagagctcagagtggaagtgttccacagttcaagaaagtcgtctttcaagagtttacagatggcagcttcacacagcctctctatcggggcgagcttaacgaacatttgggactccttggtccctatatccgagccgaagtggaggacaacattatggttacctttaggaatcaagcctctcgcccctacagcttctactcctccctcatcagttatgaggaggatcagagacaaggcgctgaaccacggaagaactttgtgaaaccgaatgagacgaagacctacttctggaaagtacagcaccacatggcccccacaaaagacgaattcgattgcaaagcatgggcgtatttttcagacgttgacttggagaaagatgtacattcaggacttattggtcctttgttggtgtgtcacactaacactctcaatccagcccatggcaggcaggtgacagtccaggaattcgctcttttctttaccatctttgatgagaccaagtcctggtacttcacggaaaacatggagcgcaattgcagagccccctgtaacatacagatggaggaccctacctttaaggaaaattatcggttccacgcaatcaacggatacattatggatacactccctggccttgtgatggctcaggaccaacgaatcaggtggtacctcctcagcatgggttctaatgagaacatacactccattcacttttcaggacatgtgttcactgtccggaagaaagaagagtataagatggccctctacaatttgtatccaggcgtgtttgagaccgttgaaatgcttccctctaaagctggcatctggagagtagagtgcttgatcggagaacatcttcacgcaggtatgagcaccttgttcctcgtgtacagcaacaaatgtcagaatccacttggcatggccagtggacacattcgcgactttcagatcacagcatctggccagtatggacaatgggccccaaagttggctcgcctccattactccggtagcataaatgcgtggtccactaaagaacctttcagctggattaaggtcgatcttcttgcccccatgatcatccacggcattaagacacagggagcgaggcagaaattctcctccctctacatctcacagttcattattatgtatagtttggacggcaagaagtggcaaacttatagaggtaacagtactggaacagacatggtgttcttcggcaacgttgatagctctggcatcaaacacaacatctttaatcctcccataatagctcggtacatcagattgcatccgacccactacagcattaggagtacactccgaatggagcttatgggttgcgacttgaattcctgttcaatgccactcggaatggagtctaaagccatctctgatgcacagataaccgccagtagctactttacgaacatgtttgctacgtggtcaccctctaaggcaaggcttcatttgcaaggccggtctaatgcctggagacctcaggtgaacaacccgaaagaatggctccaggtggactttcagaagaccatgaaagtaacaggtgtcactactcagggagttaagtccttggatactagcatgtatgtgaaggagttccttatttcctcatcacaagatggccaccagtggaccctcttctttcagaatggtaaggtcaaagtgtttcagggcaatcaagacagcttcacacccgtggtgaacagtcttgatcctccactcttgacacgataccttcgaatccatccacagtcttgggagcaccagattgcattgcgcatggaagtacttggatgcgaggctcaggacctctac

SEQ ID NO: 1466 - protein, 1457 aa, synthetic construct
  REGION 1..1457: note = Variant of human B-domain deleted Factor VIII
MQIELSTCFFLCLLRFCFSATRRYYLGAVELSWDYMQSDLGELPVDARFPPRVPKSFPFNTSQVYKKTLFVEFTDHLFNIAKPRPPWMGLLGPTIQAEVYDTVVITLKNMASHPVSLHAVGVSYWKASEGAEYDDQTSQREKEDDKVFPGGSHTYVWQVLKENGPMASDPPCLTYSYLSHVDLVKDLNSGLIGALLVCREGSLAKEKTQTLAKFILLFAVFDEGKSWHSETKNSLMQDRDAASARAWPKMHTVNGYVNRTLPGLIGCHRKSVYWHVIGMGTTPEVHSIFLEGHTFLVRNHRQASLGISPITFLTAQTLLQDLGQFLLFCHIPSHQHDGMEAYVKVDSCPEEPQLRMKNNEEAEDYDDDLTDSEMDVVRFDDDNSPSIIQARSGAKKHPKTWVHYIAAEEEDWDYAPLVLAPDDRSYKSQYLNNGPQRIGRKYKKVRFMAYTDETFKTREAIQHESGILGPLLYGEVGDTLLIIFKNQASRPYNIYPHGITDVRPLYSRRLPKGVKHLKDFPILPGEIFKYKWTITVEDGPTKSDPRCLTRYYSSFVNMERDLASGLIGPLLICYKESVDQRGNQIMSDKRNVILFSVFDENRSWYLTENIQRFLPNPAEVQLEDPEFQASNIMHSINGYVFDSLQLSVCLHEVAYWYILSIGAQTDFLSVFFSGYTFKHKGVYEDTLTLFPFSGETVFMSMENPGLWILGCHNSDFRNRGMTALLKVSSCDWNTGDYYEDSYEDISAYFDSKNNAIEPRSFSQNPPVLKRHQREGTRTTLQSDQEEIDYDDTISVEWKKEDFDIYDEDENQSPRSFQKKTRHYFIAAVERLWDYGMSSKPHVLRNRAQSGSVPQFKKVVFQEFTDGSFTQPLYRGELNEHLGLLGPYIRAEVEDNIMVTFRNQASRPYSFYSSLISYEEDQRQGAEPRKNFVKPNETKTYFWKVQHHMAPTKDEFDCKAWAYFSDVDLEKDVHSGLIGPLLVCHTNTLNPAHGRQVTVQEFALFFTIFDETKSWYFTENMERNCRAPCNIQMEDPTFKENYRFHAINGYIMDTLPGLVMAQDQRIRWYLLSMGSNENIHSIHFSGHVFTVRKKEEYKMALYNLYPGVFETVEMLPSKAGIWRVECLIGEHLHAGMSTLFLVYSNKCQNPLGMASGHIRDFQITASGQYGQWAPKLARLHYSGSINAWSTKEPFSWIKVDLLAPMIIHGIKTQGARQKFSSLYISQFIIMYSLDGKKWQTYRGNSTGTDMVFFGNVDSSGIKHNIFNPPIIARYIRLHPTHYSIRSTLRMELMGCDLNSCSMPLGMESKAISDAQITASSYFTNMFATWSPSKARLHLQGRSNAWRPQVNNPKEWLQVDFQKTMKVTGVTTQGVKSLDTSMYVKEFLISSSQDGHQWTLFFQNGKVKVFQGNQDSFTPVVNSLDPPLLTRYLRIHPQSWEHQIALRMEVLGCEAQDLY

SEQ ID NO: 1467 - DNA, 4371 bp, synthetic construct
  misc_feature 1..4371: note = Variant of human B-domain deleted Factor VIII
  source 1..4371: mol_type = other DNA
atgcagattgaactgtctacctgcttcttcctctgtttgctgaggttctgctttagcgccactagacggtactaccttggcgctgtggagctgtcctgggactatatgcagagtgatttgggagagcttcccgtcgacgcacgatttcctcctcgcgttccaaagtcatttccctttaacacaagccaggtgtacaagaagacgctcttcgtcgaattcaccgatcacctgttcaatatcgccaaacccagaccaccatggatgggtcttttggggcctaccatacaagcggaggtgtatgacacagttgttatcactctcaagaacatggcttctcatccggtaagtcttcacgcagtgggcgtgtcctactggaaagcttcagaaggagccgagtatgatgatcagacatcccagagggagaaagaagacgacaaggtatttccaggtgggtctcatacctatgtgtggcaagtgctcaaagagaatggccctatggcaagcgatccgccgtgtttgacttacagctacctttcacacgttgacctcgtcaaggacctcaactccgggttgattggagccttgttggtatgcagggaaggatctcttgccaaagagaagacacagaccctccacaagtttatccttctctttgctgtgttcgatgagggcaaaagttggcatagcgaaacgaagaattccctcatgcaggatcgcgacgcagccagcgccagagcttggcccaagatgcacactgtgaacggatatgtcaataggacgcttcctggcttgattgggtgtcatcggaaaagtgtctactggcacgtgatcggaatggggacaacaccagaggtccactccatatttctcgaaggccataccttccttgttcgaaaccacagacaggcatccttggggatctctcccattacctttctcactgcccaaacgctccttcgtgacttgggtcagttccttctcttttgccatatcccgtcacaccagcatgatggtatggaagcttatgtgaaagtcgacagttgtcctgaggagccacagttgcgcatgaagaataatgaagaagccgaggattacgacgacgatctcaccgattctgagatggacgtggtgaggtttgatgacgacaactctccctccatcattcaagctcggagcggggcgaagaaacaccccaagacttgggtccactatatagcggcggaagaggaggattgggattacgctcctcttgtattggcaccagatgaccgctcatacaaaagccagtacctcaacaacggaccgcagagaattggccggaagtataagaaagtgcgatttatggcctatacagacgaaacctttaagacaagggaggccatccagcatgagagtgggattttgggacctcttctttacggcgaagttggtgataccctcctcatcatcttcaagaatcaagcttctcgcccctataacatttacccacacgggatcactgacgttaggcctttgtatagcagaagacttcccaaaggcgtgaagcatctcaaagacttccccattttgccaggcgagatctttaagtacaaatggaccgttacagtggaagatggaccgactaaatcagaccctcgatgccttacgcggtactattcctccttcgtgaattgggagagagatttggcaagcggactcataggaccactcctcatctgttacaaggaatctgtagaccagaggggtaaccagattatgagtgataaacgcaatgtgatcctttttagcgtcttcgacgagaaccggtcctggtacttgaccgagaatatacaaaggttccttcccaaccctgcagaggttcagttggaagaccctgagtttcaggccagcaatattatgcactcaatcaacggctatgtgtttgatagtctccagctttctgtttgcctccatgaagtagcctattggtacatcttgtcaattggtgctcaaacagacttcctctccgtcttcttctccggctacacctttaagcacaagatggtgtatgaggacactctcacactctttccattttctggagaaaccgtgttcatgagcatggagaatccaggcctttggatcttgggttgccacaacagtgattttcgcaatcggggaatgactgctctcctcaaagtcagcagctgtgataaaaacacaggcgactattacgaagattcttacgaggacataagtgcctactttgactccaagaataacgccattgagcccagatcattctcccagaatcctcccgtgcttaaaaggcatcagcgcgaaggtaccagaactactcttcagtctgatcaagaggagattgactatgacgacaccattagcgtggaaatgaagaaggaggatttcgatatctatgacgaagatgagaaccagtctccgcggagctttcagaagaagacgcgacactacttcattgcagcagtcgaaaggctttgggactacggtatgtcatcaaaacctcatgtgttgcgcaatagagctcagagtggaagtgttccacagttcaagaaagtcgtctttcaagagtttacagatggcagcttcacacagcctctctatcggggcgagcttaacgaacatttgggactccttggtccctatatccgagccgaagtggaggacaacattatggttacctttaggaatcaagcctctcgcccctacagcttctactcctccctcatcagttatgaggaggatcagagacaaggcgctgaaccacggaagaactttgtgaaaccgaatgagacgaagacctacttctggaaagtacagcaccacatggcccccacaaaagacgaattcgattgcaaagcatgggcgtatttttcagacgttgacttggagaaagatgtacattcaggacttattggtcctttgttggtgtgtcacactaacactctcaatccagcccatggcaggcaggtgacagtccaggaattcgctcttttctttaccatctttgatgagaccaagtcctggtacttcacggaaaacatggagcgcaattgcagagccccctgtaacatacagatggaggaccctacctttaaggaaaattatcggttccacgcaatcaacggatacattatggatacactccctggccttgtgatggctcaggaccaacgaatcaggtggtacctcctcagcatgggttctaatgagaacatacactccattcacttttcaggacatgtgttcactgtccggaagaaagaagagtataagatggccctctacaatttgtatccaggcgtgtttgagaccgttgaaatgcttccctctaaagctggcatctggagagtagagtgcttgatcggagaacatcttcacgcaggtatgagcaccttgttcctcgtgtacagcaacaaatgtcagaatccacttggcatggccagtggacacattcgcgactttcagatcacagcatctggccagtatggacaatgggccccaaagttggctcgcctccattactccggtagcataaatgcgtggtccactaaagaacctttcagctggattaaggtcgatcttcttgcccccatgatcatccacggcattaagacacagggagcgaggcagaaattctcctccctctacatctcacagttcattattatgtatagtttggacggcaagaagtggcaaacttatagaggtaacagtactggaacagacatggtgttcttcggcaacgttgatagctctggcatcaaacacaacatctttaatcctcccataatagctcggtacatcagattgcatccgacccactacagcattaggagtacactccgaatggagcttatgggttgcgacttgaattcctgttcaatgccactcggaatggagtctaaagccatctctgatgcacagataaccgccagtagctactttacgaacatgtttgctacgtggtcaccctctaaggcaaggcttcatttgcaaggccggtctaatgcctggagacctcaggtgaacaacccgaaagaatggctccaggtggactttcagaagaccatgaaagtaacaggtgtcactactcagggagttaagtccttggatactagcatgtatgtgaaggagttccttatttcctcatcacaagatggccaccagtggaccctcttctttcagaatggtaaggtcaaagtgtttcagggcaatcaagacagcttcacacccgtggtgaacagtcttgatcctccactcttgacacgataccttcgaatccatccacagtcttgggagcaccagattgcattgcgcatggaagtacttggatgcgaggctcaggacctctac

SEQ ID NO: 1468 - protein, 1457 aa, synthetic construct
  REGION 1..1457: note = Variant of human B-domain deleted Factor VIII
MQIELSTCFFLCLLRFCFSATRRYYLGAVELSWDYMQSDLGELPVDARFPPRVPKSFPFNTSQVYKKTLFVEFTDHLFNIAKPRPPWMGLLGPTIQAEVYDTVVITLKNMASHPVSLHAVGVSYWKASEGAEYDDQTSQREKEDDKVFPGGSHTYVWQVLKENGPMASDPPCLTYSYLSHVDLVKDLNSGLIGALLVCREGSLAKEKTQTLHKFILLFAVFDEGKSWHSETKNSLMQDRDAASARAWPKMHTVNGYVNRTLPGLIGCHRKSVYWHVIGMGTTPEVHSIFLEGHTFLVRNHRQASLGISPITFLTAQTLLRDLGQFLLFCHIPSHQHDGMEAYVKVDSCPEEPQLRMKNNEEAEDYDDDLTDSEMDVVRFDDDNSPSIIQARSGAKKHPKTWVHYIAAEEEDWDYAPLVLAPDDRSYKSQYLNNGPQRIGRKYKKVRFMAYTDETFKTREAIQHESGILGPLLYGEVGDTLLIIFKNQASRPYNIYPHGITDVRPLYSRRLPKGVKHLKDFPILPGEIFKYKWTVTVEDGPTKSDPRCLTRYYSSFVNWERDLASGLIGPLLICYKESVDQRGNQIMSDKRNVILFSVFDENRSWYLTENIQRFLPNPAEVQLEDPEFQASNIMHSINGYVFDSLQLSVCLHEVAYWYILSIGAQTDFLSVFFSGYTFKHKMVYEDTLTLFPFSGETVFMSMENPGLWILGCHNSDFRNRGMTALLKVSSCDKNTGDYYEDSYEDISAYFDSKNNAIEPRSFSQNPPVLKRHQREGTRTTLQSDQEEIDYDDTISVEMKKEDFDIYDEDENQSPRSFQKKTRHYFIAAVERLWDYGMSSKPHVLRNRAQSGSVPQFKKVVFQEFTDGSFTQPLYRGELNEHLGLLGPYIRAEVEDNIMVTFRNQASRPYSFYSSLISYEEDQRQGAEPRKNFVKPNETKTYFWKVQHHMAPTKDEFDCKAWAYFSDVDLEKDVHSGLIGPLLVCHTNTLNPAHGRQVTVQEFALFFTIFDETKSWYFTENMERNCRAPCNIQMEDPTFKENYRFHAINGYIMDTLPGLVMAQDQRIRWYLLSMGSNENIHSIHFSGHVFTVRKKEEYKMALYNLYPGVFETVEMLPSKAGIWRVECLIGEHLHAGMSTLFLVYSNKCQNPLGMASGHIRDFQITASGQYGQWAPKLARLHYSGSINAWSTKEPFSWIKVDLLAPMIIHGIKTQGARQKFSSLYISQFIIMYSLDGKKWQTYRGNSTGTDMVFFGNVDSSGIKHNIFNPPIIARYIRLHPTHYSIRSTLRMELMGCDLNSCSMPLGMESKAISDAQITASSYFTNMFATWSPSKARLHLQGRSNAWRPQVNNPKEWLQVDFQKTMKVTGVTTQGVKSLDTSMYVKEFLISSSQDGHQWTLFFQNGKVKVFQGNQDSFTPVVNSLDPPLLTRYLRIHPQSWEHQIALRMEVLGCEAQDLY

SEQ ID NO: 1469 - DNA, 4371 bp, synthetic construct
  misc_feature 1..4371: note = Variant of human B-domain deleted Factor VIII
  source 1..4371: mol_type = other DNA
atgcagattgaactgtctacctgcttcttcctctgtttgctgaggttctgctttagcgccactagacggtactaccttggcgctgtggagctgtcctgggactatatgcagagtgatttgggagagcttcccgtcgacgcacgatttcctcctcgcgttccaaagtcatttccctttaacacaagccaggtgtacaagaagacgctcttcgtcgaattcaccgatcacctgttcaatatcgccaaacccagaccaccatggatgggtcttttggggcctaccatacaagcggaggtgtatgacacagttgttatcactctcaagaacatggcttctcatccggtaagtcttcacgcagtgggcgtgtcctactggaaagcttcagaaggagccgagtatgatgatcagacatcccagagggagaaagaagacgacaaggtatttccaggtgggtctcatacctatgtgtggcaagtgctcaaagagaatggccctatggcaagcgatccgccgtgtttgacttacagctacctttcacacgttgacctcgtcaaggacctcaactccgggttgattggagccttgttggtatgcagggaaggatctcttgccaaagagaagacacagaccaaagccaagtttatccttctctttgctgtgttcgatgagggcaaaagttggcatagcgaaacgaagaattccctcatgcaggatcgcgacgcagccagcgccagagcttggcccaagatgcacactgtgaacggatatgtcaataggacgcttcctggcttgattgggtgtcatcggaaaagtgtctactggcacgtgatcggaatggggacaacaccagaggtccactccatatttctcgaaggccataccttccttgttcgaaaccacagacaggcatccttggggatctctcccattaccctgctcactgcccaaacgctccttatggacttgggtcagttccttctcttttgccatatcccgtcacaccagcatgatggtatggaagcttatgtgaaagtcgacagttgtcctgaggagccacagttgcgcatgaagaataatgaagaagccgaggattacgacgacgatctcaccgattctgagatggacgtggtgaggtttgatgacgacaactctccctccatcattcaagctcggagcggggcgaagaaacaccccaagacttgggtccactatatagcggcggaagaggaggattgggattacgctcctcttgtattggcaccagatgaccgctcatacaaaagccagtacctcaacaacggaccgcagagaattggccggaagtataagaaagtgcgatttatggcctatacagacgaaacctttaagacaagggaggccatccagcatgagagtgggattttgggacctcttctttacggcgaagttggtgataccctcctcatcatcttcaagaatcaagcttctcgcccctataacatttacccacacgggatcactgacgttaggcctttgtatagcagaagacttcccaaaggcgtgaagcatctcaaagacttccccattttgccaggcgagatctttaagtacaaatggaccattacagtggaagatggaccgactaaatcagaccctcgatgccttacgcggtactattcctccttcgtgaattgggagagagatttggcaagcggactcataggaccactcctcatctgttacaaggaatctgtagaccagaggggtaaccagattatgagtgataaacgcaatgtgatcctttttagcgtcttcgacgagaaccggtcctggtacttgaccgagaatatacaaaggttccttcccaaccctgcagaggttcagttggaagaccctgagtttcaggccagcaatattatgcactcaatcaacggctatgtgtttgatagtctccagctttctgtttgcctccatgaagtagcctattggtacatcttgtcaattggtgctcaaacagacttcctctccgtcttcttctccggctacacctttaagcacaagaacgtgtatgaggacactctcacactctttccattttctggagaaaccgtgttcatgagcatggagaatccaggcctttggatcttgggttgccacaacagtgattttcgcaatcggggaatgactgctctcctcaaagtcagcagctgtgataaaaacacaggcgactattacgaagattcttacgaggacataagtgcctactttgactccaagaataacgccattgagcccagatcattctcccagaatcctcccgtgcttaaaaggcatcagcgcgaaggtaccagaactactcttcagtctgatcaagaggagattgactatgacgacaccattagcgtggaaatgaagaaggaggatttcgatatctatgacgaagatgagaaccagtctccgcggagctttcagaagaagacgcgacactacttcattgcagcagtcgaaaggctttgggactacggtatgtcatcaaaacctcatgtgttgcgcaatagagctcagagtggaagtgttccacagttcaagaaagtcgtctttcaagagtttacagatggcagcttcacacagcctctctatcggggcgagcttaacgaacatttgggactccttggtccctatatccgagccgaagtggaggacaacattatggttacctttaggaatcaagcctctcgcccctacagcttctactcctccctcatcagttatgaggaggatcagagacaaggcgctgaaccacggaagaactttgtgaaaccgaatgagacgaagacctacttctggaaagtacagcaccacatggcccccacaaaagacgaattcgattgcaaagcatgggcgtatttttcagacgttgacttggagaaagatgtacattcaggacttattggtcctttgttggtgtgtcacactaacactctcaatccagcccatggcaggcaggtgacagtccaggaattcgctcttttctttaccatctttgatgagaccaagtcctggtacttcacggaaaacatggagcgcaattgcagagccccctgtaacatacagatggaggaccctacctttaaggaaaattatcggttccacgcaatcaacggatacattatggatacactccctggccttgtgatggctcaggaccaacgaatcaggtggtacctcctcagcatgggttctaatgagaacatacactccattcacttttcaggacatgtgttcactgtccggaagaaagaagagtataagatggccctctacaatttgtatccaggcgtgtttgagaccgttgaaatgcttccctctaaagctggcatctggagagtagagtgcttgatcggagaacatcttcacgcaggtatgagcaccttgttcctcgtgtacagcaacaaatgtcagaatccacttggcatggccagtggacacattcgcgactttcagatcacagcatctggccagtatggacaatgggccccaaagttggctcgcctccattactccggtagcataaatgcgtggtccactaaagaacctttcagctggattaaggtcgatcttcttgcccccatgatcatccacggcattaagacacagggagcgaggcagaaattctcctccctctacatctcacagttcattattatgtatagtttggacggcaagaagtggcaaacttatagaggtaacagtactggaacagacatggtgttcttcggcaacgttgatagctctggcatcaaacacaacatctttaatcctcccataatagctcggtacatcagattgcatccgacccactacagcattaggagtacactccgaatggagcttatgggttgcgacttgaattcctgttcaatgccactcggaatggagtctaaagccatctctgatgcacagataaccgccagtagctactttacgaacatgtttgctacgtggtcaccctctaaggcaaggcttcatttgcaaggccggtctaatgcctggagacctcaggtgaacaacccgaaagaatggctccaggtggactttcagaagaccatgaaagtaacaggtgtcactactcagggagttaagtccttggatactagcatgtatgtgaaggagttccttatttcctcatcacaagatggccaccagtggaccctcttctttcagaatggtaaggtcaaagtgtttcagggcaatcaagacagcttcacacccgtggtgaacagtcttgatcctccactcttgacacgataccttcgaatccatccacagtcttgggagcaccagattgcattgcgcatggaagtacttggatgcgaggctcaggacctctac

SEQ ID NO: 1470 - protein, 1457 aa, synthetic construct
  REGION 1..1457: note = Variant of human B-domain deleted Factor VIII
MQIELSTCFFLCLLRFCFSATRRYYLGAVELSWDYMQSDLGELPVDARFPPRVPKSFPFNTSQVYKKTLFVEFTDHLFNIAKPRPPWMGLLGPTIQAEVYDTVVITLKNMASHPVSLHAVGVSYWKASEGAEYDDQTSQREKEDDKVFPGGSHTYVWQVLKENGPMASDPPCLTYSYLSHVDLVKDLNSGLIGALLVCREGSLAKEKTQTKAKFILLFAVFDEGKSWHSETKNSLMQDRDAASARAWPKMHTVNGYVNRTLPGLIGCHRKSVYWHVIGMGTTPEVHSIFLEGHTFLVRNHRQASLGISPITLLTAQTLLMDLGQFLLFCHIPSHQHDGMEAYVKVDSCPEEPQLRMKNNEEAEDYDDDLTDSEMDVVRFDDDNSPSIIQARSGAKKHPKTWVHYIAAEEEDWDYAPLVLAPDDRSYKSQYLNNGPQRIGRKYKKVRFMAYTDETFKTREAIQHESGILGPLLYGEVGDTLLIIFKNQASRPYNIYPHGITDVRPLYSRRLPKGVKHLKDFPILPGEIFKYKWTITVEDGPTKSDPRCLTRYYSSFVNWERDLASGLIGPLLICYKESVDQRGNQIMSDKRNVILFSVFDENRSWYLTENIQRFLPNPAEVQLEDPEFQASNIMHSINGYVFDSLQLSVCLHEVAYWYILSIGAQTDFLSVFFSGYTFKHKNVYEDTLTLFPFSGETVFMSMENPGLWILGCHNSDFRNRGMTALLKVSSCDKNTGDYYEDSYEDISAYFDSKNNAIEPRSFSQNPPVLKRHQREGTRTTLQSDQEEIDYDDTISVEMKKEDFDIYDEDENQSPRSFQKKTRHYFIAAVERLWDYGMSSKPHVLRNRAQSGSVPQFKKVVFQEFTDGSFTQPLYRGELNEHLGLLGPYIRAEVEDNIMVTFRNQASRPYSFYSSLISYEEDQRQGAEPRKNFVKPNETKTYFWKVQHHMAPTKDEFDCKAWAYFSDVDLEKDVHSGLIGPLLVCHTNTLNPAHGRQVTVQEFALFFTIFDETKSWYFTENMERNCRAPCNIQMEDPTFKENYRFHAINGYIMDTLPGLVMAQDQRIRWYLLSMGSNENIHSIHFSGHVFTVRKKEEYKMALYNLYPGVFETVEMLPSKAGIWRVECLIGEHLHAGMSTLFLVYSNKCQNPLGMASGHIRDFQITASGQYGQWAPKLARLHYSGSINAWSTKEPFSWIKVDLLAPMIIHGIKTQGARQKFSSLYISQFIIMYSLDGKKWQTYRGNSTGTDMVFFGNVDSSGIKHNIFNPPIIARYIRLHPTHYSIRSTLRMELMGCDLNSCSMPLGMESKAISDAQITASSYFTNMFATWSPSKARLHLQGRSNAWRPQVNNPKEWLQVDFQKTMKVTGVTTQGVKSLDTSMYVKEFLISSSQDGHQWTLFFQNGKVKVFQGNQDSFTPVVNSLDPPLLTRYLRIHPQSWEHQIALRMEVLGCEAQDLY

SEQ ID NO: 1471 - DNA, 4371 bp, synthetic construct
  misc_feature 1..4371: note = Variant of human B-domain deleted Factor VIII
  source 1..4371: mol_type = other DNA
atgcagattgaactgtctacctgcttcttcctctgtttgctgaggttctgctttagcgccactagacggtactaccttggcgctgtggagctgtcctgggactatatgcagagtgatttgggagagcttcccgtcgacgcacgatttcctcctcgcgttccaaagtcatttccctttaacacaagccaggtgtacaagaagacgctcttcgtcgaattcaccgatcacctgttcaatatcgccaaacccagaccaccatggatgggtcttttggggcctaccatacaagcggaggtgtatgacacagttgttatcactctcaagaacatggcttctcatccggtaagtcttcacgcagtgggcgtgtcctactggaaagcttcagaaggagccgagtatgatgatcagacatcccagagggagaaagaagacgacaaggtatttccaggtgggtctcatacctatgtgtggcaagtgctcaaagagaatggccctatggcaagcgatccgccgtgtttgacttacagctacctttcacacgttgacctcgtcaaggacctcaactccgggttgattggagccttgttggtatgcagggaaggatctcttgccaaagagaagacacagaccctccacaagtttatccttctctttgctgtgttcgatgagggcaaaagttggcatagcgaaacgaagaattccctcatgcaggatcgcgacgcagccagcgccagagcttggcccaagatgcacactgtgaacggatatgtcaataggacgcttcctggcttgattgggtgtcatcggaaaagtgtctactggcacgtgatcggaatggggacaacaccagaggtccactccatatttctcgaaggccataccttccttgttcgaaaccacagacaggcatccttggggatctctcccattacctttctcactgcccaaacgctccttcgtgacttgggtcagttccttctcttttgccatatcccgtcacaccagcatgatggtatggaagcttatgtgaaagtcgacagttgtcctgaggagccacagttgcgcatgaagaataatgaagaagccgaggattacgacgacgatctcaccgattctgagatggacgtggtgaggtttgatgacgacaactctccctccatcattcaagctcggagcggggcgaagaaacaccccaagacttgggtccactatatagcggcggaagaggaggattgggattacgctcctcttgtattggcaccagatgaccgctcatacaaaagccagtacctcaacaacggaccgcagagaattggccggaagtataagaaagtgcgatttatggcctatacagacgaaacctttaagacaagggaggccatccagcatgagagtgggattttgggacctcttctttacggcgaagttggtgataccctcctcatcatcttcaagaatcaagcttctcgcccctataacatttacccacacgggatcactgacgttaggcctttgtatagcagaagacttcccaaaggcgtgaagcatctcaaagacttccccattttgccaggcgagatctttaagtacaaatggaccattacagtggaagatggaccgactaaatcagaccctcgatgccttacgcggtactattcctccttcgtgaatagggagagagatttggcaagcggactcataggaccactcctcatctgttacaaggaatctgtagaccagaggggtaaccagattatgagtgataaacgcaatgtgatcctttttagcgtcttcgacgagaaccggtcctggtacttgaccgagaatatacaaaggttccttcccaaccctgcagaggttcagttggaagaccctgagtttcaggccagcaatattatgcactcaatcaacggctatgtgtttgatagtctccagctttctgtttgcctccatgaagtagcctattggtacatcttgtcaattggtgctcaaacagacttcctctccgtcttcttctccggctacacctttaagcacaagatggtgtatgaggacactctcacactctttccattttctggagaaaccgtgttcatgagcatggagaatccaggcctttggatcttgggttgccacaacagtgattttcgcaatcggggaatgactgctctcctcaaagtcagcagctgtgataaaaacacaggcgactattacgaagattcttacgaggacataagtgcctactttgactccaagaataacgccattgagcccagatcattctcccagaatcctcccgtgcttaaaaggcatcagcgcgaaggtaccagaactactcttcagtctgatcaagaggagattgactatgacgacaccattagcgtggaatggaagaaggaggatttcgatatctatgacgaagatgagaaccagtctccgcggagctttcagaagaagacgcgacactacttcattgcagcagtcgaaaggctttgggactacggtatgtcatcatcccctcatgtgttgcgcaatagagctcagagtggaagtgttccacagttcaagaaagtcgtctttcaagagtttacagatggcagcttcacacagcctctctatcggggcgagcttaacgaacatttgggactccttggtccctatatccgagccgaagtggaggacaacattatggttacctttaggaatcaagcctctcgcccctacagcttctactcctccctcatcagttatgaggaggatcagagacaaggcgctgaaccacggaagaactttgtgaaaccgaatgagacgaagacctacttctggaaagtacagcaccacatggcccccacaaaagacgaattcgattgcaaagcatgggcgtatttttcagacgttgacttggagaaagatgtacattcaggacttattggtcctttgttggtgtgtcacactaacactctcaatccagcccatggcaggcaggtgacagtccaggaattcgctcttttctttaccatctttgatgagaccaagtcctggtacttcacggaaaacatggagcgcaattgcagagccccctgtaacatacagatggaggaccctacctttaaggaaaattatcggttccacgcaatcaacggatacattatggatacactccctggccttgtgatggctcaggaccaacgaatcaggtggtacctcctcagcatgggttctaatgagaacatacactccattcacttttcaggacatgtgttcactgtccggaagaaagaagagtataagatggccctctacaatttgtatccaggcgtgtttgagaccgttgaaatgcttccctctaaagctggcatctggagagtagagtgcttgatcggagaacatcttcacgcaggtatgagcaccttgttcctcgtgtacagcaacaaatgtcagaatccacttggcatggccagtggacacattcgcgactttcagatcacagcatctggccagtatggacaatgggccccaaagttggctcgcctccattactccggtagcataaatgcgtggtccactaaagaacctttcagctggattaaggtcgatcttcttgcccccatgatcatccacggcattaagacacagggagcgaggcagaaattctcctccctctacatctcacagttcattattatgtatagtttggacggcaagaagtggcaaacttatagaggtaacagtactggaacagacatggtgttcttcggcaacgttgatagctctggcatcaaacacaacatctttaatcctcccataatagctcggtacatcagattgcatccgacccactacagcattaggagtacactccgaatggagcttatgggttgcgacttgaattcctgttcaatgccactcggaatggagtctaaagccatctctgatgcacagataaccgccagtagctactttacgaacatgtttgctacgtggtcaccctctaaggcaaggcttcatttgcaaggccggtctaatgcctggagacctcaggtgaacaacccgaaagaatggctccaggtggactttcagaagaccatgaaagtaacaggtgtcactactcagggagttaagtccttggatactagcatgtatgtgaaggagttccttatttcctcatcacaagatggccaccagtggaccctcttctttcagaatggtaaggtcaaagtgtttcagggcaatcaagacagcttcacacccgtggtgaacagtcttgatcctccactcttgacacgataccttcgaatccatccacagtcttgggagcaccagattgcattgcgcatggaagtacttggatgcgaggctcaggacctctac

SEQ ID NO: 1472 - protein, 1457 aa, synthetic construct
  REGION 1..1457: note = Variant of human B-domain deleted Factor VIII
MQIELSTCFFLCLLRFCFSATRRYYLGAVELSWDYMQSDLGELPVDARFPPRVPKSFPFNTSQVYKKTLFVEFTDHLFNIAKPRPPWMGLLGPTIQAEVYDTVVITLKNMASHPVSLHAVGVSYWKASEGAEYDDQTSQREKEDDKVFPGGSHTYVWQVLKENGPMASDPPCLTYSYLSHVDLVKDLNSGLIGALLVCREGSLAKEKTQTLHKFILLFAVFDEGKSWHSETKNSLMQDRDAASARAWPKMHTVNGYVNRTLPGLIGCHRKSVYWHVIGMGTTPEVHSIFLEGHTFLVRNHRQASLGISPITFLTAQTLLRDLGQFLLFCHIPSHQHDGMEAYVKVDSCPEEPQLRMKNNEEAEDYDDDLTDSEMDVVRFDDDNSPSIIQARSGAKKHPKTWVHYIAAEEEDWDYAPLVLAPDDRSYKSQYLNNGPQRIGRKYKKVRFMAYTDETFKTREAIQHESGILGPLLYGEVGDTLLIIFKNQASRPYNIYPHGITDVRPLYSRRLPKGVKHLKDFPILPGEIFKYKWTITVEDGPTKSDPRCLTRYYSSFVNRERDLASGLIGPLLICYKESVDQRGNQIMSDKRNVILFSVFDENRSWYLTENIQRFLPNPAEVQLEDPEFQASNIMHSINGYVFDSLQLSVCLHEVAYWYILSIGAQTDFLSVFFSGYTFKHKMVYEDTLTLFPFSGETVFMSMENPGLWILGCHNSDFRNRGMTALLKVSSCDKNTGDYYEDSYEDISAYFDSKNNAIEPRSFSQNPPVLKRHQREGTRTTLQSDQEEIDYDDTISVEWKKEDFDIYDEDENQSPRSFQKKTRHYFIAAVERLWDYGMSSSPHVLRNRAQSGSVPQFKKVVFQEFTDGSFTQPLYRGELNEHLGLLGPYIRAEVEDNIMVTFRNQASRPYSFYSSLISYEEDQRQGAEPRKNFVKPNETKTYFWKVQHHMAPTKDEFDCKAWAYFSDVDLEKDVHSGLIGPLLVCHTNTLNPAHGRQVTVQEFALFFTIFDETKSWYFTENMERNCRAPCNIQMEDPTFKENYRFHAINGYIMDTLPGLVMAQDQRIRWYLLSMGSNENIHSIHFSGHVFTVRKKEEYKMALYNLYPGVFETVEMLPSKAGIWRVECLIGEHLHAGMSTLFLVYSNKCQNPLGMASGHIRDFQITASGQYGQWAPKLARLHYSGSINAWSTKEPFSWIKVDLLAPMIIHGIKTQGARQKFSSLYISQFIIMYSLDGKKWQTYRGNSTGTDMVFFGNVDSSGIKHNIFNPPIIARYIRLHPTHYSIRSTLRMELMGCDLNSCSMPLGMESKAISDAQITASSYFTNMFATWSPSKARLHLQGRSNAWRPQVNNPKEWLQVDFQKTMKVTGVTTQGVKSLDTSMYVKEFLISSSQDGHQWTLFFQNGKVKVFQGNQDSFTPVVNSLDPPLLTRYLRIHPQSWEHQIALRMEVLGCEAQDLY

SEQ ID NO: 1473 - DNA, 4371 bp, synthetic construct
  misc_feature 1..4371: note = Variant of human B-domain deleted Factor VIII
  source 1..4371: mol_type = other DNA
atgcagattgaactgtctacctgcttcttcctctgtttgctgaggttctgctttagcgccactagacggtactaccttggcgctgtggagctgtcctgggactatatgcagagtgatttgggagagcttcccgtcgacgcacgatttcctcctcgcgttccaaagtcatttccctttaacacaagccaggtgtacaagaagacgctcttcgtcgaattcaccgatcacctgttcaatatcgccaaacccagaccaccatggatgggtcttttggggcctaccatacaagcggaggtgtatgacacagttgttatcactctcaagaacatggcttctcatccggtaagtcttcacgcagtgggcgtgtcctactggaaagcttcagaaggagccgagtatgatgatcagacatcccagagggagaaagaagacgacaaggtatttccaggtgggtctcatacctatgtgtggcaagtgctcaaagagaatggccctatggcaagcgatccgccgtgtttgacttacagctacctttcacacgttgacctcgtcaaggacctcaactccgggttgattggagccttgttggtatgcagggaaggatctcttgccaaagagaagacacagaccctgcacaagtttatccttctctttgctgtgttcgatgagggcaaaagttggcatagcgaaacgaagaattccctcatgcaggatcgcgacgcagccagcgccagagcttggcccaagatgcacactgtgaacggatatgtcaataggacgcttcctggcttgattgggtgtcatcggaaaagtgtctactggcacgtgatcggaatggggacaacaccagaggtccactccatatttctcgaaggccataccttccttgttcgaaaccacagacaggcatccttggggatctctcccattacctttctcactgcccaaacgctccttatggacttgggtcagttccttctcttttgccatatcccgtcacaccagcatgatggtatggaagcttatgtgaaagtcgacagttgtcctgaggagccacagttgcgcatgaagaataatgaagaagccgaggattacgacgacgatctcaccgattctgagatggacgtggtgaggtttgatgacgacaactctccctccatcattcaagctcggagcggggcgaagaaacaccccaagacttgggtccactatatagcggcggaagaggaggattgggattacgctcctcttgtattggcaccagatgaccgctcatacaaaagccagtacctcaacaacggaccgcagagaattggccggaagtataagaaagtgcgatttatggcctatacagacgaaacctttaagacaagggaggccatccagcatgagagtgggattttgggacctcttctttacggcgaagttggtgataccctcctcatcatcttcaagaatcaagcttctcgcccctataacatttacccacacgggatcactgacgttaggcctttgtatagcagaagacttcccaaaggcgtgaagcatctcaaagacttccccattttgccaggcgagatctttaagtacaaatggaccgttacagtggaagatggaccgactaaatcagaccctcgatgccttacgcggtactattcctccttcgtgaattgggagagagatttggcaagcggactcataggaccactcctcatctgttacaaggaatctgtagaccagaggggtaaccagattatgagtgataaacgcaatgtgatcctttttagcgtcttcgacgagaaccggtcctggtacttgaccgagaatatacaaaggttccttcccaacgacgcagaggttcagttggaagaccctgagtttcaggccagcaatattatgcactcaatcaacggctatgtgtttgatagtctccagctttctgtttgcctccatgaagtagcctattggtacatcttgtcaattggtgctcaaacagacttcctctccgtcttcttctccggctacacctttaagcacaagaacgtgtatgaggacactctcacactctttccattttctggagaaaccgtgttcatgagcatggagaatccaggcctttggatcttgggttgccacaacagtgattttcgcaatcggggaatgactgctctcctcaaagtcagcagctgtgattggaacacaggcgactattacgaagattcttacgaggacataagtgcctactttgactccaagaataacgccattgagcccagatcattctcccagaatcctcccgtgcttaaaaggcatcagcgcgaaggtaccagaactactcttcagtctgatcaagaggagattgactatgacgacaccattagcgtggaaatgaagaaggaggatttcgatatctatgacgaagatgagaaccagtctccgcggagctttcagaagaagacgcgacactacttcattgcagcagtcgaaaggctttgggactacggtatgtcatcatcccctcatgtgttgcgcaatagagctcagagtggaagtgttccacagttcaagaaagtcgtctttcaagagtttacagatggcagcttcacacagcctctctatcggggcgagcttaacgaacatttgggactccttggtccctatatccgagccgaagtggaggacaacattatggttacctttaggaatcaagcctctcgcccctacagcttctactcctccctcatcagttatgaggaggatcagagacaaggcgctgaaccacggaagaactttgtgaaaccgaatgagacgaagacctacttctggaaagtacagcaccacatggcccccacaaaagacgaattcgattgcaaagcatgggcgtatttttcagacgttgacttggagaaagatgtacattcaggacttattggtcctttgttggtgtgtcacactaacactctcaatccagcccatggcaggcaggtgacagtccaggaattcgctcttttctttaccatctttgatgagaccaagtcctggtacttcacggaaaacatggagcgcaattgcagagccccctgtaacatacagatggaggaccctacctttaaggaaaattatcggttccacgcaatcaacggatacattatggatacactccctggccttgtgatggctcaggaccaacgaatcaggtggtacctcctcagcatgggttctaatgagaacatacactccattcacttttcaggacatgtgttcactgtccggaagaaagaagagtataagatggccctctacaatttgtatccaggcgtgtttgagaccgttgaaatgcttccctctaaagctggcatctggagagtagagtgcttgatcggagaacatcttcacgcaggtatgagcaccttgttcctcgtgtacagcaacaaatgtcagaatccacttggcatggccagtggacacattcgcgactttcagatcacagcatctggccagtatggacaatgggccccaaagttggctcgcctccattactccggtagcataaatgcgtggtccactaaagaacctttcagctggattaaggtcgatcttcttgcccccatgatcatccacggcattaagacacagggagcgaggcagaaattctcctccctctacatctcacagttcattattatgtatagtttggacggcaagaagtggcaaacttatagaggtaacagtactggaacagacatggtgttcttcggcaacgttgatagctctggcatcaaacacaacatctttaatcctcccataatagctcggtacatcagattgcatccgacccactacagcattaggagtacactccgaatggagcttatgggttgcgacttgaattcctgttcaatgccactcggaatggagtctaaagccatctctgatgcacagataaccgccagtagctactttacgaacatgtttgctacgtggtcaccctctaaggcaaggcttcatttgcaaggccggtctaatgcctggagacctcaggtgaacaacccgaaagaatggctccaggtggactttcagaagaccatgaaagtaacaggtgtcactactcagggagttaagtccttggatactagcatgtatgtgaaggagttccttatttcctcatcacaagatggccaccagtggaccctcttctttcagaatggtaaggtcaaagtgtttcagggcaatcaagacagcttcacacccgtggtgaacagtcttgatcctccactcttgacacgataccttcgaatccatccacagtcttgggagcaccagattgcattgcgcatggaagtacttggatgcgaggctcaggacctctac

SEQ ID NO: 1474 - protein, 1457 aa, synthetic construct
  REGION 1..1457: note = Variant of human B-domain deleted Factor VIII
MQIELSTCFFLCLLRFCFSATRRYYLGAVELSWDYMQSDLGELPVDARFPPRVPKSFPFNTSQVYKKTLFVEFTDHLFNIAKPRPPWMGLLGPTIQAEVYDTVVITLKNMASHPVSLHAVGVSYWKASEGAEYDDQTSQREKEDDKVFPGGSHTYVWQVLKENGPMASDPPCLTYSYLSHVDLVKDLNSGLIGALLVCREGSLAKEKTQTLHKFILLFAVFDEGKSWHSETKNSLMQDRDAASARAWPKMHTVNGYVNRTLPGLIGCHRKSVYWHVIGMGTTPEVHSIFLEGHTFLVRNHRQASLGISPITFLTAQTLLMDLGQFLLFCHIPSHQHDGMEAYVKVDSCPEEPQLRMKNNEEAEDYDDDLTDSEMDVVRFDDDNSPSIIQARSGAKKHPKTWVHYIAAEEEDWDYAPLVLAPDDRSYKSQYLNNGPQRIGRKYKKVRFMAYTDETFKTREAIQHESGILGPLLYGEVGDTLLIIFKNQASRPYNIYPHGITDVRPLYSRRLPKGVKHLKDFPILPGEIFKYKWTVTVEDGPTKSDPRCLTRYYSSFVNWERDLASGLIGPLLICYKESVDQRGNQIMSDKRNVILFSVFDENRSWYLTENIQRFLPNDAEVQLEDPEFQASNIMHSINGYVFDSLQLSVCLHEVAYWYILSIGAQTDFLSVFFSGYTFKHKNVYEDTLTLFPFSGETVFMSMENPGLWILGCHNSDFRNRGMTALLKVSSCDWNTGDYYEDSYEDISAYFDSKNNAIEPRSFSQNPPVLKRHQREGTRTTLQSDQEEIDYDDTISVEMKKEDFDIYDEDENQSPRSFQKKTRHYFIAAVERLWDYGMSSSPHVLRNRAQSGSVPQFKKVVFQEFTDGSFTQPLYRGELNEHLGLLGPYIRAEVEDNIMVTFRNQASRPYSFYSSLISYEEDQRQGAEPRKNFVKPNETKTYFWKVQHHMAPTKDEFDCKAWAYFSDVDLEKDVHSGLIGPLLVCHTNTLNPAHGRQVTVQEFALFFTIFDETKSWYFTENMERNCRAPCNIQMEDPTFKENYRFHAINGYIMDTLPGLVMAQDQRIRWYLLSMGSNENIHSIHFSGHVFTVRKKEEYKMALYNLYPGVFETVEMLPSKAGIWRVECLIGEHLHAGMSTLFLVYSNKCQNPLGMASGHIRDFQITASGQYGQWAPKLARLHYSGSINAWSTKEPFSWIKVDLLAPMIIHGIKTQGARQKFSSLYISQFIIMYSLDGKKWQTYRGNSTGTDMVFFGNVDSSGIKHNIFNPPIIARYIRLHPTHYSIRSTLRMELMGCDLNSCSMPLGMESKAISDAQITASSYFTNMFATWSPSKARLHLQGRSNAWRPQVNNPKEWLQVDFQKTMKVTGVTTQGVKSLDTSMYVKEFLISSSQDGHQWTLFFQNGKVKVFQGNQDSFTPVVNSLDPPLLTRYLRIHPQSWEHQIALRMEVLGCEAQDLY

SEQ ID NO: 1475 - DNA, 4371 bp, synthetic construct
  misc_feature 1..4371: note = Variant of human B-domain deleted Factor VIII
  source 1..4371: mol_type = other DNA
atgcagattgaactgtctacctgcttcttcctctgtttgctgaggttctgctttagcgccactagacggtactaccttggcgctgtggagctgtcctgggactatatgcagagtgatttgggagagcttcccgtcgacgcacgatttcctcctcgcgttccaaagtcatttccctttaacacaagccaggtgtacaagaagacgctcttcgtcgaattcaccgatcacctgttcaatatcgccaaacccagaccaccatggatgggtcttttggggcctaccatacaagcggaggtgtatgacacagttgttatcactctcaagaacatggcttctcatccggtaagtcttcacgcagtgggcgtgtcctactggaaagcttcagaaggagccgagtatgatgatcagacatcccagagggagaaagaagacgacaaggtatttccaggtgggtctcatacctatgtgtggcaagtgctcaaagagaatggccctatggcaagcgatccgccgtgtttgacttacagctacctttcacacgttgacctcgtcaaggacctcaactccgggttgattggagccttgttggtatgcagggaaggatctcttgccaaagagaagacacagacccaacacaagtttatccttctctttgctgtgttcgatgagggcaaaagttggcatagcgaaacgaagaattccctcatgcaggatcgcgacgcagccagcgccagagcttggcccaagatgcacactgtgaacggatatgtcaataggacgcttcctggcttgattgggtgtcatcggaaaagtgtctactggcacgtgatcggaatggggacaacaccagaggtccactccatatttctcgaaggccataccttccttgttcgaaaccacagacaggcatccttggggatctctcccattacctttctcactgcccaaacgctccttatggacttgggtcagttccttctcttttgccatatcccgtcacaccagcatgatggtatggaagcttatgtgaaagtcgacagttgtcctgaggagccacagttgcgcatgaagaataatgaagaagccgaggattacgacgacgatctcaccgattctgagatggacgtggtgaggtttgatgacgacaactctccctccatcattcaagctcggagcggggcgaagaaacaccccaagacttgggtccactatatagcggcggaagaggaggattgggattacgctcctcttgtattggcaccagatgaccgctcatacaaaagccagtacctcaacaacggaccgcagagaattggccggaagtataagaaagtgcgatttatggcctatacagacgaaacctttaagacaagggaggccatccagcatgagagtgggattttgggacctcttctttacggcgaagttggtgataccctcctcatcatcttcaagaatcaagcttctcgcccctataacatttacccacacgggatcactgacgttaggcctttgtatagcagaagacttcccaaaggcgtgaagcatctcaaagacttccccattttgccaggcgagatctttaagtacaaatggaccattacagtggaagatggaccgactaaatcagaccctcgatgccttacgcggtactattcctccttcgtgaattgggagagagatttggcaagcggactcataggaccactcctcatctgttacaaggaatctgtagaccagaggggtaaccagattatgagtgataaacgcaatgtgatcctttttagcgtcttcgacgagaaccggtcctggtacttgaccgagaatatagagaggttccttcccaaccccgcaggcgttcagttggaagaccctgagtttcaggccagcaatattatgcactcaatcaacggctatgtgtttgatagtctccagctttctgtttgcctccatgaagtagcctattggtacatcttgtcaattggtgctcaaacagacttcctctccgtcttcttctccggctacacctttaagcacaagaacgtgtatgaggacactctcacactctttccattttctggagaaaccgtgttcatgagcatggagaatccaggcctttggatcttgggttgccacaacagtgattttcgcaatcggggaatgactgctctcctcaaagtcagcagctgtgattggaacacaggcgactattacgaagattcttacgaggacataagtgcctactttgactccaagaataacgccattgagcccagatcattctcccagaatcctcccgtgcttaaaaggcatcagcgcgaaggtaccagaactactcttcagtctgatcaagaggagattgactatgacgacaccattagcgtggaaatgaagaaggaggatttcgatatctatgacgaagatgagaaccagtctccgcggagctttcagaagaagacgcgacactacttcattgcagcagtcgaaaggctttgggactacggtatgtcatcatcccctcatgtgttgcgcaatagagctcagagtggaagtgttccacagttcaagaaagtcgtctttcaagagtttacagatggcagcttcacacagcctctctatcggggcgagcttaacgaacatttgggactccttggtccctatatccgagccgaagtggaggacaacattatggttacctttaggaatcaagcctctcgcccctacagcttctactcctccctcatcagttatgaggaggatcagagacaaggcgctgaaccacggaagaactttgtgaaaccgaatgagacgaagacctacttctggaaagtacagcaccacatggcccccacaaaagacgaattcgattgcaaagcatgggcgtatttttcagacgttgacttggagaaagatgtacattcaggacttattggtcctttgttggtgtgtcacactaacactctcaatccagcccatggcaggcaggtgacagtccaggaattcgctcttttctttaccatctttgatgagaccaagtcctggtacttcacggaaaacatggagcgcaattgcagagccccctgtaacatacagatggaggaccctacctttaaggaaaattatcggttccacgcaatcaacggatacattatggatacactccctggccttgtgatggctcaggaccaacgaatcaggtggtacctcctcagcatgggttctaatgagaacatacactccattcacttttcaggacatgtgttcactgtccggaagaaagaagagtataagatggccctctacaatttgtatccaggcgtgtttgagaccgttgaaatgcttccctctaaagctggcatctggagagtagagtgcttgatcggagaacatcttcacgcaggtatgagcaccttgttcctcgtgtacagcaacaaatgtcagaatccacttggcatggccagtggacacattcgcgactttcagatcacagcatctggccagtatggacaatgggccccaaagttggctcgcctccattactccggtagcataaatgcgtggtccactaaagaacctttcagctggattaaggtcgatcttcttgcccccatgatcatccacggcattaagacacagggagcgaggcagaaattctcctccctctacatctcacagttcattattatgtatagtttggacggcaagaagtggcaaacttatagaggtaacagtactggaacagacatggtgttcttcggcaacgttgatagctctggcatcaaacacaacatctttaatcctcccataatagctcggtacatcagattgcatccgacccactacagcattaggagtacactccgaatggagcttatgggttgcgacttgaattcctgttcaatgccactcggaatggagtctaaagccatctctgatgcacagataaccgccagtagctactttacgaacatgtttgctacgtggtcaccctctaaggcaaggcttcatttgcaaggccggtctaatgcctggagacctcaggtgaacaacccgaaagaatggctccaggtggactttcagaagaccatgaaagtaacaggtgtcactactcagggagttaagtccttggatactagcatgtatgtgaaggagttccttatttcctcatcacaagatggccaccagtggaccctcttctttcagaatggtaaggtcaaagtgtttcagggcaatcaagacagcttcacacccgtggtgaacagtcttgatcctccactcttgacacgataccttcgaatccatccacagtcttgggagcaccagattgcattgcgcatggaagtacttggatgcgaggctcaggacctctac

SEQ ID NO: 1476 - protein, 1457 aa, synthetic construct
  REGION 1..1457: note = Variant of human B-domain deleted Factor VIII
MQIELSTCFFLCLLRFCFSATRRYYLGAVELSWDYMQSDLGELPVDARFPPRVPKSFPFNTSQVYKKTLFVEFTDHLFNIAKPRPPWMGLLGPTIQAEVYDTVVITLKNMASHPVSLHAVGVSYWKASEGAEYDDQTSQREKEDDKVFPGGSHTYVWQVLKENGPMASDPPCLTYSYLSHVDLVKDLNSGLIGALLVCREGSLAKEKTQTQHKFILLFAVFDEGKSWHSETKNSLMQDRDAASARAWPKMHTVNGYVNRTLPGLIGCHRKSVYWHVIGMGTTPEVHSIFLEGHTFLVRNHRQASLGISPITFLTAQTLLMDLGQFLLFCHIPSHQHDGMEAYVKVDSCPEEPQLRMKNNEEAEDYDDDLTDSEMDVVRFDDDNSPSIIQARSGAKKHPKTWVHYIAAEEEDWDYAPLVLAPDDRSYKSQYLNNGPQRIGRKYKKVRFMAYTDETFKTREAIQHESGILGPLLYGEVGDTLLIIFKNQASRPYNIYPHGITDVRPLYSRRLPKGVKHLKDFPILPGEIFKYKWTITVEDGPTKSDPRCLTRYYSSFVNWERDLASGLIGPLLICYKESVDQRGNQIMSDKRNVILFSVFDENRSWYLTENIERFLPNPAGVQLEDPEFQASNIMHSINGYVFDSLQLSVCLHEVAYWYILSIGAQTDFLSVFFSGYTFKHKNVYEDTLTLFPFSGETVFMSMENPGLWILGCHNSDFRNRGMTALLKVSSCDWNTGDYYEDSYEDISAYFDSKNNAIEPRSFSQNPPVLKRHQREGTRTTLQSDQEEIDYDDTISVEMKKEDFDIYDEDENQSPRSFQKKTRHYFIAAVERLWDYGMSSSPHVLRNRAQSGSVPQFKKVVFQEFTDGSFTQPLYRGELNEHLGLLGPYIRAEVEDNIMVTFRNQASRPYSFYSSLISYEEDQRQGAEPRKNFVKPNETKTYFWKVQHHMAPTKDEFDCKAWAYFSDVDLEKDVHSGLIGPLLVCHTNTLNPAHGRQVTVQEFALFFTIFDETKSWYFTENMERNCRAPCNIQMEDPTFKENYRFHAINGYIMDTLPGLVMAQDQRIRWYLLSMGSNENIHSIHFSGHVFTVRKKEEYKMALYNLYPGVFETVEMLPSKAGIWRVECLIGEHLHAGMSTLFLVYSNKCQNPLGMASGHIRDFQITASGQYGQWAPKLARLHYSGSINAWSTKEPFSWIKVDLLAPMIIHGIKTQGARQKFSSLYISQFIIMYSLDGKKWQTYRGNSTGTDMVFFGNVDSSGIKHNIFNPPIIARYIRLHPTHYSIRSTLRMELMGCDLNSCSMPLGMESKAISDAQITASSYFTNMFATWSPSKARLHLQGRSNAWRPQVNNPKEWLQVDFQKTMKVTGVTTQGVKSLDTSMYVKEFLISSSQDGHQWTLFFQNGKVKVFQGNQDSFTPVVNSLDPPLLTRYLRIHPQSWEHQIALRMEVLGCEAQDLY

SEQ ID NO: 1477 - DNA, 4371 bp, synthetic construct
  misc_feature 1..4371: note = Variant of human B-domain deleted Factor VIII
  source 1..4371: mol_type = other DNA
atgcagattgaactgtctacctgcttcttcctctgtttgctgaggttctgctttagcgccactagacggtactaccttggcgctgtggagctgtcctgggactatatgcagagtgatttgggagagcttcccgtcgacgcacgatttcctcctcgcgttccaaagtcatttccctttaacacaagccaggtgtacaagaagacgctcttcgtcgaattcaccgatcacctgttcaatatcgccaaacccagaccaccatggatgggtcttttggggcctaccatacaagcggaggtgtatgacacagttgttatcactctcaagaacatggcttctcatccggtaagtcttcacgcagtgggcgtgtcctactggaaagcttcagaaggagccgagtatgatgatcagacatcccagagggagaaagaagacgacaaggtatttccaggtgggtctcatacctatgtgtggcaagtgctcaaagagaatggccctatggcaagcgatccgccgtgtttgacttacagctacctttcacacgttgacctcgtcaaggacctcaactccgggttgattggagccttgttggtatgcagggaaggatctcttgccaaagagaagacacagaccaaacacaagtttatccttctctttgctgtgttcgatgagggcaaaagttggcatagcgaaacgaagaattccctcatgcaggatcgcgacgcagccagcgccagagcttggcccaagatgcacactgtgaacggatatgtcaataggacgcttcctggcttgattgggtgtcatcggaaaagtgtctactggcacgtgatcggaatggggacaacaccagaggtccactccatatttctcgaaggccataccttccttgttcgaaaccacagacaggcatccttggggatctctcccattacctttctcactgcccaaacgctccttcgtgacttgggtcagttccttctcttttgccatatcccgtcacaccagcatgatggtatggaagcttatgtgaaagtcgacagttgtcctgaggagccacagttgcgcatgaagaataatgaagaagccgaggattacgacgacgatctcaccgattctgagatggacgtggtgaggtttgatgacgacaactctccctccatcattcaagctcggagcggggcgaagaaacaccccaagacttgggtccactatatagcggcggaagaggaggattgggattacgctcctcttgtattggcaccagatgaccgctcatacaaaagccagtacctcaacaacggaccgcagagaattggccggaagtataagaaagtgcgatttatggcctatacagacgaaacctttaagacaagggaggccatccagcatgagagtgggattttgggacctcttctttacggcgaagttggtgataccctcctcatcatcttcaagaatcaagcttctcgcccctataacatttacccacacgggatcactgacgttaggcctttgtatagcagaagacttcccaaaggcgtgaagcatctcaaagacttccccattttgccaggcgagatctttaagtacaaatggaccgtcacagtggaagatggaccgactaaatcagaccctcgatgccttacgcggtactattcctccttcgtgaatatggagagagatttggcaagcggactcataggaccactcctcatctgttacaaggaatctgtagaccagaggggtaaccagattatgagtgataaacgcaatgtgatcctttttagcgtcttcgacgagaaccggtcctggtacttgaccgagaatatacaaaggttccttcccaacgaagcagaggttcagttggaagaccctgagtttcaggccagcaatattatgcactcaatcaacggctatgtgtttgatagtctccagctttctgtttgcctccatgaagtagcctattggtacatcttgtcaattggtgctcaaacagacttcctctccgtcttcttctccggctacacctttaagcacaagggcgtgtatgaggacactctcacactctttccattttctggagaaaccgtgttcatgagcatggagaatccaggcctttggatcttgggttgccacaacagtgattttcgcaatcggggaatgactgctctcctcaaagtcagcagctgtgattggaacacaggcgactattacgaagattcttacgaggacataagtgcctactttgactccaagaataacgccattgagcccagatcattctcccagaatcctcccgtgcttaaaaggcatcagcgcgaaggtaccagaactactcttcagtctgatcaagaggagattgactatgacgacaccattagcgtggaaatgaagaaggaggatttcgatatctatgacgaagatgagaaccagtctccgcggagctttcagaagaagacgcgacactacttcattgcagcagtcgaaaggctttgggactacggtatgtcatcatcgcctcatgtgttgcgcaatagagctcagagtggaagtgttccacagttcaagaaagtcgtctttcaagagtttacagatggcagcttcacacagcctctctatcggggcgagcttaacgaacatttgggactccttggtccctatatccgagccgaagtggaggacaacattatggttacctttaggaatcaagcctctcgcccctacagcttctactcctccctcatcagttatgaggaggatcagagacaaggcgctgaaccacggaagaactttgtgaaaccgaatgagacgaagacctacttctggaaagtacagcaccacatggcccccacaaaagacgaattcgattgcaaagcatgggcgtatttttcagacgttgacttggagaaagatgtacattcaggacttattggtcctttgttggtgtgtcacactaacactctcaatccagcccatggcaggcaggtgacagtccaggaattcgctcttttctttaccatctttgatgagaccaagtcctggtacttcacggaaaacatggagcgcaattgcagagccccctgtaacatacagatggaggaccctacctttaaggaaaattatcggttccacgcaatcaacggatacattatggatacactccctggccttgtgatggctcaggaccaacgaatcaggtggtacctcctcagcatgggttctaatgagaacatacactccattcacttttcaggacatgtgttcactgtccggaagaaagaagagtataagatggccctctacaatttgtatccaggcgtgtttgagaccgttgaaatgcttccctctaaagctggcatctggagagtagagtgcttgatcggagaacatcttcacgcaggtatgagcaccttgttcctcgtgtacagcaacaaatgtcagaatccacttggcatggccagtggacacattcgcgactttcagatcacagcatctggccagtatggacaatgggccccaaagttggctcgcctccattactccggtagcataaatgcgtggtccactaaagaacctttcagctggattaaggtcgatcttcttgcccccatgatcatccacggcattaagacacagggagcgaggcagaaattctcctccctctacatctcacagttcattattatgtatagtttggacggcaagaagtggcaaacttatagaggtaacagtactggaacagacatggtgttcttcggcaacgttgatagctctggcatcaaacacaacatctttaatcctcccataatagctcggtacatcagattgcatccgacccactacagcattaggagtacactccgaatggagcttatgggttgcgacttgaattcctgttcaatgccactcggaatggagtctaaagccatctctgatgcacagataaccgccagtagctactttacgaacatgtttgctacgtggtcaccctctaaggcaaggcttcatttgcaaggccggtctaatgcctggagacctcaggtgaacaacccgaaagaatggctccaggtggactttcagaagaccatgaaagtaacaggtgtcactactcagggagttaagtccttggatactagcatgtatgtgaaggagttccttatttcctcatcacaagatggccaccagtggaccctcttctttcagaatggtaaggtcaaagtgtttcagggcaatcaagacagcttcacacccgtggtgaacagtcttgatcctccactcttgacacgataccttcgaatccatccacagtcttgggagcaccagattgcattgcgcatggaagtacttggatgcgaggctcaggacctctac

SEQ ID NO: 1478 - protein, 1457 aa, synthetic construct
  REGION 1..1457: note = Variant of human B-domain deleted Factor VIII
MQIELSTCFFLCLLRFCFSATRRYYLGAVELSWDYMQSDLGELPVDARFPPRVPKSFPFNTSQVYKKTLFVEFTDHLFNIAKPRPPWMGLLGPTIQAEVYDTVVITLKNMASHPVSLHAVGVSYWKASEGAEYDDQTSQREKEDDKVFPGGSHTYVWQVLKENGPMASDPPCLTYSYLSHVDLVKDLNSGLIGALLVCREGSLAKEKTQTKHKFILLFAVFDEGKSWHSETKNSLMQDRDAASARAWPKMHTVNGYVNRTLPGLIGCHRKSVYWHVIGMGTTPEVHSIFLEGHTFLVRNHRQASLGISPITFLTAQTLLRDLGQFLLFCHIPSHQHDGMEAYVKVDSCPEEPQLRMKNNEEAEDYDDDLTDSEMDVVRFDDDNSPSIIQARSGAKKHPKTWVHYIAAEEEDWDYAPLVLAPDDRSYKSQYLNNGPQRIGRKYKKVRFMAYTDETFKTREAIQHESGILGPLLYGEVGDTLLIIFKNQASRPYNIYPHGITDVRPLYSRRLPKGVKHLKDFPILPGEIFKYKWTVTVEDGPTKSDPRCLTRYYSSFVNMERDLASGLIGPLLICYKESVDQRGNQIMSDKRNVILFSVFDENRSWYLTENIQRFLPNEAEVQLEDPEFQASNIMHSINGYVFDSLQLSVCLHEVAYWYILSIGAQTDFLSVFFSGYTFKHKGVYEDTLTLFPFSGETVFMSMENPGLWILGCHNSDFRNRGMTALLKVSSCDWNTGDYYEDSYEDISAYFDSKNNAIEPRSFSQNPPVLKRHQREGTRTTLQSDQEEIDYDDTISVEMKKEDFDIYDEDENQSPRSFQKKTRHYFIAAVERLWDYGMSSSPHVLRNRAQSGSVPQFKKVVFQEFTDGSFTQPLYRGELNEHLGLLGPYIRAEVEDNIMVTFRNQASRPYSFYSSLISYEEDQRQGAEPRKNFVKPNETKTYFWKVQHHMAPTKDEFDCKAWAYFSDVDLEKDVHSGLIGPLLVCHTNTLNPAHGRQVTVQEFALFFTIFDETKSWYFTENMERNCRAPCNIQMEDPTFKENYRFHAINGYIMDTLPGLVMAQDQRIRWYLLSMGSNENIHSIHFSGHVFTVRKKEEYKMALYNLYPGVFETVEMLPSKAGIWRVECLIGEHLHAGMSTLFLVYSNKCQNPLGMASGHIRDFQITASGQYGQWAPKLARLHYSGSINAWSTKEPFSWIKVDLLAPMIIHGIKTQGARQKFSSLYISQFIIMYSLDGKKWQTYRGNSTGTDMVFFGNVDSSGIKHNIFNPPIIARYIRLHPTHYSIRSTLRMELMGCDLNSCSMPLGMESKAISDAQITASSYFTNMFATWSPSKARLHLQGRSNAWRPQVNNPKEWLQVDFQKTMKVTGVTTQGVKSLDTSMYVKEFLISSSQDGHQWTLFFQNGKVKVFQGNQDSFTPVVNSLDPPLLTRYLRIHPQSWEHQIALRMEVLGCEAQDLY

SEQ ID NO: 1479 - DNA, 4371 bp, synthetic construct
  misc_feature 1..4371: note = Variant of human B-domain deleted Factor VIII
  source 1..4371: mol_type = other DNA
atgcagattgaactgtctacctgcttcttcctctgtttgctgaggttctgctttagcgccactagacggtactaccttggcgctgtggagctgtcctgggactatatgcagagtgatttgggagagcttcccgtcgacgcacgatttcctcctcgcgttccaaagtcatttccctttaacacaagccaggtgtacaagaagacgctcttcgtcgaattcaccgatcacctgttcaatatcgccaaacccagaccaccatggatgggtcttttggggcctaccatacaagcggaggtgtatgacacagttgttatcactctcaagaacatggcttctcatccggtaagtcttcacgcagtgggcgtgtcctactggaaagcttcagaaggagccgagtatgatgatcagacatcccagagggagaaagaagacgacaaggtatttccaggtgggtctcatacctatgtgtggcaagtgctcaaagagaatggccctatggcaagcgatccgccgtgtttgacttacagctacctttcacacgttgacctcgtcaaggacctcaactccgggttgattggagccttgttggtatgcagggaaggatctcttgccaaagagaagacacagaccctgcacaagtttatccttctctttgctgtgttcgatgagggcaaaagttggcatagcgaaacgaagaattccctcatgcaggatcgcgacgcagccagcgccagagcttggcccaagatgcacactgtgaacggatatgtcaataggacgcttcctggcttgattgggtgtcatcggaaaagtgtctactggcacgtgatcggaatggggacaacaccagaggtccactccatatttctcgaaggccataccttccttgttcgaaaccacagacaggcatccttggggatctctcccattaccttcctcactgcccaaacgctccttatggacttgggtcagttccttctcttttgccatatcccgtcacaccagcatgatggtatggaagcttatgtgaaagtcgacagttgtcctgaggagccacagttgcgcatgaagaataatgaagaagccgaggattacgacgacgatctcaccgattctgagatggacgtggtgaggtttgatgacgacaactctccctccatcattcaagctcggagcggggcgaagaaacaccccaagacttgggtccactatatagcggcggaagaggaggattgggattacgctcctcttgtattggcaccagatgaccgctcatacaaaagccagtacctcaacaacggaccgcagagaattggccggaagtataagaaagtgcgatttatggcctatacagacgaaacctttaagacaagggaggccatccagcatgagagtgggattttgggacctcttctttacggcgaagttggtgataccctcctcatcatcttcaagaatcaagcttctcgcccctataacatttacccacacgggatcactgacgttaggcctttgtatagcagaagacttcccaaaggcgtgaagcatctcaaagacttccccattttgccaggcgagatctttaagtacaaatggaccgttacagtggaagatggaccgactaaatcagaccctcgatgccttacgcggtactattcctccttcgtgaattgggagagagatttggcaagcggactcataggaccactcctcatctgttacaaggaatctgtagaccagaggggtaaccagattatgagtgataaacgcaatgtgatcctttttagcgtcttcgacgagaaccggtcctggtacttgaccgagaatatacagaggttccttcccaacgacgcaggcgttcagttggaagaccctgagtttcaggccagcaatattatgcactcaatcaacggctatgtgtttgatagtctccagctttctgtttgcctccatgaagtagcctattggtacatcttgtcaattggtgctcaaacagacttcctctccgtcttcttctccggctacacctttaagcacaagggcgtgtatgaggacactctcacactctttccattttctggagaaaccgtgttcatgagcatggagaatccaggcctttggatcttgggttgccacaacagtgattttcgcaatcggggaatgactgctctcctcaaagtcagcagctgtgattggaacacaggcgactattacgaagattcttacgaggacataagtgcctactttgactccaagaataacgccattgagcccagatcattctcccagaatcctcccgtgcttaaaaggcatcagcgcgaaggtaccagaactactcttcagtctgatcaagaggagattgactatgacgacaccattagcgtggaatggaagaaggaggatttcgatatctatgacgaagatgagaaccagtctccgcggagctttcagaagaagacgcgacactacttcattgcagcagtcgaaaggctttgggactacggtatgtcatcatcgcctcatgtgttgcgcaatagagctcagagtggaagtgttccacagttcaagaaagtcgtctttcaagagtttacagatggcagcttcacacagcctctctatcggggcgagcttaacgaacatttgggactccttggtccctatatccgagccgaagtggaggacaacattatggttacctttaggaatcaagcctctcgcccctacagcttctactcctccctcatcagttatgaggaggatcagagacaaggcgctgaaccacggaagaactttgtgaaaccgaatgagacgaagacctacttctggaaagtacagcaccacatggcccccacaaaagacgaattcgattgcaaagcatgggcgtatttttcagacgttgacttggagaaagatgtacattcaggacttattggtcctttgttggtgtgtcacactaacactctcaatccagcccatggcaggcaggtgacagtccaggaattcgctcttttctttaccatctttgatgagaccaagtcctggtacttcacggaaaacatggagcgcaattgcagagccccctgtaacatacagatggaggaccctacctttaaggaaaattatcggttccacgcaatcaacggatacattatggatacactccctggccttgtgatggctcaggaccaacgaatcaggtggtacctcctcagcatgggttctaatgagaacatacactccattcacttttcaggacatgtgttcactgtccggaagaaagaagagtataagatggccctctacaatttgtatccaggcgtgtttgagaccgttgaaatgcttccctctaaagctggcatctggagagtagagtgcttgatcggagaacatcttcacgcaggtatgagcaccttgttcctcgtgtacagcaacaaatgtcagaatccacttggcatggccagtggacacattcgcgactttcagatcacagcatctggccagtatggacaatgggccccaaagttggctcgcctccattactccggtagcataaatgcgtggtccactaaagaacctttcagctggattaaggtcgatcttcttgcccccatgatcatccacggcattaagacacagggagcgaggcagaaattctcctccctctacatctcacagttcattattatgtatagtttggacggcaagaagtggcaaacttatagaggtaacagtactggaacagacatggtgttcttcggcaacgttgatagctctggcatcaaacacaacatctttaatcctcccataatagctcggtacatcagattgcatccgacccactacagcattaggagtacactccgaatggagcttatgggttgcgacttgaattcctgttcaatgccactcggaatggagtctaaagccatctctgatgcacagataaccgccagtagctactttacgaacatgtttgctacgtggtcaccctctaaggcaaggcttcatttgcaaggccggtctaatgcctggagacctcaggtgaacaacccgaaagaatggctccaggtggactttcagaagaccatgaaagtaacaggtgtcactactcagggagttaagtccttggatactagcatgtatgtgaaggagttccttatttcctcatcacaagatggccaccagtggaccctcttctttcagaatggtaaggtcaaagtgtttcagggcaatcaagacagcttcacacccgtggtgaacagtcttgatcctccactcttgacacgataccttcgaatccatccacagtcttgggagcaccagattgcattgcgcatggaagtacttggatgcgaggctcaggacctctac

SEQ ID NO: 1480 - protein, 1457 aa, synthetic construct
  REGION 1..1457: note = Variant of human B-domain deleted Factor VIII
MQIELSTCFFLCLLRFCFSATRRYYLGAVELSWDYMQSDLGELPVDARFPPRVPKSFPFNTSQVYKKTLFVEFTDHLFNIAKPRPPWMGLLGPTIQAEVYDTVVITLKNMASHPVSLHAVGVSYWKASEGAEYDDQTSQREKEDDKVFPGGSHTYVWQVLKENGPMASDPPCLTYSYLSHVDLVKDLNSGLIGALLVCREGSLAKEKTQTLHKFILLFAVFDEGKSWHSETKNSLMQDRDAASARAWPKMHTVNGYVNRTLPGLIGCHRKSVYWHVIGMGTTPEVHSIFLEGHTFLVRNHRQASLGISPITFLTAQTLLMDLGQFLLFCHIPSHQHDGMEAYVKVDSCPEEPQLRMKNNEEAEDYDDDLTDSEMDVVRFDDDNSPSIIQARSGAKKHPKTWVHYIAAEEEDWDYAPLVLAPDDRSYKSQYLNNGPQRIGRKYKKVRFMAYTDETFKTREAIQHESGILGPLLYGEVGDTLLIIFKNQASRPYNIYPHGITDVRPLYSRRLPKGVKHLKDFPILPGEIFKYKWTVTVEDGPTKSDPRCLTRYYSSFVNWERDLASGLIGPLLICYKESVDQRGNQIMSDKRNVILFSVFDENRSWYLTENIQRFLPNDAGVQLEDPEFQASNIMHSINGYVFDSLQLSVCLHEVAYWYILSIGAQTDFLSVFFSGYTFKHKGVYEDTLTLFPFSGETVFMSMENPGLWILGCHNSDFRNRGMTALLKVSSCDWNTGDYYEDSYEDISAYFDSKNNAIEPRSFSQNPPVLKRHQREGTRTTLQSDQEEIDYDDTISVEWKKEDFDIYDEDENQSPRSFQKKTRHYFIAAVERLWDYGMSSSPHVLRNRAQSGSVPQFKKVVFQEFTDGSFTQPLYRGELNEHLGLLGPYIRAEVEDNIMVTFRNQASRPYSFYSSLISYEEDQRQGAEPRKNFVKPNETKTYFWKVQHHMAPTKDEFDCKAWAYFSDVDLEKDVHSGLIGPLLVCHTNTLNPAHGRQVTVQEFALFFTIFDETKSWYFTENMERNCRAPCNIQMEDPTFKENYRFHAINGYIMDTLPGLVMAQDQRIRWYLLSMGSNENIHSIHFSGHVFTVRKKEEYKMALYNLYPGVFETVEMLPSKAGIWRVECLIGEHLHAGMSTLFLVYSNKCQNPLGMASGHIRDFQITASGQYGQWAPKLARLHYSGSINAWSTKEPFSWIKVDLLAPMIIHGIKTQGARQKFSSLYISQFIIMYSLDGKKWQTYRGNSTGTDMVFFGNVDSSGIKHNIFNPPIIARYIRLHPTHYSIRSTLRMELMGCDLNSCSMPLGMESKAISDAQITASSYFTNMFATWSPSKARLHLQGRSNAWRPQVNNPKEWLQVDFQKTMKVTGVTTQGVKSLDTSMYVKEFLISSSQDGHQWTLFFQNGKVKVFQGNQDSFTPVVNSLDPPLLTRYLRIHPQSWEHQIALRMEVLGCEAQDLY

SEQ ID NO: 1481 - DNA, 4371 bp, synthetic construct
  misc_feature 1..4371: note = Variant of human B-domain deleted Factor VIII
  source 1..4371: mol_type = other DNA
atgcagattgaactgtctacctgcttcttcctctgtttgctgaggttctgctttagcgccactagacggtactaccttggcgctgtggagctgtcctgggactatatgcagagtgatttgggagagcttcccgtcgacgcacgatttcctcctcgcgttccaaagtcatttccctttaacacaagccaggtgtacaagaagacgctcttcgtcgaattcaccgatcacctgttcaatatcgccaaacccagaccaccatggatgggtcttttggggcctaccatacaagcggaggtgtatgacacagttgttatcactctcaagaacatggcttctcatccggtaagtcttcacgcagtgggcgtgtcctactggaaagcttcagaaggagccgagtatgatgatcagacatcccagagggagaaagaagacgacaaggtatttccaggtgggtctcatacctatgtgtggcaagtgctcaaagagaatggccctatggcaagcgatccgccgtgtttgacttacagctacctttcacacgttgacctcgtcaaggacctcaactccgggttgattggagccttgttggtatgcagggaaggatctcttgccaaagagaagacacagaccctgcacaagtttatccttctctttgctgtgttcgatgagggcaaaagttggcatagcgaaacgaagaattccctcatgcaggatcgcgacgcagccagcgccagagcttggcccaagatgcacactgtgaacggatatgtcaataggacgcttcctggcttgattgggtgtcatcggaaaagtgtctactggcacgtgatcggaatggggacaacaccagaggtccactccatatttctcgaaggccataccttccttgttcgaaaccacagacaggcatccttggggatctctcccattacctttctcactgcccaaacgctccttcgtgacttgggtcagttccttctcttttgccatatcccgtcacaccagcatgatggtatggaagcttatgtgaaagtcgacagttgtcctgaggagccacagttgcgcatgaagaataatgaagaagccgaggattacgacgacgatctcaccgattctgagatggacgtggtgaggtttgatgacgacaactctccctccatcattcaagctcggagcggggcgaagaaacaccccaagacttgggtccactatatagcggcggaagaggaggattgggattacgctcctcttgtattggcaccagatgaccgctcatacaaaagccagtacctcaacaacggaccgcagagaattggccggaagtataagaaagtgcgatttatggcctatacagacgaaacctttaagacaagggaggccatccagcatgagagtgggattttgggacctcttctttacggcgaagttggtgataccctcctcatcatcttcaagaatcaagcttctcgcccctataacatttacccacacgggatcactgacgttaggcctttgtatagcagaagacttcccaaaggcgtgaagcatctcaaagacttccccattttgccaggcgagatctttaagtacaaatggaccattacagtggaagatggaccgactaaatcagaccctcgatgccttacgcggtactattcctccttcgtgaatatggagagagatttggcaagcggactcataggaccactcctcatctgttacaaggaatctgtagaccagaggggtaaccagattatgagtgataaacgcaatgtgatcctttttagcgtcttcgacgagaaccggtcctggtacttgaccgagaatatacaaaggttccttcccaaccctgcagaggttcagttggaagaccctgagtttcaggccagcaatattatgcactcaatcaacggctatgtgtttgatagtctccagctttctgtttgcctccatgaagtagcctattggtacatcttgtcaattggtgctcaaacagacttcctctccgtcttcttctccggctacacctttaagcacaagatggtgtatgaggacactctcacactctttccattttctggagaaaccgtgttcatgagcatggagaatccaggcctttggatcttgggttgccacaacagtgattttcgcaatcggggaatgactgctctcctcaaagtcagcagctgtgataaaaacacaggcgactattacgaagattcttacgaggacataagtgcctactttgactccaagaataacgccattgagcccagatcattctcccagaatcctcccgtgcttaaaaggcatcagcgcgaaggtaccagaactactcttcagtctgatcaagaggagattgactatgacgacaccattagcgtggaaatgaagaaggaggatttcgatatctatgacgaagatgagaaccagtctccgcggagctttcagaagaagacgcgacactacttcattgcagcagtcgaaaggctttgggactacggtatgtcatcatcgcctcatgtgttgcgcaatagagctcagagtggaagtgttccacagttcaagaaagtcgtctttcaagagtttacagatggcagcttcacacagcctctctatcggggcgagcttaacgaacatttgggactccttggtccctatatccgagccgaagtggaggacaacattatggttacctttaggaatcaagcctctcgcccctacagcttctactcctccctcatcagttatgaggaggatcagagacaaggcgctgaaccacggaagaactttgtgaaaccgaatgagacgaagacctacttctggaaagtacagcaccacatggcccccacaaaagacgaattcgattgcaaagcatgggcgtatttttcagacgttgacttggagaaagatgtacattcaggacttattggtcctttgttggtgtgtcacactaacactctcaatccagcccatggcaggcaggtgacagtccaggaattcgctcttttctttaccatctttgatgagaccaagtcctggtacttcacggaaaacatggagcgcaattgcagagccccctgtaacatacagatggaggaccctacctttaaggaaaattatcggttccacgcaatcaacggatacattatggatacactccctggccttgtgatggctcaggaccaacgaatcaggtggtacctcctcagcatgggttctaatgagaacatacactccattcacttttcaggacatgtgttcactgtccggaagaaagaagagtataagatggccctctacaatttgtatccaggcgtgtttgagaccgttgaaatgcttccctctaaagctggcatctggagagtagagtgcttgatcggagaacatcttcacgcaggtatgagcaccttgttcctcgtgtacagcaacaaatgtcagaatccacttggcatggccagtggacacattcgcgactttcagatcacagcatctggccagtatggacaatgggccccaaagttggctcgcctccattactccggtagcataaatgcgtggtccactaaagaacctttcagctggattaaggtcgatcttcttgcccccatgatcatccacggcattaagacacagggagcgaggcagaaattctcctccctctacatctcacagttcattattatgtatagtttggacggcaagaagtggcaaacttatagaggtaacagtactggaacagacatggtgttcttcggcaacgttgatagctctggcatcaaacacaacatctttaatcctcccataatagctcggtacatcagattgcatccgacccactacagcattaggagtacactccgaatggagcttatgggttgcgacttgaattcctgttcaatgccactcggaatggagtctaaagccatctctgatgcacagataaccgccagtagctactttacgaacatgtttgctacgtggtcaccctctaaggcaaggcttcatttgcaaggccggtctaatgcctggagacctcaggtgaacaacccgaaagaatggctccaggtggactttcagaagaccatgaaagtaacaggtgtcactactcagggagttaagtccttggatactagcatgtatgtgaaggagttccttatttcctcatcacaagatggccaccagtggaccctcttctttcagaatggtaaggtcaaagtgtttcagggcaatcaagacagcttcacacccgtggtgaacagtcttgatcctccactcttgacacgataccttcgaatccatccacagtcttgggagcaccagattgcattgcgcatggaagtacttggatgcgaggctcaggacctctac

SEQ ID NO: 1482 - protein, 1457 aa, synthetic construct
  REGION 1..1457: note = Variant of human B-domain deleted Factor VIII
MQIELSTCFFLCLLRFCFSATRRYYLGAVELSWDYMQSDLGELPVDARFPPRVPKSFPFNTSQVYKKTLFVEFTDHLFNIAKPRPPWMGLLGPTIQAEVYDTVVITLKNMASHPVSLHAVGVSYWKASEGAEYDDQTSQREKEDDKVFPGGSHTYVWQVLKENGPMASDPPCLTYSYLSHVDLVKDLNSGLIGALLVCREGSLAKEKTQTLHKFILLFAVFDEGKSWHSETKNSLMQDRDAASARAWPKMHTVNGYVNRTLPGLIGCHRKSVYWHVIGMGTTPEVHSIFLEGHTFLVRNHRQASLGISPITFLTAQTLLRDLGQFLLFCHIPSHQHDGMEAYVKVDSCPEEPQLRMKNNEEAEDYDDDLTDSEMDVVRFDDDNSPSIIQARSGAKKHPKTWVHYIAAEEEDWDYAPLVLAPDDRSYKSQYLNNGPQRIGRKYKKVRFMAYTDETFKTREAIQHESGILGPLLYGEVGDTLLIIFKNQASRPYNIYPHGITDVRPLYSRRLPKGVKHLKDFPILPGEIFKYKWTITVEDGPTKSDPRCLTRYYSSFVNMERDLASGLIGPLLICYKESVDQRGNQIMSDKRNVILFSVFDENRSWYLTENIQRFLPNPAEVQLEDPEFQASNIMHSINGYVFDSLQLSVCLHEVAYWYILSIGAQTDFLSVFFSGYTFKHKMVYEDTLTLFPFSGETVFMSMENPGLWILGCHNSDFRNRGMTALLKVSSCDKNTGDYYEDSYEDISAYFDSKNNAIEPRSFSQNPPVLKRHQREGTRTTLQSDQEEIDYDDTISVEMKKEDFDIYDEDENQSPRSFQKKTRHYFIAAVERLWDYGMSSSPHVLRNRAQSGSVPQFKKVVFQEFTDGSFTQPLYRGELNEHLGLLGPYIRAEVEDNIMVTFRNQASRPYSFYSSLISYEEDQRQGAEPRKNFVKPNETKTYFWKVQHHMAPTKDEFDCKAWAYFSDVDLEKDVHSGLIGPLLVCHTNTLNPAHGRQVTVQEFALFFTIFDETKSWYFTENMERNCRAPCNIQMEDPTFKENYRFHAINGYIMDTLPGLVMAQDQRIRWYLLSMGSNENIHSIHFSGHVFTVRKKEEYKMALYNLYPGVFETVEMLPSKAGIWRVECLIGEHLHAGMSTLFLVYSNKCQNPLGMASGHIRDFQITASGQYGQWAPKLARLHYSGSINAWSTKEPFSWIKVDLLAPMIIHGIKTQGARQKFSSLYISQFIIMYSLDGKKWQTYRGNSTGTDMVFFGNVDSSGIKHNIFNPPIIARYIRLHPTHYSIRSTLRMELMGCDLNSCSMPLGMESKAISDAQITASSYFTNMFATWSPSKARLHLQGRSNAWRPQVNNPKEWLQVDFQKTMKVTGVTTQGVKSLDTSMYVKEFLISSSQDGHQWTLFFQNGKVKVFQGNQDSFTPVVNSLDPPLLTRYLRIHPQSWEHQIALRMEVLGCEAQDLY

SEQ ID NO: 1483 - DNA, 4371 bp, synthetic construct
  misc_feature 1..4371: note = Variant of human B-domain deleted Factor VIII
  source 1..4371: mol_type = other DNA
atgcagattgaactgtctacctgcttcttcctctgtttgctgaggttctgctttagcgccactagacggtactaccttggcgctgtggagctgtcctgggactatatgcagagtgatttgggagagcttcccgtcgacgcacgatttcctcctcgcgttccaaagtcatttccctttaacacaagccaggtgtacaagaagacgctcttcgtcgaattcaccgatcacctgttcaatatcgccaaacccagaccaccatggatgggtcttttggggcctaccatacaagcggaggtgtatgacacagttgttatcactctcaagaacatggcttctcatccggtaagtcttcacgcagtgggcgtgtcctactggaaagcttcagaaggagccgagtatgatgatcagacatcccagagggagaaagaagacgacaaggtatttccaggtgggtctcatacctatgtgtggcaagtgctcaaagagaatggccctatggcaagcgatccgccgtgtttgacttacagctacctttcacacgttgacctcgtcaaggacctcaactccgggttgattggagccttgttggtatgcagggaaggatctcttgccaaagagaagacacagaccaaacacaagtttatccttctctttgctgtgttcgatgagggcaaaagttggcatagcgaaacgaagaattccctcatgcaggatcgcgacgcagccagcgccagagcttggcccaagatgcacactgtgaacggatatgtcaataggacgcttcctggcttgattgggtgtcatcggaaaagtgtctactggcacgtgatcggaatggggacaacaccagaggtccactccatatttctcgaaggccataccttccttgttcgaaaccacagacaggcatccttggggatctctcccattaccttcctcactgcccaaacgctccttatggacttgggtcagttccttctcttttgccatatcccgtcacaccagcatgatggtatggaagcttatgtgaaagtcgacagttgtcctgaggagccacagttgcgcatgaagaataatgaagaagccgaggattacgacgacgatctcaccgattctgagatggacgtggtgaggtttgatgacgacaactctccctccatcattcaagctcggagcggggcgaagaaacaccccaagacttgggtccactatatagcggcggaagaggaggattgggattacgctcctcttgtattggcaccagatgaccgctcatacaaaagccagtacctcaacaacggaccgcagagaattggccggaagtataagaaagtgcgatttatggcctatacagacgaaacctttaagacaagggaggccatccagcatgagagtgggattttgggacctcttctttacggcgaagttggtgataccctcctcatcatcttcaagaatcaagcttctcgcccctataacatttacccacacgggatcactgacgttaggcctttgtatagcagaagacttcccaaaggcgtgaagcatctcaaagacttccccattttgccaggcgagatctttaagtacaaatggaccgttacagtggaagatggaccgactaaatcagaccctcgatgccttacgcggtactattcctccttcgtgaatatggagagagatttggcaagcggactcataggaccactcctcatctgttacaaggaatctgtagaccagaggggtaaccagattatgagtgataaacgcaatgtgatcctttttagcgtcttcgacgagaaccggtcctggtacttgaccgagaatatacaaaggttccttcccaaccctgcagaggttcagttggaagaccctgagtttcaggccagcaatattatgcactcaatcaacggctatgtgtttgatagtctccagctttctgtttgcctccatgaagtagcctattggtacatcttgtcaattggtgctcaaacagacttcctctccgtcttcttctccggctacacctttaagcacaagaacgtgtatgaggacactctcacactctttccattttctggagaaaccgtgttcatgagcatggagaatccaggcctttggatcttgggttgccacaacagtgattttcgcaatcggggaatgactgctctcctcaaagtcagcagctgtgattggaacacaggcgactattacgaagattcttacgaggacataagtgcctactttgactccaagaataacgccattgagcccagatcattctcccagaatcctcccgtgcttaaaaggcatcagcgcgaaggtaccagaactactcttcagtctgatcaagaggagattgactatgacgacaccattagcgtggaaatgaagaaggaggatttcgatatctatgacgaagatgagaaccagtctccgcggagctttcagaagaagacgcgacactacttcattgcagcagtcgaaaggctttgggactacggtatgtcatcatcgcctcatgtgttgcgcaatagagctcagagtggaagtgttccacagttcaagaaagtcgtctttcaagagtttacagatggcagcttcacacagcctctctatcggggcgagcttaacgaacatttgggactccttggtccctatatccgagccgaagtggaggacaacattatggttacctttaggaatcaagcctctcgcccctacagcttctactcctccctcatcagttatgaggaggatcagagacaaggcgctgaaccacggaagaactttgtgaaaccgaatgagacgaagacctacttctggaaagtacagcaccacatggcccccacaaaagacgaattcgattgcaaagcatgggcgtatttttcagacgttgacttggagaaagatgtacattcaggacttattggtcctttgttggtgtgtcacactaacactctcaatccagcccatggcaggcaggtgacagtccaggaattcgctcttttctttaccatctttgatgagaccaagtcctggtacttcacggaaaacatggagcgcaattgcagagccccctgtaacatacagatggaggaccctacctttaaggaaaattatcggttccacgcaatcaacggatacattatggatacactccctggccttgtgatggctcaggaccaacgaatcaggtggtacctcctcagcatgggttctaatgagaacatacactccattcacttttcaggacatgtgttcactgtccggaagaaagaagagtataagatggccctctacaatttgtatccaggcgtgtttgagaccgttgaaatgcttccctctaaagctggcatctggagagtagagtgcttgatcggagaacatcttcacgcaggtatgagcaccttgttcctcgtgtacagcaacaaatgtcagaatccacttggcatggccagtggacacattcgcgactttcagatcacagcatctggccagtatggacaatgggccccaaagttggctcgcctccattactccggtagcataaatgcgtggtccactaaagaacctttcagctggattaaggtcgatcttcttgcccccatgatcatccacggcattaagacacagggagcgaggcagaaattctcctccctctacatctcacagttcattattatgtatagtttggacggcaagaagtggcaaacttatagaggtaacagtactggaacagacatggtgttcttcggcaacgttgatagctctggcatcaaacacaacatctttaatcctcccataatagctcggtacatcagattgcatccgacccactacagcattaggagtacactccgaatggagcttatgggttgcgacttgaattcctgttcaatgccactcggaatggagtctaaagccatctctgatgcacagataaccgccagtagctactttacgaacatgtttgctacgtggtcaccctctaaggcaaggcttcatttgcaaggccggtctaatgcctggagacctcaggtgaacaacccgaaagaatggctccaggtggactttcagaagaccatgaaagtaacaggtgtcactactcagggagttaagtccttggatactagcatgtatgtgaaggagttccttatttcctcatcacaagatggccaccagtggaccctcttctttcagaatggtaaggtcaaagtgtttcagggcaatcaagacagcttcacacccgtggtgaacagtcttgatcctccactcttgacacgataccttcgaatccatccacagtcttgggagcaccagattgcattgcgcatggaagtacttggatgcgaggctcaggacctctac

SEQ ID NO: 1484 - protein, 1457 aa, synthetic construct
  REGION 1..1457: note = Variant of human B-domain deleted Factor VIII
MQIELSTCFFLCLLRFCFSATRRYYLGAVELSWDYMQSDLGELPVDARFPPRVPKSFPFNTSQVYKKTLFVEFTDHLFNIAKPRPPWMGLLGPTIQAEVYDTVVITLKNMASHPVSLHAVGVSYWKASEGAEYDDQTSQREKEDDKVFPGGSHTYVWQVLKENGPMASDPPCLTYSYLSHVDLVKDLNSGLIGALLVCREGSLAKEKTQTKHKFILLFAVFDEGKSWHSETKNSLMQDRDAASARAWPKMHTVNGYVNRTLPGLIGCHRKSVYWHVIGMGTTPEVHSIFLEGHTFLVRNHRQASLGISPITFLTAQTLLMDLGQFLLFCHIPSHQHDGMEAYVKVDSCPEEPQLRMKNNEEAEDYDDDLTDSEMDVVRFDDDNSPSIIQARSGAKKHPKTWVHYIAAEEEDWDYAPLVLAPDDRSYKSQYLNNGPQRIGRKYKKVRFMAYTDETFKTREAIQHESGILGPLLYGEVGDTLLIIFKNQASRPYNIYPHGITDVRPLYSRRLPKGVKHLKDFPILPGEIFKYKWTVTVEDGPTKSDPRCLTRYYSSFVNMERDLASGLIGPLLICYKESVDQRGNQIMSDKRNVILFSVFDENRSWYLTENIQRFLPNPAEVQLEDPEFQASNIMHSINGYVFDSLQLSVCLHEVAYWYILSIGAQTDFLSVFFSGYTFKHKNVYEDTLTLFPFSGETVFMSMENPGLWILGCHNSDFRNRGMTALLKVSSCDWNTGDYYEDSYEDISAYFDSKNNAIEPRSFSQNPPVLKRHQREGTRTTLQSDQEEIDYDDTISVEMKKEDFDIYDEDENQSPRSFQKKTRHYFIAAVERLWDYGMSSSPHVLRNRAQSGSVPQFKKVVFQEFTDGSFTQPLYRGELNEHLGLLGPYIRAEVEDNIMVTFRNQASRPYSFYSSLISYEEDQRQGAEPRKNFVKPNETKTYFWKVQHHMAPTKDEFDCKAWAYFSDVDLEKDVHSGLIGPLLVCHTNTLNPAHGRQVTVQEFALFFTIFDETKSWYFTENMERNCRAPCNIQMEDPTFKENYRFHAINGYIMDTLPGLVMAQDQRIRWYLLSMGSNENIHSIHFSGHVFTVRKKEEYKMALYNLYPGVFETVEMLPSKAGIWRVECLIGEHLHAGMSTLFLVYSNKCQNPLGMASGHIRDFQITASGQYGQWAPKLARLHYSGSINAWSTKEPFSWIKVDLLAPMIIHGIKTQGARQKFSSLYISQFIIMYSLDGKKWQTYRGNSTGTDMVFFGNVDSSGIKHNIFNPPIIARYIRLHPTHYSIRSTLRMELMGCDLNSCSMPLGMESKAISDAQITASSYFTNMFATWSPSKARLHLQGRSNAWRPQVNNPKEWLQVDFQKTMKVTGVTTQGVKSLDTSMYVKEFLISSSQDGHQWTLFFQNGKVKVFQGNQDSFTPVVNSLDPPLLTRYLRIHPQSWEHQIALRMEVLGCEAQDLY

SEQ ID NO: 1485 - DNA, 4371 bp, synthetic construct
  misc_feature 1..4371: note = Variant of human B-domain deleted Factor VIII
  source 1..4371: mol_type = other DNA
atgcagattgaactgtctacctgcttcttcctctgtttgctgaggttctgctttagcgccactagacggtactaccttggcgctgtggagctgtcctgggactatatgcagagtgatttgggagagcttcccgtcgacgcacgatttcctcctcgcgttccaaagtcatttccctttaacacaagccaggtgtacaagaagacgctcttcgtcgaattcaccgatcacctgttcaatatcgccaaacccagaccaccatggatgggtcttttggggcctaccatacaagcggaggtgtatgacacagttgttatcactctcaagaacatggcttctcatccggtaagtcttcacgcagtgggcgtgtcctactggaaagcttcagaaggagccgagtatgatgatcagacatcccagagggagaaagaagacgacaaggtatttccaggtgggtctcatacctatgtgtggcaagtgctcaaagagaatggccctatggcaagcgatccgccgtgtttgacttacagctacctttcacacgttgacctcgtcaaggacctcaactccgggttgattggagccttgttggtatgcagggaaggatctcttgccaaagagaagacacagaccaaagccaagtttatccttctctttgctgtgttcgatgagggcaaaagttggcatagcgaaacgaagaattccctcatgcaggatcgcgacgcagccagcgccagagcttggcccaagatgcacactgtgaacggatatgtcaataggacgcttcctggcttgattgggtgtcatcggaaaagtgtctactggcacgtgatcggaatggggacaacaccagaggtccactccatatttctcgaaggccataccttccttgttcgaaaccacagacaggcatccttggggatctctcccattaccttcctcactgcccaaacgctccttatggacttgggtcagttccttctcttttgccatatcccgtcacaccagcatgatggtatggaagcttatgtgaaagtcgacagttgtcctgaggagccacagttgcgcatgaagaataatgaagaagccgaggattacgacgacgatctcaccgattctgagatggacgtggtgaggtttgatgacgacaactctccctccatcattcaagctcggagcggggcgaagaaacaccccaagacttgggtccactatatagcggcggaagaggaggattgggattacgctcctcttgtattggcaccagatgaccgctcatacaaaagccagtacctcaacaacggaccgcagagaattggccggaagtataagaaagtgcgatttatggcctatacagacgaaacctttaagacaagggaggccatccagcatgagagtgggattttgggacctcttctttacggcgaagttggtgataccctcctcatcatcttcaagaatcaagcttctcgcccctataacatttacccacacgggatcactgacgttaggcctttgtatagcagaagacttcccaaaggcgtgaagcatctcaaagacttccccattttgccaggcgagatctttaagtacaaatggaccattacagtggaagatggaccgactaaatcagaccctcgatgccttacgcggtactattcctccttcgtgaattgggagagagatttggcaagcggactcataggaccactcctcatctgttacaaggaatctgtagaccagaggggtaaccagattatgagtgataaacgcaatgtgatcctttttagcgtcttcgacgagaaccggtcctggtacttgaccgagaatatacaaaggttccttcccaaccctgcagaggttcagttggaagaccctgagtttcaggccagcaatattatgcactcaatcaacggctatgtgtttgatagtctccagctttctgtttgcctccatgaagtagcctattggtacatcttgtcaattggtgctcaaacagacttcctctccgtcttcttctccggctacacctttaagcacaagatggtgtatgaggacactctcacactctttccattttctggagaaaccgtgttcatgagcatggagaatccaggcctttggatcttgggttgccacaacagtgattttcgcaatcggggaatgactgctctcctcaaagtcagcagctgtgataaaaacacaggcgactattacgaagattcttacgaggacataagtgcctactttgactccaagaataacgccattgagcccagatcattctcccagaatcctcccgtgcttaaaaggcatcagcgcgaaggtaccagaactactcttcagtctgatcaagaggagattgactatgacgacaccattagcgtggaaatgaagaaggaggatttcgatatctatgacgaagatgagaaccagtctccgcggagctttcagaagaagacgcgacactacttcattgcagcagtcgaaaggctttgggactacggtatgtcatcaaaacctcatgtgttgcgcaatagagctcagagtggaagtgttccacagttcaagaaagtcgtctttcaagagtttacagatggcagcttcacacagcctctctatcggggcgagcttaacgaacatttgggactccttggtccctatatccgagccgaagtggaggacaacattatggttacctttaggaatcaagcctctcgcccctacagcttctactcctccctcatcagttatgaggaggatcagagacaaggcgctgaaccacggaagaactttgtgaaaccgaatgagacgaagacctacttctggaaagtacagcaccacatggcccccacaaaagacgaattcgattgcaaagcatgggcgtatttttcagacgttgacttggagaaagatgtacattcaggacttattggtcctttgttggtgtgtcacactaacactctcaatccagcccatggcaggcaggtgacagtccaggaattcgctcttttctttaccatctttgatgagaccaagtcctggtacttcacggaaaacatggagcgcaattgcagagccccctgtaacatacagatggaggaccctacctttaaggaaaattatcggttccacgcaatcaacggatacattatggatacactccctggccttgtgatggctcaggaccaacgaatcaggtggtacctcctcagcatgggttctaatgagaacatacactccattcacttttcaggacatgtgttcactgtccggaagaaagaagagtataagatggccctctacaatttgtatccaggcgtgtttgagaccgttgaaatgcttccctctaaagctggcatctggagagtagagtgcttgatcggagaacatcttcacgcaggtatgagcaccttgttcctcgtgtacagcaacaaatgtcagaatccacttggcatggccagtggacacattcgcgactttcagatcacagcatctggccagtatggacaatgggccccaaagttggctcgcctccattactccggtagcataaatgcgtggtccactaaagaacctttcagctggattaaggtcgatcttcttgcccccatgatcatccacggcattaagacacagggagcgaggcagaaattctcctccctctacatctcacagttcattattatgtatagtttggacggcaagaagtggcaaacttatagaggtaacagtactggaacagacatggtgttcttcggcaacgttgatagctctggcatcaaacacaacatctttaatcctcccataatagctcggtacatcagattgcatccgacccactacagcattaggagtacactccgaatggagcttatgggttgcgacttgaattcctgttcaatgccactcggaatggagtctaaagccatctctgatgcacagataaccgccagtagctactttacgaacatgtttgctacgtggtcaccctctaaggcaaggcttcatttgcaaggccggtctaatgcctggagacctcaggtgaacaacccgaaagaatggctccaggtggactttcagaagaccatgaaagtaacaggtgtcactactcagggagttaagtccttggatactagcatgtatgtgaaggagttccttatttcctcatcacaagatggccaccagtggaccctcttctttcagaatggtaaggtcaaagtgtttcagggcaatcaagacagcttcacacccgtggtgaacagtcttgatcctccactcttgacacgataccttcgaatccatccacagtcttgggagcaccagattgcattgcgcatggaagtacttggatgcgaggctcaggacctctac

SEQ ID NO: 1486 - protein, 1457 aa, synthetic construct
  REGION 1..1457: note = Variant of human B-domain deleted Factor VIII
MQIELSTCFFLCLLRFCFSATRRYYLGAVELSWDYMQSDLGELPVDARFPPRVPKSFPFNTSQVYKKTLFVEFTDHLFNIAKPRPPWMGLLGPTIQAEVYDTVVITLKNMASHPVSLHAVGVSYWKASEGAEYDDQTSQREKEDDKVFPGGSHTYVWQVLKENGPMASDPPCLTYSYLSHVDLVKDLNSGLIGALLVCREGSLAKEKTQTKAKFILLFAVFDEGKSWHSETKNSLMQDRDAASARAWPKMHTVNGYVNRTLPGLIGCHRKSVYWHVIGMGTTPEVHSIFLEGHTFLVRNHRQASLGISPITFLTAQTLLMDLGQFLLFCHIPSHQHDGMEAYVKVDSCPEEPQLRMKNNEEAEDYDDDLTDSEMDVVRFDDDNSPSIIQARSGAKKHPKTWVHYIAAEEEDWDYAPLVLAPDDRSYKSQYLNNGPQRIGRKYKKVRFMAYTDETFKTREAIQHESGILGPLLYGEVGDTLLIIFKNQASRPYNIYPHGITDVRPLYSRRLPKGVKHLKDFPILPGEIFKYKWTITVEDGPTKSDPRCLTRYYSSFVNWERDLASGLIGPLLICYKESVDQRGNQIMSDKRNVILFSVFDENRSWYLTENIQRFLPNPAEVQLEDPEFQASNIMHSINGYVFDSLQLSVCLHEVAYWYILSIGAQTDFLSVFFSGYTFKHKMVYEDTLTLFPFSGETVFMSMENPGLWILGCHNSDFRNRGMTALLKVSSCDKNTGDYYEDSYEDISAYFDSKNNAIEPRSFSQNPPVLKRHQREGTRTTLQSDQEEIDYDDTISVEMKKEDFDIYDEDENQSPRSFQKKTRHYFIAAVERLWDYGMSSKPHVLRNRAQSGSVPQFKKVVFQEFTDGSFTQPLYRGELNEHLGLLGPYIRAEVEDNIMVTFRNQASRPYSFYSSLISYEEDQRQGAEPRKNFVKPNETKTYFWKVQHHMAPTKDEFDCKAWAYFSDVDLEKDVHSGLIGPLLVCHTNTLNPAHGRQVTVQEFALFFTIFDETKSWYFTENMERNCRAPCNIQMEDPTFKENYRFHAINGYIMDTLPGLVMAQDQRIRWYLLSMGSNENIHSIHFSGHVFTVRKKEEYKMALYNLYPGVFETVEMLPSKAGIWRVECLIGEHLHAGMSTLFLVYSNKCQNPLGMASGHIRDFQITASGQYGQWAPKLARLHYSGSINAWSTKEPFSWIKVDLLAPMIIHGIKTQGARQKFSSLYISQFIIMYSLDGKKWQTYRGNSTGTDMVFFGNVDSSGIKHNIFNPPIIARYIRLHPTHYSIRSTLRMELMGCDLNSCSMPLGMESKAISDAQITASSYFTNMFATWSPSKARLHLQGRSNAWRPQVNNPKEWLQVDFQKTMKVTGVTTQGVKSLDTSMYVKEFLISSSQDGHQWTLFFQNGKVKVFQGNQDSFTPVVNSLDPPLLTRYLRIHPQSWEHQIALRMEVLGCEAQDLY

SEQ ID NO: 1487 - DNA, 4371 bp, synthetic construct
  misc_feature 1..4371: note = Variant of human B-domain deleted Factor VIII
  source 1..4371: mol_type = other DNA
atgcagattgaactgtctacctgcttcttcctctgtttgctgaggttctgctttagcgccactagacggtactaccttggcgctgtggagctgtcctgggactatatgcagagtgatttgggagagcttcccgtcgacgcacgatttcctcctcgcgttccaaagtcatttccctttaacacaagccaggtgtacaagaagacgctcttcgtcgaattcaccgatcacctgttcaatatcgccaaacccagaccaccatggatgggtcttttggggcctaccatacaagcggaggtgtatgacacagttgttatcactctcaagaacatggcttctcatccggtaagtcttcacgcagtgggcgtgtcctactggaaagcttcagaaggagccgagtatgatgatcagacatcccagagggagaaagaagacgacaaggtatttccaggtgggtctcatacctatgtgtggcaagtgctcaaagagaatggccctatggcaagcgatccgccgtgtttgacttacagctacctttcacacgttgacctcgtcaaggacctcaactccgggttgattggagccttgttggtatgcagggaaggatctcttgccaaagagaagacacagaccctggccaagtttatccttctctttgctgtgttcgatgagggcaaaagttggcatagcgaaacgaagaattccctcatgcaggatcgcgacgcagccagcgccagagcttggcccaagatgcacactgtgaacggatatgtcaataggacgcttcctggcttgattgggtgtcatcggaaaagtgtctactggcacgtgatcggaatggggacaacaccagaggtccactccatatttctcgaaggccataccttccttgttcgaaaccacagacaggcatccttggggatctctcccattacctttctcactgcccaaacgctccttcgtgacttgggtcagttccttctcttttgccatatcccgtcacaccagcatgatggtatggaagcttatgtgaaagtcgacagttgtcctgaggagccacagttgcgcatgaagaataatgaagaagccgaggattacgacgacgatctcaccgattctgagatggacgtggtgaggtttgatgacgacaactctccctccatcattcaagctcggagcggggcgaagaaacaccccaagacttgggtccactatatagcggcggaagaggaggattgggattacgctcctcttgtattggcaccagatgaccgctcatacaaaagccagtacctcaacaacggaccgcagagaattggccggaagtataagaaagtgcgatttatggcctatacagacgaaacctttaagacaagggaggccatccagcatgagagtgggattttgggacctcttctttacggcgaagttggtgataccctcctcatcatcttcaagaatcaagcttctcgcccctataacatttacccacacgggatcactgacgttaggcctttgtatagcagaagacttcccaaaggcgtgaagcatctcaaagacttccccattttgccaggcgagatctttaagtacaaatggaccgtcacagtggaagatggaccgactaaatcagaccctcgatgccttacgcggtactattcctccttcgtgaatatggagagagatttggcaagcggactcataggaccactcctcatctgttacaaggaatctgtagaccagaggggtaaccagattatgagtgataaacgcaatgtgatcctttttagcgtcttcgacgagaaccggtcctggtacttgaccgagaatatacaaaggttccttcccaaccctgcagaggttcagttggaagaccctgagtttcaggccagcaatattatgcactcaatcaacggctatgtgtttgatagtctccagctttctgtttgcctccatgaagtagcctattggtacatcttgtcaattggtgctcaaacagacttcctctccgtcttcttctccggctacacctttaagcacaagaacgtgtatgaggacactctcacactctttccattttctggagaaaccgtgttcatgagcatggagaatccaggcctttggatcttgggttgccacaacagtgattttcgcaatcggggaatgactgctctcctcaaagtcagcagctgtgattggaacacaggcgactattacgaagattcttacgaggacataagtgcctactttgactccaagaataacgccattgagcccagatcattctcccagaatcctcccgtgcttaaaaggcatcagcgcgaaggtaccagaactactcttcagtctgatcaagaggagattgactatgacgacaccattagcgtggaatggaagaaggaggatttcgatatctatgacgaagatgagaaccagtctccgcggagctttcagaagaagacgcgacactacttcattgcagcagtcgaaaggctttgggactacggtatgtcatcaaaacctcatgtgttgcgcaatagagctcagagtggaagtgttccacagttcaagaaagtcgtctttcaagagtttacagatggcagcttcacacagcctctctatcggggcgagcttaacgaacatttgggactccttggtccctatatccgagccgaagtggaggacaacattatggttacctttaggaatcaagcctctcgcccctacagcttctactcctccctcatcagttatgaggaggatcagagacaaggcgctgaaccacggaagaactttgtgaaaccgaatgagacgaagacctacttctggaaagtacagcaccacatggcccccacaaaagacgaattcgattgcaaagcatgggcgtatttttcagacgttgacttggagaaagatgtacattcaggacttattggtcctttgttggtgtgtcacactaacactctcaatccagcccatggcaggcaggtgacagtccaggaattcgctcttttctttaccatctttgatgagaccaagtcctggtacttcacggaaaacatggagcgcaattgcagagccccctgtaacatacagatggaggaccctacctttaaggaaaattatcggttccacgcaatcaacggatacattatggatacactccctggccttgtgatggctcaggaccaacgaatcaggtggtacctcctcagcatgggttctaatgagaacatacactccattcacttttcaggacatgtgttcactgtccggaagaaagaagagtataagatggccctctacaatttgtatccaggcgtgtttgagaccgttgaaatgcttccctctaaagctggcatctggagagtagagtgcttgatcggagaacatcttcacgcaggtatgagcaccttgttcctcgtgtacagcaacaaatgtcagaatccacttggcatggccagtggacacattcgcgactttcagatcacagcatctggccagtatggacaatgggccccaaagttggctcgcctccattactccggtagcataaatgcgtggtccactaaagaacctttcagctggattaaggtcgatcttcttgcccccatgatcatccacggcattaagacacagggagcgaggcagaaattctcctccctctacatctcacagttcattattatgtatagtttggacggcaagaagtggcaaacttatagaggtaacagtactggaacagacatggtgttcttcggcaacgttgatagctctggcatcaaacacaacatctttaatcctcccataatagctcggtacatcagattgcatccgacccactacagcattaggagtacactccgaatggagcttatgggttgcgacttgaattcctgttcaatgccactcggaatggagtctaaagccatctctgatgcacagataaccgccagtagctactttacgaacatgtttgctacgtggtcaccctctaaggcaaggcttcatttgcaaggccggtctaatgcctggagacctcaggtgaacaacccgaaagaatggctccaggtggactttcagaagaccatgaaagtaacaggtgtcactactcagggagttaagtccttggatactagcatgtatgtgaaggagttccttatttcctcatcacaagatggccaccagtggaccctcttctttcagaatggtaaggtcaaagtgtttcagggcaatcaagacagcttcacacccgtggtgaacagtcttgatcctccactcttgacacgataccttcgaatccatccacagtcttgggagcaccagattgcattgcgcatggaagtacttggatgcgaggctcaggacctctac

SEQ ID NO: 1488 - protein, 1457 aa, synthetic construct
  REGION 1..1457: note = Variant of human B-domain deleted Factor VIII
MQIELSTCFFLCLLRFCFSATRRYYLGAVELSWDYMQSDLGELPVDARFPPRVPKSFPFNTSQVYKKTLFVEFTDHLFNIAKPRPPWMGLLGPTIQAEVYDTVVITLKNMASHPVSLHAVGVSYWKASEGAEYDDQTSQREKEDDKVFPGGSHTYVWQVLKENGPMASDPPCLTYSYLSHVDLVKDLNSGLIGALLVCREGSLAKEKTQTLAKFILLFAVFDEGKSWHSETKNSLMQDRDAASARAWPKMHTVNGYVNRTLPGLIGCHRKSVYWHVIGMGTTPEVHSIFLEGHTFLVRNHRQASLGISPITFLTAQTLLRDLGQFLLFCHIPSHQHDGMEAYVKVDSCPEEPQLRMKNNEEAEDYDDDLTDSEMDVVRFDDDNSPSIIQARSGAKKHPKTWVHYIAAEEEDWDYAPLVLAPDDRSYKSQYLNNGPQRIGRKYKKVRFMAYTDETFKTREAIQHESGILGPLLYGEVGDTLLIIFKNQASRPYNIYPHGITDVRPLYSRRLPKGVKHLKDFPILPGEIFKYKWTVTVEDGPTKSDPRCLTRYYSSFVNMERDLASGLIGPLLICYKESVDQRGNQIMSDKRNVILFSVFDENRSWYLTENIQRFLPNPAEVQLEDPEFQASNIMHSINGYVFDSLQLSVCLHEVAYWYILSIGAQTDFLSVFFSGYTFKHKNVYEDTLTLFPFSGETVFMSMENPGLWILGCHNSDFRNRGMTALLKVSSCDWNTGDYYEDSYEDISAYFDSKNNAIEPRSFSQNPPVLKRHQREGTRTTLQSDQEEIDYDDTISVEWKKEDFDIYDEDENQSPRSFQKKTRHYFIAAVERLWDYGMSSKPHVLRNRAQSGSVPQFKKVVFQEFTDGSFTQPLYRGELNEHLGLLGPYIRAEVEDNIMVTFRNQASRPYSFYSSLISYEEDQRQGAEPRKNFVKPNETKTYFWKVQHHMAPTKDEFDCKAWAYFSDVDLEKDVHSGLIGPLLVCHTNTLNPAHGRQVTVQEFALFFTIFDETKSWYFTENMERNCRAPCNIQMEDPTFKENYRFHAINGYIMDTLPGLVMAQDQRIRWYLLSMGSNENIHSIHFSGHVFTVRKKEEYKMALYNLYPGVFETVEMLPSKAGIWRVECLIGEHLHAGMSTLFLVYSNKCQNPLGMASGHIRDFQITASGQYGQWAPKLARLHYSGSINAWSTKEPFSWIKVDLLAPMIIHGIKTQGARQKFSSLYISQFIIMYSLDGKKWQTYRGNSTGTDMVFFGNVDSSGIKHNIFNPPIIARYIRLHPTHYSIRSTLRMELMGCDLNSCSMPLGMESKAISDAQITASSYFTNMFATWSPSKARLHLQGRSNAWRPQVNNPKEWLQVDFQKTMKVTGVTTQGVKSLDTSMYVKEFLISSSQDGHQWTLFFQNGKVKVFQGNQDSFTPVVNSLDPPLLTRYLRIHPQSWEHQIALRMEVLGCEAQDLY

SEQ ID NO: 1489 - DNA, 4371 bp, synthetic construct
  misc_feature 1..4371: note = Variant of human B-domain deleted Factor VIII
  source 1..4371: mol_type = other DNA
atgcagattgaactgtctacctgcttcttcctctgtttgctgaggttctgctttagcgccactagacggtactaccttggcgctgtggagctgtcctgggactatatgcagagtgatttgggagagcttcccgtcgacgcacgatttcctcctcgcgttccaaagtcatttccctttaacacaagccaggtgtacaagaagacgctcttcgtcgaattcaccgatcacctgttcaatatcgccaaacccagaccaccatggatgggtcttttggggcctaccatacaagcggaggtgtatgacacagttgttatcactctcaagaacatggcttctcatccggtaagtcttcacgcagtgggcgtgtcctactggaaagcttcagaaggagccgagtatgatgatcagacatcccagagggagaaagaagacgacaaggtatttccaggtgggtctcatacctatgtgtggcaagtgctcaaagagaatggccctatggcaagcgatccgccgtgtttgacttacagctacctttcacacgttgacctcgtcaaggacctcaactccgggttgattggagccttgttggtatgcagggaaggatctcttgccaaagagaagacacagaccctggccaagtttatccttctctttgctgtgttcgatgagggcaaaagttggcatagcgaaacgaagaattccctcatgcaggatcgcgacgcagccagcgccagagcttggcccaagatgcacactgtgaacggatatgtcaataggacgcttcctggcttgattgggtgtcatcggaaaagtgtctactggcacgtgatcggaatggggacaacaccagaggtccactccatatttctcgaaggccataccttccttgttcgaaaccacagacaggcatccttggggatctctcccattaccttcctcactgcccaaacgctccttcgtgacttgggtcagttccttctcttttgccatatcccgtcacaccagcatgatggtatggaagcttatgtgaaagtcgacagttgtcctgaggagccacagttgcgcatgaagaataatgaagaagccgaggattacgacgacgatctcaccgattctgagatggacgtggtgaggtttgatgacgacaactctccctccatcattcaagctcggagcggggcgaagaaacaccccaagacttgggtccactatatagcggcggaagaggaggattgggattacgctcctcttgtattggcaccagatgaccgctcatacaaaagccagtacctcaacaacggaccgcagagaattggccggaagtataagaaagtgcgatttatggcctatacagacgaaacctttaagacaagggaggccatccagcatgagagtgggattttgggacctcttctttacggcgaagttggtgataccctcctcatcatcttcaagaatcaagcttctcgcccctataacatttacccacacgggatcactgacgttaggcctttgtatagcagaagacttcccaaaggcgtgaagcatctcaaagacttccccattttgccaggcgagatctttaagtacaaatggaccgttacagtggaagatggaccgactaaatcagaccctcgatgccttacgcggtactattcctccttcgtgaatatggagagagatttggcaagcggactcataggaccactcctcatctgttacaaggaatctgtagaccagaggggtaaccagattatgagtgataaacgcaatgtgatcctttttagcgtcttcgacgagaaccggtcctggtacttgaccgagaatatagagaggttccttcccaaccccgcaggcgttcagttggaagaccctgagtttcaggccagcaatattatgcactcaatcaacggctatgtgtttgatagtctccagctttctgtttgcctccatgaagtagcctattggtacatcttgtcaattggtgctcaaacagacttcctctccgtcttcttctccggctacacctttaagcacaagatggtgtatgaggacactctcacactctttccattttctggagaaaccgtgttcatgagcatggagaatccaggcctttggatcttgggttgccacaacagtgattttcgcaatcggggaatgactgctctcctcaaagtcagcagctgtgattggaacacaggcgactattacgaagattcttacgaggacataagtgcctactttgactccaagaataacgccattgagcccagatcattctcccagaatcctcccgtgcttaaaaggcatcagcgcgaaggtaccagaactactcttcagtctgatcaagaggagattgactatgacgacaccattagcgtggaaatgaagaaggaggatttcgatatctatgacgaagatgagaaccagtctccgcggagctttcagaagaagacgcgacactacttcattgcagcagtcgaaaggctttgggactacggtatgtcatcaaaacctcatgtgttgcgcaatagagctcagagtggaagtgttccacagttcaagaaagtcgtctttcaagagtttacagatggcagcttcacacagcctctctatcggggcgagcttaacgaacatttgggactccttggtccctatatccgagccgaagtggaggacaacattatggttacctttaggaatcaagcctctcgcccctacagcttctactcctccctcatcagttatgaggaggatcagagacaaggcgctgaaccacggaagaactttgtgaaaccgaatgagacgaagacctacttctggaaagtacagcaccacatggcccccacaaaagacgaattcgattgcaaagcatgggcgtatttttcagacgttgacttggagaaagatgtacattcaggacttattggtcctttgttggtgtgtcacactaacactctcaatccagcccatggcaggcaggtgacagtccaggaattcgctcttttctttaccatctttgatgagaccaagtcctggtacttcacggaaaacatggagcgcaattgcagagccccctgtaacatacagatggaggaccctacctttaaggaaaattatcggttccacgcaatcaacggatacattatggatacactccctggccttgtgatggctcaggaccaacgaatcaggtggtacctcctcagcatgggttctaatgagaacatacactccattcacttttcaggacatgtgttcactgtccggaagaaagaagagtataagatggccctctacaatttgtatccaggcgtgtttgagaccgttgaaatgcttccctctaaagctggcatctggagagtagagtgcttgatcggagaacatcttcacgcaggtatgagcaccttgttcctcgtgtacagcaacaaatgtcagaatccacttggcatggccagtggacacattcgcgactttcagatcacagcatctggccagtatggacaatgggccccaaagttggctcgcctccattactccggtagcataaatgcgtggtccactaaagaacctttcagctggattaaggtcgatcttcttgcccccatgatcatccacggcattaagacacagggagcgaggcagaaattctcctccctctacatctcacagttcattattatgtatagtttggacggcaagaagtggcaaacttatagaggtaacagtactggaacagacatggtgttcttcggcaacgttgatagctctggcatcaaacacaacatctttaatcctcccataatagctcggtacatcagattgcatccgacccactacagcattaggagtacactccgaatggagcttatgggttgcgacttgaattcctgttcaatgccactcggaatggagtctaaagccatctctgatgcacagataaccgccagtagctactttacgaacatgtttgctacgtggtcaccctctaaggcaaggcttcatttgcaaggccggtctaatgcctggagacctcaggtgaacaacccgaaagaatggctccaggtggactttcagaagaccatgaaagtaacaggtgtcactactcagggagttaagtccttggatactagcatgtatgtgaaggagttccttatttcctcatcacaagatggccaccagtggaccctcttctttcagaatggtaaggtcaaagtgtttcagggcaatcaagacagcttcacacccgtggtgaacagtcttgatcctccactcttgacacgataccttcgaatccatccacagtcttgggagcaccagattgcattgcgcatggaagtacttggatgcgaggctcaggacctctac

SEQ ID NO: 1490 - protein, 1457 aa, synthetic construct
  REGION 1..1457: note = Variant of human B-domain deleted Factor VIII
MQIELSTCFFLCLLRFCFSATRRYYLGAVELSWDYMQSDLGELPVDARFPPRVPKSFPFNTSQVYKKTLFVEFTDHLFNIAKPRPPWMGLLGPTIQAEVYDTVVITLKNMASHPVSLHAVGVSYWKASEGAEYDDQTSQREKEDDKVFPGGSHTYVWQVLKENGPMASDPPCLTYSYLSHVDLVKDLNSGLIGALLVCREGSLAKEKTQTLAKFILLFAVFDEGKSWHSETKNSLMQDRDAASARAWPKMHTVNGYVNRTLPGLIGCHRKSVYWHVIGMGTTPEVHSIFLEGHTFLVRNHRQASLGISPITFLTAQTLLRDLGQFLLFCHIPSHQHDGMEAYVKVDSCPEEPQLRMKNNEEAEDYDDDLTDSEMDVVRFDDDNSPSIIQARSGAKKHPKTWVHYIAAEEEDWDYAPLVLAPDDRSYKSQYLNNGPQRIGRKYKKVRFMAYTDETFKTREAIQHESGILGPLLYGEVGDTLLIIFKNQASRPYNIYPHGITDVRPLYSRRLPKGVKHLKDFPILPGEIFKYKWTVTVEDGPTKSDPRCLTRYYSSFVNMERDLASGLIGPLLICYKESVDQRGNQIMSDKRNVILFSVFDENRSWYLTENIERFLPNPAGVQLEDPEFQASNIMHSINGYVFDSLQLSVCLHEVAYWYILSIGAQTDFLSVFFSGYTFKHKMVYEDTLTLFPFSGETVFMSMENPGLWILGCHNSDFRNRGMTALLKVSSCDWNTGDYYEDSYEDISAYFDSKNNAIEPRSFSQNPPVLKRHQREGTRTTLQSDQEEIDYDDTISVEMKKEDFDIYDEDENQSPRSFQKKTRHYFIAAVERLWDYGMSSKPHVLRNRAQSGSVPQFKKVVFQEFTDGSFTQPLYRGELNEHLGLLGPYIRAEVEDNIMVTFRNQASRPYSFYSSLISYEEDQRQGAEPRKNFVKPNETKTYFWKVQHHMAPTKDEFDCKAWAYFSDVDLEKDVHSGLIGPLLVCHTNTLNPAHGRQVTVQEFALFFTIFDETKSWYFTENMERNCRAPCNIQMEDPTFKENYRFHAINGYIMDTLPGLVMAQDQRIRWYLLSMGSNENIHSIHFSGHVFTVRKKEEYKMALYNLYPGVFETVEMLPSKAGIWRVECLIGEHLHAGMSTLFLVYSNKCQNPLGMASGHIRDFQITASGQYGQWAPKLARLHYSGSINAWSTKEPFSWIKVDLLAPMIIHGIKTQGARQKFSSLYISQFIIMYSLDGKKWQTYRGNSTGTDMVFFGNVDSSGIKHNIFNPPIIARYIRLHPTHYSIRSTLRMELMGCDLNSCSMPLGMESKAISDAQITASSYFTNMFATWSPSKARLHLQGRSNAWRPQVNNPKEWLQVDFQKTMKVTGVTTQGVKSLDTSMYVKEFLISSSQDGHQWTLFFQNGKVKVFQGNQDSFTPVVNSLDPPLLTRYLRIHPQSWEHQIALRMEVLGCEAQDLY

SEQ ID NO: 1491 - DNA, 4371 bp, synthetic construct
  misc_feature 1..4371: note = Variant of human B-domain deleted Factor VIII
  source 1..4371: mol_type = other DNA
atgcagattgaactgtctacctgcttcttcctctgtttgctgaggttctgctttagcgccactagacggtactaccttggcgctgtggagctgtcctgggactatatgcagagtgatttgggagagcttcccgtcgacgcacgatttcctcctcgcgttccaaagtcatttccctttaacacaagccaggtgtacaagaagacgctcttcgtcgaattcaccgatcacctgttcaatatcgccaaacccagaccaccatggatgggtcttttggggcctaccatacaagcggaggtgtatgacacagttgttatcactctcaagaacatggcttctcatccggtaagtcttcacgcagtgggcgtgtcctactggaaagcttcagaaggagccgagtatgatgatcagacatcccagagggagaaagaagacgacaaggtatttccaggtgggtctcatacctatgtgtggcaagtgctcaaagagaatggccctatggcaagcgatccgccgtgtttgacttacagctacctttcacacgttgacctcgtcaaggacctcaactccgggttgattggagccttgttggtatgcagggaaggatctcttgccaaagagaagacacagaccctccacaagtttatccttctctttgctgtgttcgatgagggcaaaagttggcatagcgaaacgaagaattccctcatgcaggatcgcgacgcagccagcgccagagcttggcccaagatgcacactgtgaacggatatgtcaataggacgcttcctggcttgattgggtgtcatcggaaaagtgtctactggcacgtgatcggaatggggacaacaccagaggtccactccatatttctcgaaggccataccttccttgttcgaaaccacagacaggcatccttggggatctctcccattacctttctcactgcccaaacgctccttcaagacttgggtcagttccttctcttttgccatatcccgtcacaccagcatgatggtatggaagcttatgtgaaagtcgacagttgtcctgaggagccacagttgcgcatgaagaataatgaagaagccgaggattacgacgacgatctcaccgattctgagatggacgtggtgaggtttgatgacgacaactctccctccatcattcaagctcggagcggggcgaagaaacaccccaagacttgggtccactatatagcggcggaagaggaggattgggattacgctcctcttgtattggcaccagatgaccgctcatacaaaagccagtacctcaacaacggaccgcagagaattggccggaagtataagaaagtgcgatttatggcctatacagacgaaacctttaagacaagggaggccatccagcatgagagtgggattttgggacctcttctttacggcgaagttggtgataccctcctcatcatcttcaagaatcaagcttctcgcccctataacatttacccacacgggatcactgacgttaggcctttgtatagcagaagacttcccaaaggcgtgaagcatctcaaagacttccccattttgccaggcgagatctttaagtacaaatggaccgttacagtggaagatggaccgactaaatcagaccctcgatgccttacgcggtactattcctccttcgtgaattgggagagagatttggcaagcggactcataggaccactcctcatctgttacaaggaatctgtagaccagaggggtaaccagattatgagtgataaacgcaatgtgatcctttttagcgtcttcgacgagaaccggtcctggtacttgaccgagaatatacaaaggttccttcccaaccctgcagaggttcagttggaagaccctgagtttcaggccagcaatattatgcactcaatcaacggctatgtgtttgatagtctccagctttctgtttgcctccatgaagtagcctattggtacatcttgtcaattggtgctcaaacagacttcctctccgtcttcttctccggctacacctttaagcacaagaacgtgtatgaggacactctcacactctttccattttctggagaaaccgtgttcatgagcatggagaatccaggcctttggatcttgggttgccacaacagtgattttcgcaatcggggaatgactgctctcctcaaagtcagcagctgtgattggaacacaggcgactattacgaagattcttacgaggacataagtgcctactttgactccaagaataacgccattgagcccagatcattctcccagaatcctcccgtgcttaaaaggcatcagcgcgaaggtaccagaactactcttcagtctgatcaagaggagattgactatgacgacaccattagcgtggaaatgaagaaggaggatttcgatatctatgacgaagatgagaaccagtctccgcggagctttcagaagaagacgcgacactacttcattgcagcagtcgaaaggctttgggactacggtatgtcatcatcgcctcatgtgttgcgcaatagagctcagagtggaagtgttccacagttcaagaaagtcgtctttcaagagtttacagatggcagcttcacacagcctctctatcggggcgagcttaacgaacatttgggactccttggtccctatatccgagccgaagtggaggacaacattatggttacctttaggaatcaagcctctcgcccctacagcttctactcctccctcatcagttatgaggaggatcagagacaaggcgctgaaccacggaagaactttgtgaaaccgaatgagacgaagacctacttctggaaagtacagcaccacatggcccccacaaaagacgaattcgattgcaaagcatgggcgtatttttcagacgttgacttggagaaagatgtacattcaggacttattggtcctttgttggtgtgtcacactaacactctcaatccagcccatggcaggcaggtgacagtccaggaattcgctcttttctttaccatctttgatgagaccaagtcctggtacttcacggaaaacatggagcgcaattgcagagccccctgtaacatacagatggaggaccctacctttaaggaaaattatcggttccacgcaatcaacggatacattatggatacactccctggccttgtgatggctcaggaccaacgaatcaggtggtacctcctcagcatgggttctaatgagaacatacactccattcacttttcaggacatgtgttcactgtccggaagaaagaagagtataagatggccctctacaatttgtatccaggcgtgtttgagaccgttgaaatgcttccctctaaagctggcatctggagagtagagtgcttgatcggagaacatcttcacgcaggtatgagcaccttgttcctcgtgtacagcaacaaatgtcagaatccacttggcatggccagtggacacattcgcgactttcagatcacagcatctggccagtatggacaatgggccccaaagttggctcgcctccattactccggtagcataaatgcgtggtccactaaagaacctttcagctggattaaggtcgatcttcttgcccccatgatcatccacggcattaagacacagggagcgaggcagaaattctcctccctctacatctcacagttcattattatgtatagtttggacggcaagaagtggcaaacttatagaggtaacagtactggaacagacatggtgttcttcggcaacgttgatagctctggcatcaaacacaacatctttaatcctcccataatagctcggtacatcagattgcatccgacccactacagcattaggagtacactccgaatggagcttatgggttgcgacttgaattcctgttcaatgccactcggaatggagtctaaagccatctctgatgcacagataaccgccagtagctactttacgaacatgtttgctacgtggtcaccctctaaggcaaggcttcatttgcaaggccggtctaatgcctggagacctcaggtgaacaacccgaaagaatggctccaggtggactttcagaagaccatgaaagtaacaggtgtcactactcagggagttaagtccttggatactagcatgtatgtgaaggagttccttatttcctcatcacaagatggccaccagtggaccctcttctttcagaatggtaaggtcaaagtgtttcagggcaatcaagacagcttcacacccgtggtgaacagtcttgatcctccactcttgacacgataccttcgaatccatccacagtcttgggagcaccagattgcattgcgcatggaagtacttggatgcgaggctcaggacctctac

SEQ ID NO: 1492 - protein, 1457 aa, synthetic construct
  REGION 1..1457: note = Variant of human B-domain deleted Factor VIII
MQIELSTCFFLCLLRFCFSATRRYYLGAVELSWDYMQSDLGELPVDARFPPRVPKSFPFNTSQVYKKTLFVEFTDHLFNIAKPRPPWMGLLGPTIQAEVYDTVVITLKNMASHPVSLHAVGVSYWKASEGAEYDDQTSQREKEDDKVFPGGSHTYVWQVLKENGPMASDPPCLTYSYLSHVDLVKDLNSGLIGALLVCREGSLAKEKTQTLHKFILLFAVFDEGKSWHSETKNSLMQDRDAASARAWPKMHTVNGYVNRTLPGLIGCHRKSVYWHVIGMGTTPEVHSIFLEGHTFLVRNHRQASLGISPITFLTAQTLLQDLGQFLLFCHIPSHQHDGMEAYVKVDSCPEEPQLRMKNNEEAEDYDDDLTDSEMDVVRFDDDNSPSIIQARSGAKKHPKTWVHYIAAEEEDWDYAPLVLAPDDRSYKSQYLNNGPQRIGRKYKKVRFMAYTDETFKTREAIQHESGILGPLLYGEVGDTLLIIFKNQASRPYNIYPHGITDVRPLYSRRLPKGVKHLKDFPILPGEIFKYKWTVTVEDGPTKSDPRCLTRYYSSFVNWERDLASGLIGPLLICYKESVDQRGNQIMSDKRNVILFSVFDENRSWYLTENIQRFLPNPAEVQLEDPEFQASNIMHSINGYVFDSLQLSVCLHEVAYWYILSIGAQTDFLSVFFSGYTFKHKNVYEDTLTLFPFSGETVFMSMENPGLWILGCHNSDFRNRGMTALLKVSSCDWNTGDYYEDSYEDISAYFDSKNNAIEPRSFSQNPPVLKRHQREGTRTTLQSDQEEIDYDDTISVEMKKEDFDIYDEDENQSPRSFQKKTRHYFIAAVERLWDYGMSSSPHVLRNRAQSGSVPQFKKVVFQEFTDGSFTQPLYRGELNEHLGLLGPYIRAEVEDNIMVTFRNQASRPYSFYSSLISYEEDQRQGAEPRKNFVKPNETKTYFWKVQHHMAPTKDEFDCKAWAYFSDVDLEKDVHSGLIGPLLVCHTNTLNPAHGRQVTVQEFALFFTIFDETKSWYFTENMERNCRAPCNIQMEDPTFKENYRFHAINGYIMDTLPGLVMAQDQRIRWYLLSMGSNENIHSIHFSGHVFTVRKKEEYKMALYNLYPGVFETVEMLPSKAGIWRVECLIGEHLHAGMSTLFLVYSNKCQNPLGMASGHIRDFQITASGQYGQWAPKLARLHYSGSINAWSTKEPFSWIKVDLLAPMIIHGIKTQGARQKFSSLYISQFIIMYSLDGKKWQTYRGNSTGTDMVFFGNVDSSGIKHNIFNPPIIARYIRLHPTHYSIRSTLRMELMGCDLNSCSMPLGMESKAISDAQITASSYFTNMFATWSPSKARLHLQGRSNAWRPQVNNPKEWLQVDFQKTMKVTGVTTQGVKSLDTSMYVKEFLISSSQDGHQWTLFFQNGKVKVFQGNQDSFTPVVNSLDPPLLTRYLRIHPQSWEHQIALRMEVLGCEAQDLY

SEQ ID NO: 1493 - DNA, 4371 bp, synthetic construct
  misc_feature 1..4371: note = Variant of human B-domain deleted Factor VIII
  source 1..4371: mol_type = other DNA
atgcagattgaactgtctacctgcttcttcctctgtttgctgaggttctgctttagcgccactagacggtactaccttggcgctgtggagctgtcctgggactatatgcagagtgatttgggagagcttcccgtcgacgcacgatttcctcctcgcgttccaaagtcatttccctttaacacaagccaggtgtacaagaagacgctcttcgtcgaattcaccgatcacctgttcaatatcgccaaacccagaccaccatggatgggtcttttggggcctaccatacaagcggaggtgtatgacacagttgttatcactctcaagaacatggcttctcatccggtaagtcttcacgcagtgggcgtgtcctactggaaagcttcagaaggagccgagtatgatgatcagacatcccagagggagaaagaagacgacaaggtatttccaggtgggtctcatacctatgtgtggcaagtgctcaaagagaatggccctatggcaagcgatccgccgtgtttgacttacagctacctttcacacgttgacctcgtcaaggacctcaactccgggttgattggagccttgttggtatgcagggaaggatctcttgccaaagagaagacacagaccctgcacaagtttatccttctctttgctgtgttcgatgagggcaaaagttggcatagcgaaacgaagaattccctcatgcaggatcgcgacgcagccagcgccagagcttggcccaagatgcacactgtgaacggatatgtcaataggacgcttcctggcttgattgggtgtcatcggaaaagtgtctactggcacgtgatcggaatggggacaacaccagaggtccactccatatttctcgaaggccataccttccttgttcgaaaccacagacaggcatccttggggatctctcccattaccctgctcactgcccaaacgctccttatggacttgggtcagttccttctcttttgccatatcccgtcacaccagcatgatggtatggaagcttatgtgaaagtcgacagttgtcctgaggagccacagttgcgcatgaagaataatgaagaagccgaggattacgacgacgatctcaccgattctgagatggacgtggtgaggtttgatgacgacaactctccctccatcattcaagctcggagcggggcgaagaaacaccccaagacttgggtccactatatagcggcggaagaggaggattgggattacgctcctcttgtattggcaccagatgaccgctcatacaaaagccagtacctcaacaacggaccgcagagaattggccggaagtataagaaagtgcgatttatggcctatacagacgaaacctttaagacaagggaggccatccagcatgagagtgggattttgggacctcttctttacggcgaagttggtgataccctcctcatcatcttcaagaatcaagcttctcgcccctataacatttacccacacgggatcactgacgttaggcctttgtatagcagaagacttcccaaaggcgtgaagcatctcaaagacttccccattttgccaggcgagatctttaagtacaaatggcgcgttacagtggaagatggaccgactaaatcagaccctcgatgccttacgcggtactattcctccttcgtgaatatggagagagatttggcaagcggactcataggaccactcctcatctgttacaaggaatctgtagaccagaggggtaaccagattatgagtgataaacgcaatgtgatcctttttagcgtcttcgacgagaaccggtcctggtacttgaccgagaatatacaaaggttccttcccaacgacgcaggggttcagttggaagaccctgagtttcaggccagcaatattatgcactcaatcaacggctatgtgtttgatagtctccagctttctgtttgcctccatgaagtagcctattggtacatcttgtcaattggtgctcaaacagacttcctctccgtcttcttctccggctacacctttaagcacaagaacgtgtatgaggacactctcacactctttccattttctggagaaaccgtgttcatgagcatggagaatccaggcctttggatcttgggttgccacaacagtgattttcgcaatcggggaatgactgctctcctcaaagtcagcagctgtgattggaacacaggcgactattacgaagattcttacgaggacataagtgcctactttgactccaagaataacgccattgagcccagatcattctcccagaatcctcccgtgcttaaaaggcatcagcgcgaaggtaccagaactactcttcagtctgatcaagaggagattgactatgacgacaccattagcgtggaatggaagaaggaggatttcgatatctatgacgaagatgagaaccagtctccgcggagctttcagaagaagacgcgacactacttcattgcagcagtcgaaaggctttgggactacggtatgtcatcaaaacctcatgtgttgcgcaatagagctcagagtggaagtgttccacagttcaagaaagtcgtctttcaagagtttacagatggcagcttcacacagcctctctatcggggcgagcttaacgaacatttgggactccttggtccctatatccgagccgaagtggaggacaacattatggttacctttaggaatcaagcctctcgcccctacagcttctactcctccctcatcagttatgaggaggatcagagacaaggcgctgaaccacggaagaactttgtgaaaccgaatgagacgaagacctacttctggaaagtacagcaccacatggcccccacaaaagacgaattcgattgcaaagcatgggcgtatttttcagacgttgacttggagaaagatgtacattcaggacttattggtcctttgttggtgtgtcacactaacactctcaatccagcccatggcaggcaggtgacagtccaggaattcgctcttttctttaccatctttgatgagaccaagtcctggtacttcacggaaaacatggagcgcaattgcagagccccctgtaacatacagatggaggaccctacctttaaggaaaattatcggttccacgcaatcaacggatacattatggatacactccctggccttgtgatggctcaggaccaacgaatcaggtggtacctcctcagcatgggttctaatgagaacatacactccattcacttttcaggacatgtgttcactgtccggaagaaagaagagtataagatggccctctacaatttgtatccaggcgtgtttgagaccgttgaaatgcttccctctaaagctggcatctggagagtagagtgcttgatcggagaacatcttcacgcaggtatgagcaccttgttcctcgtgtacagcaacaaatgtcagaatccacttggcatggccagtggacacattcgcgactttcagatcacagcatctggccagtatggacaatgggccccaaagttggctcgcctccattactccggtagcataaatgcgtggtccactaaagaacctttcagctggattaaggtcgatcttcttgcccccatgatcatccacggcattaagacacagggagcgaggcagaaattctcctccctctacatctcacagttcattattatgtatagtttggacggcaagaagtggcaaacttatagaggtaacagtactggaacagacatggtgttcttcggcaacgttgatagctctggcatcaaacacaacatctttaatcctcccataatagctcggtacatcagattgcatccgacccactacagcattaggagtacactccgaatggagcttatgggttgcgacttgaattcctgttcaatgccactcggaatggagtctaaagccatctctgatgcacagataaccgccagtagctactttacgaacatgtttgctacgtggtcaccctctaaggcaaggcttcatttgcaaggccggtctaatgcctggagacctcaggtgaacaacccgaaagaatggctccaggtggactttcagaagaccatgaaagtaacaggtgtcactactcagggagttaagtccttggatactagcatgtatgtgaaggagttccttatttcctcatcacaagatggccaccagtggaccctcttctttcagaatggtaaggtcaaagtgtttcagggcaatcaagacagcttcacacccgtggtgaacagtcttgatcctccactcttgacacgataccttcgaatccatccacagtcttgggagcaccagattgcattgcgcatggaagtacttggatgcgaggctcaggacctctac

SEQ ID NO: 1494 - protein, 1457 aa, synthetic construct
  REGION 1..1457: note = Variant of human B-domain deleted Factor VIII
MQIELSTCFFLCLLRFCFSATRRYYLGAVELSWDYMQSDLGELPVDARFPPRVPKSFPFNTSQVYKKTLFVEFTDHLFNIAKPRPPWMGLLGPTIQAEVYDTVVITLKNMASHPVSLHAVGVSYWKASEGAEYDDQTSQREKEDDKVFPGGSHTYVWQVLKENGPMASDPPCLTYSYLSHVDLVKDLNSGLIGALLVCREGSLAKEKTQTLHKFILLFAVFDEGKSWHSETKNSLMQDRDAASARAWPKMHTVNGYVNRTLPGLIGCHRKSVYWHVIGMGTTPEVHSIFLEGHTFLVRNHRQASLGISPITLLTAQTLLMDLGQFLLFCHIPSHQHDGMEAYVKVDSCPEEPQLRMKNNEEAEDYDDDLTDSEMDVVRFDDDNSPSIIQARSGAKKHPKTWVHYIAAEEEDWDYAPLVLAPDDRSYKSQYLNNGPQRIGRKYKKVRFMAYTDETFKTREAIQHESGILGPLLYGEVGDTLLIIFKNQASRPYNIYPHGITDVRPLYSRRLPKGVKHLKDFPILPGEIFKYKWRVTVEDGPTKSDPRCLTRYYSSFVNMERDLASGLIGPLLICYKESVDQRGNQIMSDKRNVILFSVFDENRSWYLTENIQRFLPNDAGVQLEDPEFQASNIMHSINGYVFDSLQLSVCLHEVAYWYILSIGAQTDFLSVFFSGYTFKHKNVYEDTLTLFPFSGETVFMSMENPGLWILGCHNSDFRNRGMTALLKVSSCDWNTGDYYEDSYEDISAYFDSKNNAIEPRSFSQNPPVLKRHQREGTRTTLQSDQEEIDYDDTISVEWKKEDFDIYDEDENQSPRSFQKKTRHYFIAAVERLWDYGMSSKPHVLRNRAQSGSVPQFKKVVFQEFTDGSFTQPLYRGELNEHLGLLGPYIRAEVEDNIMVTFRNQASRPYSFYSSLISYEEDQRQGAEPRKNFVKPNETKTYFWKVQHHMAPTKDEFDCKAWAYFSDVDLEKDVHSGLIGPLLVCHTNTLNPAHGRQVTVQEFALFFTIFDETKSWYFTENMERNCRAPCNIQMEDPTFKENYRFHAINGYIMDTLPGLVMAQDQRIRWYLLSMGSNENIHSIHFSGHVFTVRKKEEYKMALYNLYPGVFETVEMLPSKAGIWRVECLIGEHLHAGMSTLFLVYSNKCQNPLGMASGHIRDFQITASGQYGQWAPKLARLHYSGSINAWSTKEPFSWIKVDLLAPMIIHGIKTQGARQKFSSLYISQFIIMYSLDGKKWQTYRGNSTGTDMVFFGNVDSSGIKHNIFNPPIIARYIRLHPTHYSIRSTLRMELMGCDLNSCSMPLGMESKAISDAQITASSYFTNMFATWSPSKARLHLQGRSNAWRPQVNNPKEWLQVDFQKTMKVTGVTTQGVKSLDTSMYVKEFLISSSQDGHQWTLFFQNGKVKVFQGNQDSFTPVVNSLDPPLLTRYLRIHPQSWEHQIALRMEVLGCEAQDLY

SEQ ID NO: 1495 - DNA, 4371 bp, synthetic construct
  misc_feature 1..4371: note = Variant of human B-domain deleted Factor VIII
  source 1..4371: mol_type = other DNA
atgcagattgaactgtctacctgcttcttcctctgtttgctgaggttctgctttagcgccactagacggtactaccttggcgctgtggagctgtcctgggactatatgcagagtgatttgggagagcttcccgtcgacgcacgatttcctcctcgcgttccaaagtcatttccctttaacacaagccaggtgtacaagaagacgctcttcgtcgaattcaccgatcacctgttcaatatcgccaaacccagaccaccatggatgggtcttttggggcctaccatacaagcggaggtgtatgacacagttgttatcactctcaagaacatggcttctcatccggtaagtcttcacgcagtgggcgtgtcctactggaaagcttcagaaggagccgagtatgatgatcagacatcccagagggagaaagaagacgacaaggtatttccaggtgggtctcatacctatgtgtggcaagtgctcaaagagaatggccctatggcaagcgatccgccgtgtttgacttacagctacctttcacacgttgacctcgtcaaggacctcaactccgggttgattggagccttgttggtatgcagggaaggatctcttgccaaagagaagacacagaccctgcacaagtttatccttctctttgctgtgttcgatgagggcaaaagttggcatagcgaaacgaagaattccctcatgcaggatcgcgacgcagccagcgccagagcttggcccaagatgcacactgtgaacggatatgtcaataggacgcttcctggcttgattgggtgtcatcggaaaagtgtctactggcacgtgatcggaatggggacaacaccagaggtccactccatatttctcgaaggccataccttccttgttcgaaaccacagacaggcatccttggggatctctcccattaccttcctcactgcccaaacgctccttatggacttgggtcagttccttctcttttgccatatcccgtcacaccagcatgatggtatggaagcttatgtgaaagtcgacagttgtcctgaggagccacagttgcgcatgaagaataatgaagaagccgaggattacgacgacgatctcaccgattctgagatggacgtggtgaggtttgatgacgacaactctccctccatcattcaagctcggagcggggcgaagaaacaccccaagacttgggtccactatatagcggcggaagaggaggattgggattacgctcctcttgtattggcaccagatgaccgctcatacaaaagccagtacctcaacaacggaccgcagagaattggccggaagtataagaaagtgcgatttatggcctatacagacgaaacctttaagacaagggaggccatccagcatgagagtgggattttgggacctcttctttacggcgaagttggtgataccctcctcatcatcttcaagaatcaagcttctcgcccctataacatttacccacacgggatcactgacgttaggcctttgtatagcagaagacttcccaaaggcgtgaagcatctcaaagacttccccattttgccaggcgagatctttaagtacaaatggaccgttacagtggaagatggaccgactaaatcagaccctcgatgccttacgcggtactattcctccttcgtgaattgggagagagatttggcaagcggactcataggaccactcctcatctgttacaaggaatctgtagaccagaggggtaaccagattatgagtgataaacgcaatgtgatcctttttagcgtcttcgacgagaaccggtcctggtacttgaccgagaatatagagaggttccttcccaaccccgcaggcgttcagttggaagaccctgagtttcaggccagcaatattatgcactcaatcaacggctatgtgtttgatagtctccagctttctgtttgcctccatgaagtagcctattggtacatcttgtcaattggtgctcaaacagacttcctctccgtcttcttctccggctacacctttaagcacaagaacgtgtatgaggacactctcacactctttccattttctggagaaaccgtgttcatgagcatggagaatccaggcctttggatcttgggttgccacaacagtgattttcgcaatcggggaatgactgctctcctcaaagtcagcagctgtgattggaacacaggcgactattacgaagattcttacgaggacataagtgcctactttgactccaagaataacgccattgagcccagatcattctcccagaatcctcccgtgcttaaaaggcatcagcgcgaaggtaccagaactactcttcagtctgatcaagaggagattgactatgacgacaccattagcgtggaaatgaagaaggaggatttcgatatctatgacgaagatgagaaccagtctccgcggagctttcagaagaagacgcgacactacttcattgcagcagtcgaaaggctttgggactacggtatgtcatcatcgcctcatgtgttgcgcaatagagctcagagtggaagtgttccacagttcaagaaagtcgtctttcaagagtttacagatggcagcttcacacagcctctctatcggggcgagcttaacgaacatttgggactccttggtccctatatccgagccgaagtggaggacaacattatggttacctttaggaatcaagcctctcgcccctacagcttctactcctccctcatcagttatgaggaggatcagagacaaggcgctgaaccacggaagaactttgtgaaaccgaatgagacgaagacctacttctggaaagtacagcaccacatggcccccacaaaagacgaattcgattgcaaagcatgggcgtatttttcagacgttgacttggagaaagatgtacattcaggacttattggtcctttgttggtgtgtcacactaacactctcaatccagcccatggcaggcaggtgacagtccaggaattcgctcttttctttaccatctttgatgagaccaagtcctggtacttcacggaaaacatggagcgcaattgcagagccccctgtaacatacagatggaggaccctacctttaaggaaaattatcggttccacgcaatcaacggatacattatggatacactccctggccttgtgatggctcaggaccaacgaatcaggtggtacctcctcagcatgggttctaatgagaacatacactccattcacttttcaggacatgtgttcactgtccggaagaaagaagagtataagatggccctctacaatttgtatccaggcgtgtttgagaccgttgaaatgcttccctctaaagctggcatctggagagtagagtgcttgatcggagaacatcttcacgcaggtatgagcaccttgttcctcgtgtacagcaacaaatgtcagaatccacttggcatggccagtggacacattcgcgactttcagatcacagcatctggccagtatggacaatgggccccaaagttggctcgcctccattactccggtagcataaatgcgtggtccactaaagaacctttcagctggattaaggtcgatcttcttgcccccatgatcatccacggcattaagacacagggagcgaggcagaaattctcctccctctacatctcacagttcattattatgtatagtttggacggcaagaagtggcaaacttatagaggtaacagtactggaacagacatggtgttcttcggcaacgttgatagctctggcatcaaacacaacatctttaatcctcccataatagctcggtacatcagattgcatccgacccactacagcattaggagtacactccgaatggagcttatgggttgcgacttgaattcctgttcaatgccactcggaatggagtctaaagccatctctgatgcacagataaccgccagtagctactttacgaacatgtttgctacgtggtcaccctctaaggcaaggcttcatttgcaaggccggtctaatgcctggagacctcaggtgaacaacccgaaagaatggctccaggtggactttcagaagaccatgaaagtaacaggtgtcactactcagggagttaagtccttggatactagcatgtatgtgaaggagttccttatttcctcatcacaagatggccaccagtggaccctcttctttcagaatggtaaggtcaaagtgtttcagggcaatcaagacagcttcacacccgtggtgaacagtcttgatcctccactcttgacacgataccttcgaatccatccacagtcttgggagcaccagattgcattgcgcatggaagtacttggatgcgaggctcaggacctctac

SEQ ID NO: 1496 - protein, 1457 aa, synthetic construct
  REGION 1..1457: note = Variant of human B-domain deleted Factor VIII
MQIELSTCFFLCLLRFCFSATRRYYLGAVELSWDYMQSDLGELPVDARFPPRVPKSFPFNTSQVYKKTLFVEFTDHLFNIAKPRPPWMGLLGPTIQAEVYDTVVITLKNMASHPVSLHAVGVSYWKASEGAEYDDQTSQREKEDDKVFPGGSHTYVWQVLKENGPMASDPPCLTYSYLSHVDLVKDLNSGLIGALLVCREGSLAKEKTQTLHKFILLFAVFDEGKSWHSETKNSLMQDRDAASARAWPKMHTVNGYVNRTLPGLIGCHRKSVYWHVIGMGTTPEVHSIFLEGHTFLVRNHRQASLGISPITFLTAQTLLMDLGQFLLFCHIPSHQHDGMEAYVKVDSCPEEPQLRMKNNEEAEDYDDDLTDSEMDVVRFDDDNSPSIIQARSGAKKHPKTWVHYIAAEEEDWDYAPLVLAPDDRSYKSQYLNNGPQRIGRKYKKVRFMAYTDETFKTREAIQHESGILGPLLYGEVGDTLLIIFKNQASRPYNIYPHGITDVRPLYSRRLPKGVKHLKDFPILPGEIFKYKWTVTVEDGPTKSDPRCLTRYYSSFVNWERDLASGLIGPLLICYKESVDQRGNQIMSDKRNVILFSVFDENRSWYLTENIERFLPNPAGVQLEDPEFQASNIMHSINGYVFDSLQLSVCLHEVAYWYILSIGAQTDFLSVFFSGYTFKHKNVYEDTLTLFPFSGETVFMSMENPGLWILGCHNSDFRNRGMTALLKVSSCDWNTGDYYEDSYEDISAYFDSKNNAIEPRSFSQNPPVLKRHQREGTRTTLQSDQEEIDYDDTISVEMKKEDFDIYDEDENQSPRSFQKKTRHYFIAAVERLWDYGMSSSPHVLRNRAQSGSVPQFKKVVFQEFTDGSFTQPLYRGELNEHLGLLGPYIRAEVEDNIMVTFRNQASRPYSFYSSLISYEEDQRQGAEPRKNFVKPNETKTYFWKVQHHMAPTKDEFDCKAWAYFSDVDLEKDVHSGLIGPLLVCHTNTLNPAHGRQVTVQEFALFFTIFDETKSWYFTENMERNCRAPCNIQMEDPTFKENYRFHAINGYIMDTLPGLVMAQDQRIRWYLLSMGSNENIHSIHFSGHVFTVRKKEEYKMALYNLYPGVFETVEMLPSKAGIWRVECLIGEHLHAGMSTLFLVYSNKCQNPLGMASGHIRDFQITASGQYGQWAPKLARLHYSGSINAWSTKEPFSWIKVDLLAPMIIHGIKTQGARQKFSSLYISQFIIMYSLDGKKWQTYRGNSTGTDMVFFGNVDSSGIKHNIFNPPIIARYIRLHPTHYSIRSTLRMELMGCDLNSCSMPLGMESKAISDAQITASSYFTNMFATWSPSKARLHLQGRSNAWRPQVNNPKEWLQVDFQKTMKVTGVTTQGVKSLDTSMYVKEFLISSSQDGHQWTLFFQNGKVKVFQGNQDSFTPVVNSLDPPLLTRYLRIHPQSWEHQIALRMEVLGCEAQDLY

SEQ ID NO: 1497 - DNA, 4371 bp, synthetic construct
  misc_feature 1..4371: note = Variant of human B-domain deleted Factor VIII
  source 1..4371: mol_type = other DNA
atgcagattgaactgtctacctgcttcttcctctgtttgctgaggttctgctttagcgccactagacggtactaccttggcgctgtggagctgtcctgggactatatgcagagtgatttgggagagcttcccgtcgacgcacgatttcctcctcgcgttccaaagtcatttccctttaacacaagccaggtgtacaagaagacgctcttcgtcgaattcaccgatcacctgttcaatatcgccaaacccagaccaccatggatgggtcttttggggcctaccatacaagcggaggtgtatgacacagttgttatcactctcaagaacatggcttctcatccggtaagtcttcacgcagtgggcgtgtcctactggaaagcttcagaaggagccgagtatgatgatcagacatcccagagggagaaagaagacgacaaggtatttccaggtgggtctcatacctatgtgtggcaagtgctcaaagagaatggccctatggcaagcgatccgccgtgtttgacttacagctacctttcacacgttgacctcgtcaaggacctcaactccgggttgattggagccttgttggtatgcagggaaggatctcttgccaaagagaagacacagaccctgcacaagtttatccttctctttgctgtgttcgatgagggcaaaagttggcatagcgaaacgaagaattccctcatgcaggatcgcgacgcagccagcgccagagcttggcccaagatgcacactgtgaacggatatgtcaataggacgcttcctggcttgattgggtgtcatcggaaaagtgtctactggcacgtgatcggaatggggacaacaccagaggtccactccatatttctcgaaggccataccttccttgttcgaaaccacagacaggcatccttggggatctctcccattaccctgctcactgcccaaacgctccttatggacttgggtcagttccttctcttttgccatatcccgtcacaccagcatgatggtatggaagcttatgtgaaagtcgacagttgtcctgaggagccacagttgcgcatgaagaataatgaagaagccgaggattacgacgacgatctcaccgattctgagatggacgtggtgaggtttgatgacgacaactctccctccatcattcaagctcggagcggggcgaagaaacaccccaagacttgggtccactatatagcggcggaagaggaggattgggattacgctcctcttgtattggcaccagatgaccgctcatacaaaagccagtacctcaacaacggaccgcagagaattggccggaagtataagaaagtgcgatttatggcctatacagacgaaacctttaagacaagggaggccatccagcatgagagtgggattttgggacctcttctttacggcgaagttggtgataccctcctcatcatcttcaagaatcaagcttctcgcccctataacatttacccacacgggatcactgacgttaggcctttgtatagcagaagacttcccaaaggcgtgaagcatctcaaagacttccccattttgccaggcgagatctttaagtacaaatggaccgttacagtggaagatggaccgactaaatcagaccctcgatgccttacgcggtactattcctccttcgtgaatatggagagagatttggcaagcggactcataggaccactcctcatctgttacaaggaatctgtagaccagaggggtaaccagattatgagtgataaacgcaatgtgatcctttttagcgtcttcgacgagaaccggtcctggtacttgaccgagaatatacaaaggttccttcccaaccccgcaggcgttcagttggaagaccctgagtttcaggccagcaatattatgcactcaatcaacggctatgtgtttgatagtctccagctttctgtttgcctccatgaagtagcctattggtacatcttgtcaattggtgctcaaacagacttcctctccgtcttcttctccggctacacctttaagcacaagatggtgtatgaggacactctcacactctttccattttctggagaaaccgtgttcatgagcatggagaatccaggcctttggatcttgggttgccacaacagtgattttcgcaatcggggaatgactgctctcctcaaagtcagcagctgtgattggaacacaggcgactattacgaagattcttacgaggacataagtgcctactttgactccaagaataacgccattgagcccagatcattctcccagaatcctcccgtgcttaaaaggcatcagcgcgaaggtaccagaactactcttcagtctgatcaagaggagattgactatgacgacaccattagcgtggaaatgaagaaggaggatttcgatatctatgacgaagatgagaaccagtctccgcggagctttcagaagaagacgcgacactacttcattgcagcagtcgaaaggctttgggactacggtatgtcatcatcccctcatgtgttgcgcaatagagctcagagtggaagtgttccacagttcaagaaagtcgtctttcaagagtttacagatggcagcttcacacagcctctctatcggggcgagcttaacgaacatttgggactccttggtccctatatccgagccgaagtggaggacaacattatggttacctttaggaatcaagcctctcgcccctacagcttctactcctccctcatcagttatgaggaggatcagagacaaggcgctgaaccacggaagaactttgtgaaaccgaatgagacgaagacctacttctggaaagtacagcaccacatggcccccacaaaagacgaattcgattgcaaagcatgggcgtatttttcagacgttgacttggagaaagatgtacattcaggacttattggtcctttgttggtgtgtcacactaacactctcaatccagcccatggcaggcaggtgacagtccaggaattcgctcttttctttaccatctttgatgagaccaagtcctggtacttcacggaaaacatggagcgcaattgcagagccccctgtaacatacagatggaggaccctacctttaaggaaaattatcggttccacgcaatcaacggatacattatggatacactccctggccttgtgatggctcaggaccaacgaatcaggtggtacctcctcagcatgggttctaatgagaacatacactccattcacttttcaggacatgtgttcactgtccggaagaaagaagagtataagatggccctctacaatttgtatccaggcgtgtttgagaccgttgaaatgcttccctctaaagctggcatctggagagtagagtgcttgatcggagaacatcttcacgcaggtatgagcaccttgttcctcgtgtacagcaacaaatgtcagaatccacttggcatggccagtggacacattcgcgactttcagatcacagcatctggccagtatggacaatgggccccaaagttggctcgcctccattactccggtagcataaatgcgtggtccactaaagaacctttcagctggattaaggtcgatcttcttgcccccatgatcatccacggcattaagacacagggagcgaggcagaaattctcctccctctacatctcacagttcattattatgtatagtttggacggcaagaagtggcaaacttatagaggtaacagtactggaacagacatggtgttcttcggcaacgttgatagctctggcatcaaacacaacatctttaatcctcccataatagctcggtacatcagattgcatccgacccactacagcattaggagtacactccgaatggagcttatgggttgcgacttgaattcctgttcaatgccactcggaatggagtctaaagccatctctgatgcacagataaccgccagtagctactttacgaacatgtttgctacgtggtcaccctctaaggcaaggcttcatttgcaaggccggtctaatgcctggagacctcaggtgaacaacccgaaagaatggctccaggtggactttcagaagaccatgaaagtaacaggtgtcactactcagggagttaagtccttggatactagcatgtatgtgaaggagttccttatttcctcatcacaagatggccaccagtggaccctcttctttcagaatggtaaggtcaaagtgtttcagggcaatcaagacagcttcacacccgtggtgaacagtcttgatcctccactcttgacacgataccttcgaatccatccacagtcttgggagcaccagattgcattgcgcatggaagtacttggatgcgaggctcaggacctctac

SEQ ID NO: 1498 - protein, 1457 aa, synthetic construct
  REGION 1..1457: note = Variant of human B-domain deleted Factor VIII
MQIELSTCFFLCLLRFCFSATRRYYLGAVELSWDYMQSDLGELPVDARFPPRVPKSFPFNTSQVYKKTLFVEFTDHLFNIAKPRPPWMGLLGPTIQAEVYDTVVITLKNMASHPVSLHAVGVSYWKASEGAEYDDQTSQREKEDDKVFPGGSHTYVWQVLKENGPMASDPPCLTYSYLSHVDLVKDLNSGLIGALLVCREGSLAKEKTQTLHKFILLFAVFDEGKSWHSETKNSLMQDRDAASARAWPKMHTVNGYVNRTLPGLIGCHRKSVYWHVIGMGTTPEVHSIFLEGHTFLVRNHRQASLGISPITLLTAQTLLMDLGQFLLFCHIPSHQHDGMEAYVKVDSCPEEPQLRMKNNEEAEDYDDDLTDSEMDVVRFDDDNSPSIIQARSGAKKHPKTWVHYIAAEEEDWDYAPLVLAPDDRSYKSQYLNNGPQRIGRKYKKVRFMAYTDETFKTREAIQHESGILGPLLYGEVGDTLLIIFKNQASRPYNIYPHGITDVRPLYSRRLPKGVKHLKDFPILPGEIFKYKWTVTVEDGPTKSDPRCLTRYYSSFVNMERDLASGLIGPLLICYKESVDQRGNQIMSDKRNVILFSVFDENRSWYLTENIQRFLPNPAGVQLEDPEFQASNIMHSINGYVFDSLQLSVCLHEVAYWYILSIGAQTDFLSVFFSGYTFKHKMVYEDTLTLFPFSGETVFMSMENPGLWILGCHNSDFRNRGMTALLKVSSCDWNTGDYYEDSYEDISAYFDSKNNAIEPRSFSQNPPVLKRHQREGTRTTLQSDQEEIDYDDTISVEMKKEDFDIYDEDENQSPRSFQKKTRHYFIAAVERLWDYGMSSSPHVLRNRAQSGSVPQFKKVVFQEFTDGSFTQPLYRGELNEHLGLLGPYIRAEVEDNIMVTFRNQASRPYSFYSSLISYEEDQRQGAEPRKNFVKPNETKTYFWKVQHHMAPTKDEFDCKAWAYFSDVDLEKDVHSGLIGPLLVCHTNTLNPAHGRQVTVQEFALFFTIFDETKSWYFTENMERNCRAPCNIQMEDPTFKENYRFHAINGYIMDTLPGLVMAQDQRIRWYLLSMGSNENIHSIHFSGHVFTVRKKEEYKMALYNLYPGVFETVEMLPSKAGIWRVECLIGEHLHAGMSTLFLVYSNKCQNPLGMASGHIRDFQITASGQYGQWAPKLARLHYSGSINAWSTKEPFSWIKVDLLAPMIIHGIKTQGARQKFSSLYISQFIIMYSLDGKKWQTYRGNSTGTDMVFFGNVDSSGIKHNIFNPPIIARYIRLHPTHYSIRSTLRMELMGCDLNSCSMPLGMESKAISDAQITASSYFTNMFATWSPSKARLHLQGRSNAWRPQVNNPKEWLQVDFQKTMKVTGVTTQGVKSLDTSMYVKEFLISSSQDGHQWTLFFQNGKVKVFQGNQDSFTPVVNSLDPPLLTRYLRIHPQSWEHQIALRMEVLGCEAQDLY

SEQ ID NO: 1499 - DNA, 4371 bp, synthetic construct
  misc_feature 1..4371: note = Variant of human B-domain deleted Factor VIII
  source 1..4371: mol_type = other DNA
atgcagattgaactgtctacctgcttcttcctctgtttgctgaggttctgctttagcgccactagacggtactaccttggcgctgtggagctgtcctgggactatatgcagagtgatttgggagagcttcccgtcgacgcacgatttcctcctcgcgttccaaagtcatttccctttaacacaagccaggtgtacaagaagacgctcttcgtcgaattcaccgatcacctgttcaatatcgccaaacccagaccaccatggatgggtcttttggggcctaccatacaagcggaggtgtatgacacagttgttatcactctcaagaacatggcttctcatccggtaagtcttcacgcagtgggcgtgtcctactggaaagcttcagaaggagccgagtatgatgatcagacatcccagagggagaaagaagacgacaaggtatttccaggtgggtctcatacctatgtgtggcaagtgctcaaagagaatggccctatggcaagcgatccgccgtgtttgacttacagctacctttcacacgttgacctcgtcaaggacctcaactccgggttgattggagccttgttggtatgcagggaaggatctcttgccaaagagaagacacagacccaacacaagtttatccttctctttgctgtgttcgatgagggcaaaagttggcatagcgaaacgaagaattccctcatgcaggatcgcgacgcagccagcgccagagcttggcccaagatgcacactgtgaacggatatgtcaataggacgcttcctggcttgattgggtgtcatcggaaaagtgtctactggcacgtgatcggaatggggacaacaccagaggtccactccatatttctcgaaggccataccttccttgttcgaaaccacagacaggcatccttggggatctctcccattacctttctcactgcccaaacgctccttcgtgacttgggtcagttccttctcttttgccatatcccgtcacaccagcatgatggtatggaagcttatgtgaaagtcgacagttgtcctgaggagccacagttgcgcatgaagaataatgaagaagccgaggattacgacgacgatctcaccgattctgagatggacgtggtgaggtttgatgacgacaactctccctccatcattcaagctcggagcggggcgaagaaacaccccaagacttgggtccactatatagcggcggaagaggaggattgggattacgctcctcttgtattggcaccagatgaccgctcatacaaaagccagtacctcaacaacggaccgcagagaattggccggaagtataagaaagtgcgatttatggcctatacagacgaaacctttaagacaagggaggccatccagcatgagagtgggattttgggacctcttctttacggcgaagttggtgataccctcctcatcatcttcaagaatcaagcttctcgcccctataacatttacccacacgggatcactgacgttaggcctttgtatagcagaagacttcccaaaggcgtgaagcatctcaaagacttccccattttgccaggcgagatctttaagtacaaatggaccgtcacagtggaagatggaccgactaaatcagaccctcgatgccttacgcggtactattcctccttcgtgaattgggagagagatttggcaagcggactcataggaccactcctcatctgttacaaggaatctgtagaccagaggggtaaccagattatgagtgataaacgcaatgtgatcctttttagcgtcttcgacgagaaccggtcctggtacttgaccgagaatatacaaaggttccttcccaaccctgcagaggttcagttggaagaccctgagtttcaggccagcaatattatgcactcaatcaacggctatgtgtttgatagtctccagctttctgtttgcctccatgaagtagcctattggtacatcttgtcaattggtgctcaaacagacttcctctccgtcttcttctccggctacacctttaagcacaagggcgtgtatgaggacactctcacactctttccattttctggagaaaccgtgttcatgagcatggagaatccaggcctttggatcttgggttgccacaacagtgattttcgcaatcggggaatgactgctctcctcaaagtcagcagctgtgataaaaacacaggcgactattacgaagattcttacgaggacataagtgcctactttgactccaagaataacgccattgagcccagatcattctcccagaatcctcccgtgcttaaaaggcatcagcgcgaaggtaccagaactactcttcagtctgatcaagaggagattgactatgacgacaccattagcgtggaatggaagaaggaggatttcgatatctatgacgaagatgagaaccagtctccgcggagctttcagaagaagacgcgacactacttcattgcagcagtcgaaaggctttgggactacggtatgtcatcaaaacctcatgtgttgcgcaatagagctcagagtggaagtgttccacagttcaagaaagtcgtctttcaagagtttacagatggcagcttcacacagcctctctatcggggcgagcttaacgaacatttgggactccttggtccctatatccgagccgaagtggaggacaacattatggttacctttaggaatcaagcctctcgcccctacagcttctactcctccctcatcagttatgaggaggatcagagacaaggcgctgaaccacggaagaactttgtgaaaccgaatgagacgaagacctacttctggaaagtacagcaccacatggcccccacaaaagacgaattcgattgcaaagcatgggcgtatttttcagacgttgacttggagaaagatgtacattcaggacttattggtcctttgttggtgtgtcacactaacactctcaatccagcccatggcaggcaggtgacagtccaggaattcgctcttttctttaccatctttgatgagaccaagtcctggtacttcacggaaaacatggagcgcaattgcagagccccctgtaacatacagatggaggaccctacctttaaggaaaattatcggttccacgcaatcaacggatacattatggatacactccctggccttgtgatggctcaggaccaacgaatcaggtggtacctcctcagcatgggttctaatgagaacatacactccattcacttttcaggacatgtgttcactgtccggaagaaagaagagtataagatggccctctacaatttgtatccaggcgtgtttgagaccgttgaaatgcttccctctaaagctggcatctggagagtagagtgcttgatcggagaacatcttcacgcaggtatgagcaccttgttcctcgtgtacagcaacaaatgtcagaatccacttggcatggccagtggacacattcgcgactttcagatcacagcatctggccagtatggacaatgggccccaaagttggctcgcctccattactccggtagcataaatgcgtggtccactaaagaacctttcagctggattaaggtcgatcttcttgcccccatgatcatccacggcattaagacacagggagcgaggcagaaattctcctccctctacatctcacagttcattattatgtatagtttggacggcaagaagtggcaaacttatagaggtaacagtactggaacagacatggtgttcttcggcaacgttgatagctctggcatcaaacacaacatctttaatcctcccataatagctcggtacatcagattgcatccgacccactacagcattaggagtacactccgaatggagcttatgggttgcgacttgaattcctgttcaatgccactcggaatggagtctaaagccatctctgatgcacagataaccgccagtagctactttacgaacatgtttgctacgtggtcaccctctaaggcaaggcttcatttgcaaggccggtctaatgcctggagacctcaggtgaacaacccgaaagaatggctccaggtggactttcagaagaccatgaaagtaacaggtgtcactactcagggagttaagtccttggatactagcatgtatgtgaaggagttccttatttcctcatcacaagatggccaccagtggaccctcttctttcagaatggtaaggtcaaagtgtttcagggcaatcaagacagcttcacacccgtggtgaacagtcttgatcctccactcttgacacgataccttcgaatccatccacagtcttgggagcaccagattgcattgcgcatggaagtacttggatgcgaggctcaggacctctac

SEQ ID NO: 1500 - protein, 1457 aa, synthetic construct
  REGION 1..1457: note = Variant of human B-domain deleted Factor VIII
MQIELSTCFFLCLLRFCFSATRRYYLGAVELSWDYMQSDLGELPVDARFPPRVPKSFPFNTSQVYKKTLFVEFTDHLFNIAKPRPPWMGLLGPTIQAEVYDTVVITLKNMASHPVSLHAVGVSYWKASEGAEYDDQTSQREKEDDKVFPGGSHTYVWQVLKENGPMASDPPCLTYSYLSHVDLVKDLNSGLIGALLVCREGSLAKEKTQTQHKFILLFAVFDEGKSWHSETKNSLMQDRDAASARAWPKMHTVNGYVNRTLPGLIGCHRKSVYWHVIGMGTTPEVHSIFLEGHTFLVRNHRQASLGISPITFLTAQTLLRDLGQFLLFCHIPSHQHDGMEAYVKVDSCPEEPQLRMKNNEEAEDYDDDLTDSEMDVVRFDDDNSPSIIQARSGAKKHPKTWVHYIAAEEEDWDYAPLVLAPDDRSYKSQYLNNGPQRIGRKYKKVRFMAYTDETFKTREAIQHESGILGPLLYGEVGDTLLIIFKNQASRPYNIYPHGITDVRPLYSRRLPKGVKHLKDFPILPGEIFKYKWTVTVEDGPTKSDPRCLTRYYSSFVNWERDLASGLIGPLLICYKESVDQRGNQIMSDKRNVILFSVFDENRSWYLTENIQRFLPNPAEVQLEDPEFQASNIMHSINGYVFDSLQLSVCLHEVAYWYILSIGAQTDFLSVFFSGYTFKHKGVYEDTLTLFPFSGETVFMSMENPGLWILGCHNSDFRNRGMTALLKVSSCDKNTGDYYEDSYEDISAYFDSKNNAIEPRSFSQNPPVLKRHQREGTRTTLQSDQEEIDYDDTISVEWKKEDFDIYDEDENQSPRSFQKKTRHYFIAAVERLWDYGMSSKPHVLRNRAQSGSVPQFKKVVFQEFTDGSFTQPLYRGELNEHLGLLGPYIRAEVEDNIMVTFRNQASRPYSFYSSLISYEEDQRQGAEPRKNFVKPNETKTYFWKVQHHMAPTKDEFDCKAWAYFSDVDLEKDVHSGLIGPLLVCHTNTLNPAHGRQVTVQEFALFFTIFDETKSWYFTENMERNCRAPCNIQMEDPTFKENYRFHAINGYIMDTLPGLVMAQDQRIRWYLLSMGSNENIHSIHFSGHVFTVRKKEEYKMALYNLYPGVFETVEMLPSKAGIWRVECLIGEHLHAGMSTLFLVYSNKCQNPLGMASGHIRDFQITASGQYGQWAPKLARLHYSGSINAWSTKEPFSWIKVDLLAPMIIHGIKTQGARQKFSSLYISQFIIMYSLDGKKWQTYRGNSTGTDMVFFGNVDSSGIKHNIFNPPIIARYIRLHPTHYSIRSTLRMELMGCDLNSCSMPLGMESKAISDAQITASSYFTNMFATWSPSKARLHLQGRSNAWRPQVNNPKEWLQVDFQKTMKVTGVTTQGVKSLDTSMYVKEFLISSSQDGHQWTLFFQNGKVKVFQGNQDSFTPVVNSLDPPLLTRYLRIHPQSWEHQIALRMEVLGCEAQDLY

SEQ ID NO: 1501 - DNA, 4371 bp, synthetic construct
  misc_feature 1..4371: note = Variant of human B-domain deleted Factor VIII
  source 1..4371: mol_type = other DNA
atgcagattgaactgtctacctgcttcttcctctgtttgctgaggttctgctttagcgccactagacggtactaccttggcgctgtggagctgtcctgggactatatgcagagtgatttgggagagcttcccgtcgacgcacgatttcctcctcgcgttccaaagtcatttccctttaacacaagccaggtgtacaagaagacgctcttcgtcgaattcaccgatcacctgttcaatatcgccaaacccagaccaccatggatgggtcttttggggcctaccatacaagcggaggtgtatgacacagttgttatcactctcaagaacatggcttctcatccggtaagtcttcacgcagtgggcgtgtcctactggaaagcttcagaaggagccgagtatgatgatcagacatcccagagggagaaagaagacgacaaggtatttccaggtgggtctcatacctatgtgtggcaagtgctcaaagagaatggccctatggcaagcgatccgccgtgtttgacttacagctacctttcacacgttgacctcgtcaaggacctcaactccgggttgattggagccttgttggtatgcagggaaggatctcttgccaaagagaagacacagaccctccacaagtttatccttctctttgctgtgttcgatgagggcaaaagttggcatagcgaaacgaagaattccctcatgcaggatcgcgacgcagccagcgccagagcttggcccaagatgcacactgtgaacggatatgtcaataggacgcttcctggcttgattgggtgtcatcggaaaagtgtctactggcacgtgatcggaatggggacaacaccagaggtccactccatatttctcgaaggccataccttccttgttcgaaaccacagacaggcatccttggggatctctcccattacctttctcactgcccaaacgctccttcaagacttgggtcagttccttctcttttgccatatcccgtcacaccagcatgatggtatggaagcttatgtgaaagtcgacagttgtcctgaggagccacagttgcgcatgaagaataatgaagaagccgaggattacgacgacgatctcaccgattctgagatggacgtggtgaggtttgatgacgacaactctccctccatcattcaagctcggagcggggcgaagaaacaccccaagacttgggtccactatatagcggcggaagaggaggattgggattacgctcctcttgtattggcaccagatgaccgctcatacaaaagccagtacctcaacaacggaccgcagagaattggccggaagtataagaaagtgcgatttatggcctatacagacgaaacctttaagacaagggaggccatccagcatgagagtgggattttgggacctcttctttacggcgaagttggtgataccctcctcatcatcttcaagaatcaagcttctcgcccctataacatttacccacacgggatcactgacgttaggcctttgtatagcagaagacttcccaaaggcgtgaagcatctcaaagacttccccattttgccaggcgagatctttaagtacaaatggaccgtcacagtggaagatggaccgactaaatcagaccctcgatgccttacgcggtactattcctccttcgtgaattgggagagagatttggcaagcggactcataggaccactcctcatctgttacaaggaatctgtagaccagaggggtaaccagattatgagtgataaacgcaatgtgatcctttttagcgtcttcgacgagaaccggtcctggtacttgaccgagaatatacagaggttccttcccaaccccgcaggcgttcagttggaagaccctgagtttcaggccagcaatattatgcactcaatcaacggctatgtgtttgatagtctccagctttctgtttgcctccatgaagtagcctattggtacatcttgtcaattggtgctcaaacagacttcctctccgtcttcttctccggctacacctttaagcacaagatggtgtatgaggacactctcacactctttccattttctggagaaaccgtgttcatgagcatggagaatccaggcctttggatcttgggttgccacaacagtgattttcgcaatcggggaatgactgctctcctcaaagtcagcagctgtgataaaaacacaggcgactattacgaagattcttacgaggacataagtgcctactttgactccaagaataacgccattgagcccagatcattctcccagaatcctcccgtgcttaaaaggcatcagcgcgaaggtaccagaactactcttcagtctgatcaagaggagattgactatgacgacaccattagcgtggaatggaagaaggaggatttcgatatctatgacgaagatgagaaccagtctccgcggagctttcagaagaagacgcgacactacttcattgcagcagtcgaaaggctttgggactacggtatgtcatcatcgcctcatgtgttgcgcaatagagctcagagtggaagtgttccacagttcaagaaagtcgtctttcaagagtttacagatggcagcttcacacagcctctctatcggggcgagcttaacgaacatttgggactccttggtccctatatccgagccgaagtggaggacaacattatggttacctttaggaatcaagcctctcgcccctacagcttctactcctccctcatcagttatgaggaggatcagagacaaggcgctgaaccacggaagaactttgtgaaaccgaatgagacgaagacctacttctggaaagtacagcaccacatggcccccacaaaagacgaattcgattgcaaagcatgggcgtatttttcagacgttgacttggagaaagatgtacattcaggacttattggtcctttgttggtgtgtcacactaacactctcaatccagcccatggcaggcaggtgacagtccaggaattcgctcttttctttaccatctttgatgagaccaagtcctggtacttcacggaaaacatggagcgcaattgcagagccccctgtaacatacagatggaggaccctacctttaaggaaaattatcggttccacgcaatcaacggatacattatggatacactccctggccttgtgatggctcaggaccaacgaatcaggtggtacctcctcagcatgggttctaatgagaacatacactccattcacttttcaggacatgtgttcactgtccggaagaaagaagagtataagatggccctctacaatttgtatccaggcgtgtttgagaccgttgaaatgcttccctctaaagctggcatctggagagtagagtgcttgatcggagaacatcttcacgcaggtatgagcaccttgttcctcgtgtacagcaacaaatgtcagaatccacttggcatggccagtggacacattcgcgactttcagatcacagcatctggccagtatggacaatgggccccaaagttggctcgcctccattactccggtagcataaatgcgtggtccactaaagaacctttcagctggattaaggtcgatcttcttgcccccatgatcatccacggcattaagacacagggagcgaggcagaaattctcctccctctacatctcacagttcattattatgtatagtttggacggcaagaagtggcaaacttatagaggtaacagtactggaacagacatggtgttcttcggcaacgttgatagctctggcatcaaacacaacatctttaatcctcccataatagctcggtacatcagattgcatccgacccactacagcattaggagtacactccgaatggagcttatgggttgcgacttgaattcctgttcaatgccactcggaatggagtctaaagccatctctgatgcacagataaccgccagtagctactttacgaacatgtttgctacgtggtcaccctctaaggcaaggcttcatttgcaaggccggtctaatgcctggagacctcaggtgaacaacccgaaagaatggctccaggtggactttcagaagaccatgaaagtaacaggtgtcactactcagggagttaagtccttggatactagcatgtatgtgaaggagttccttatttcctcatcacaagatggccaccagtggaccctcttctttcagaatggtaaggtcaaagtgtttcagggcaatcaagacagcttcacacccgtggtgaacagtcttgatcctccactcttgacacgataccttcgaatccatccacagtcttgggagcaccagattgcattgcgcatggaagtacttggatgcgaggctcaggacctctac

SEQ ID NO: 1502 - protein, 1457 aa, synthetic construct
  REGION 1..1457: note = Variant of human B-domain deleted Factor VIII
MQIELSTCFFLCLLRFCFSATRRYYLGAVELSWDYMQSDLGELPVDARFPPRVPKSFPFNTSQVYKKTLFVEFTDHLFNIAKPRPPWMGLLGPTIQAEVYDTVVITLKNMASHPVSLHAVGVSYWKASEGAEYDDQTSQREKEDDKVFPGGSHTYVWQVLKENGPMASDPPCLTYSYLSHVDLVKDLNSGLIGALLVCREGSLAKEKTQTLHKFILLFAVFDEGKSWHSETKNSLMQDRDAASARAWPKMHTVNGYVNRTLPGLIGCHRKSVYWHVIGMGTTPEVHSIFLEGHTFLVRNHRQASLGISPITFLTAQTLLQDLGQFLLFCHIPSHQHDGMEAYVKVDSCPEEPQLRMKNNEEAEDYDDDLTDSEMDVVRFDDDNSPSIIQARSGAKKHPKTWVHYIAAEEEDWDYAPLVLAPDDRSYKSQYLNNGPQRIGRKYKKVRFMAYTDETFKTREAIQHESGILGPLLYGEVGDTLLIIFKNQASRPYNIYPHGITDVRPLYSRRLPKGVKHLKDFPILPGEIFKYKWTVTVEDGPTKSDPRCLTRYYSSFVNWERDLASGLIGPLLICYKESVDQRGNQIMSDKRNVILFSVFDENRSWYLTENIQRFLPNPAGVQLEDPEFQASNIMHSINGYVFDSLQLSVCLHEVAYWYILSIGAQTDFLSVFFSGYTFKHKMVYEDTLTLFPFSGETVFMSMENPGLWILGCHNSDFRNRGMTALLKVSSCDKNTGDYYEDSYEDISAYFDSKNNAIEPRSFSQNPPVLKRHQREGTRTTLQSDQEEIDYDDTISVEWKKEDFDIYDEDENQSPRSFQKKTRHYFIAAVERLWDYGMSSSPHVLRNRAQSGSVPQFKKVVFQEFTDGSFTQPLYRGELNEHLGLLGPYIRAEVEDNIMVTFRNQASRPYSFYSSLISYEEDQRQGAEPRKNFVKPNETKTYFWKVQHHMAPTKDEFDCKAWAYFSDVDLEKDVHSGLIGPLLVCHTNTLNPAHGRQVTVQEFALFFTIFDETKSWYFTENMERNCRAPCNIQMEDPTFKENYRFHAINGYIMDTLPGLVMAQDQRIRWYLLSMGSNENIHSIHFSGHVFTVRKKEEYKMALYNLYPGVFETVEMLPSKAGIWRVECLIGEHLHAGMSTLFLVYSNKCQNPLGMASGHIRDFQITASGQYGQWAPKLARLHYSGSINAWSTKEPFSWIKVDLLAPMIIHGIKTQGARQKFSSLYISQFIIMYSLDGKKWQTYRGNSTGTDMVFFGNVDSSGIKHNIFNPPIIARYIRLHPTHYSIRSTLRMELMGCDLNSCSMPLGMESKAISDAQITASSYFTNMFATWSPSKARLHLQGRSNAWRPQVNNPKEWLQVDFQKTMKVTGVTTQGVKSLDTSMYVKEFLISSSQDGHQWTLFFQNGKVKVFQGNQDSFTPVVNSLDPPLLTRYLRIHPQSWEHQIALRMEVLGCEAQDLY

SEQ ID NO: 1503 - DNA, 4371 bp, synthetic construct
  misc_feature 1..4371: note = Variant of human B-domain deleted Factor VIII
  source 1..4371: mol_type = other DNA
atgcagattgaactgtctacctgcttcttcctctgtttgctgaggttctgctttagcgccactagacggtactaccttggcgctgtggagctgtcctgggactatatgcagagtgatttgggagagcttcccgtcgacgcacgatttcctcctcgcgttccaaagtcatttccctttaacacaagccaggtgtacaagaagacgctcttcgtcgaattcaccgatcacctgttcaatatcgccaaacccagaccaccatggatgggtcttttggggcctaccatacaagcggaggtgtatgacacagttgttatcactctcaagaacatggcttctcatccggtaagtcttcacgcagtgggcgtgtcctactggaaagcttcagaaggagccgagtatgatgatcagacatcccagagggagaaagaagacgacaaggtatttccaggtgggtctcatacctatgtgtggcaagtgctcaaagagaatggccctatggcaagcgatccgccgtgtttgacttacagctacctttcacacgttgacctcgtcaaggacctcaactccgggttgattggagccttgttggtatgcagggaaggatctcttgccaaagagaagacacagaccctgcacaagtttatccttctctttgctgtgttcgatgagggcaaaagttggcatagcgaaacgaagaattccctcatgcaggatcgcgacgcagccagcgccagagcttggcccaagatgcacactgtgaacggatatgtcaataggacgcttcctggcttgattgggtgtcatcggaaaagtgtctactggcacgtgatcggaatggggacaacaccagaggtccactccatatttctcgaaggccataccttccttgttcgaaaccacagacaggcatccttggggatctctcccattaccttcctcactgcccaaacgctccttatggacttgggtcagttccttctcttttgccatatcccgtcacaccagcatgatggtatggaagcttatgtgaaagtcgacagttgtcctgaggagccacagttgcgcatgaagaataatgaagaagccgaggattacgacgacgatctcaccgattctgagatggacgtggtgaggtttgatgacgacaactctccctccatcattcaagctcggagcggggcgaagaaacaccccaagacttgggtccactatatagcggcggaagaggaggattgggattacgctcctcttgtattggcaccagatgaccgctcatacaaaagccagtacctcaacaacggaccgcagagaattggccggaagtataagaaagtgcgatttatggcctatacagacgaaacctttaagacaagggaggccatccagcatgagagtgggattttgggacctcttctttacggcgaagttggtgataccctcctcatcatcttcaagaatcaagcttctcgcccctataacatttacccacacgggatcactgacgttaggcctttgtatagcagaagacttcccaaaggcgtgaagcatctcaaagacttccccattttgccaggcgagatctttaagtacaaatggcgcgttacagtggaagatggaccgactaaatcagaccctcgatgccttacgcggtactattcctccttcgtgaattgggagagagatttggcaagcggactcataggaccactcctcatctgttacaaggaatctgtagaccagaggggtaaccagattatgagtgataaacgcaatgtgatcctttttagcgtcttcgacgagaaccggtcctggtacttgaccgagaatatagagaggttccttcccaaccccgcagaggttcagttggaagaccctgagtttcaggccagcaatattatgcactcaatcaacggctatgtgtttgatagtctccagctttctgtttgcctccatgaagtagcctattggtacatcttgtcaattggtgctcaaacagacttcctctccgtcttcttctccggctacacctttaagcacaagatggtgtatgaggacactctcacactctttccattttctggagaaaccgtgttcatgagcatggagaatccaggcctttggatcttgggttgccacaacagtgatcttcgcaatcggggaatgactgctctcctcaaagtcagcagctgtgataaaaacacaggcgactattacgaagattcttacgaggacataagtgcctactttgactccaagaataacgccattgagcccagatcattctcccagaatcctcccgtgcttaaaaggcatcagcgcgaaggtaccagaactactcttcagtctgatcaagaggagattgactatgacgacaccattagcgtggaaatgaagaaggaggatttcgatatctatgacgaagatgagaaccagtctccgcggagctttcagaagaagacgcgacactacttcattgcagcagtcgaaaggctttgggactacggtatgtcatcaaaacctcatgtgttgcgcaatagagctcagagtggaagtgttccacagttcaagaaagtcgtctttcaagagtttacagatggcagcttcacacagcctctctatcggggcgagcttaacgaacatttgggactccttggtccctatatccgagccgaagtggaggacaacattatggttacctttaggaatcaagcctctcgcccctacagcttctactcctccctcatcagttatgaggaggatcagagacaaggcgctgaaccacggaagaactttgtgaaaccgaatgagacgaagacctacttctggaaagtacagcaccacatggcccccacaaaagacgaattcgattgcaaagcatgggcgtatttttcagacgttgacttggagaaagatgtacattcaggacttattggtcctttgttggtgtgtcacactaacactctcaatccagcccatggcaggcaggtgacagtccaggaattcgctcttttctttaccatctttgatgagaccaagtcctggtacttcacggaaaacatggagcgcaattgcagagccccctgtaacatacagatggaggaccctacctttaaggaaaattatcggttccacgcaatcaacggatacattatggatacactccctggccttgtgatggctcaggaccaacgaatcaggtggtacctcctcagcatgggttctaatgagaacatacactccattcacttttcaggacatgtgttcactgtccggaagaaagaagagtataagatggccctctacaatttgtatccaggcgtgtttgagaccgttgaaatgcttccctctaaagctggcatctggagagtagagtgcttgatcggagaacatcttcacgcaggtatgagcaccttgttcctcgtgtacagcaacaaatgtcagaatccacttggcatggccagtggacacattcgcgactttcagatcacagcatctggccagtatggacaatgggccccaaagttggctcgcctccattactccggtagcataaatgcgtggtccactaaagaacctttcagctggattaaggtcgatcttcttgcccccatgatcatccacggcattaagacacagggagcgaggcagaaattctcctccctctacatctcacagttcattattatgtatagtttggacggcaagaagtggcaaacttatagaggtaacagtactggaacagacatggtgttcttcggcaacgttgatagctctggcatcaaacacaacatctttaatcctcccataatagctcggtacatcagattgcatccgacccactacagcattaggagtacactccgaatggagcttatgggttgcgacttgaattcctgttcaatgccactcggaatggagtctaaagccatctctgatgcacagataaccgccagtagctactttacgaacatgtttgctacgtggtcaccctctaaggcaaggcttcatttgcaaggccggtctaatgcctggagacctcaggtgaacaacccgaaagaatggctccaggtggactttcagaagaccatgaaagtaacaggtgtcactactcagggagttaagtccttggatactagcatgtatgtgaaggagttccttatttcctcatcacaagatggccaccagtggaccctcttctttcagaatggtaaggtcaaagtgtttcagggcaatcaagacagcttcacacccgtggtgaacagtcttgatcctccactcttgacacgataccttcgaatccatccacagtcttgggagcaccagattgcattgcgcatggaagtacttggatgcgaggctcaggacctctac

SEQ ID NO: 1504 - protein, 1457 aa, synthetic construct
  REGION 1..1457: note = Variant of human B-domain deleted Factor VIII
MQIELSTCFFLCLLRFCFSATRRYYLGAVELSWDYMQSDLGELPVDARFPPRVPKSFPFNTSQVYKKTLFVEFTDHLFNIAKPRPPWMGLLGPTIQAEVYDTVVITLKNMASHPVSLHAVGVSYWKASEGAEYDDQTSQREKEDDKVFPGGSHTYVWQVLKENGPMASDPPCLTYSYLSHVDLVKDLNSGLIGALLVCREGSLAKEKTQTLHKFILLFAVFDEGKSWHSETKNSLMQDRDAASARAWPKMHTVNGYVNRTLPGLIGCHRKSVYWHVIGMGTTPEVHSIFLEGHTFLVRNHRQASLGISPITFLTAQTLLMDLGQFLLFCHIPSHQHDGMEAYVKVDSCPEEPQLRMKNNEEAEDYDDDLTDSEMDVVRFDDDNSPSIIQARSGAKKHPKTWVHYIAAEEEDWDYAPLVLAPDDRSYKSQYLNNGPQRIGRKYKKVRFMAYTDETFKTREAIQHESGILGPLLYGEVGDTLLIIFKNQASRPYNIYPHGITDVRPLYSRRLPKGVKHLKDFPILPGEIFKYKWRVTVEDGPTKSDPRCLTRYYSSFVNWERDLASGLIGPLLICYKESVDQRGNQIMSDKRNVILFSVFDENRSWYLTENIERFLPNPAEVQLEDPEFQASNIMHSINGYVFDSLQLSVCLHEVAYWYILSIGAQTDFLSVFFSGYTFKHKMVYEDTLTLFPFSGETVFMSMENPGLWILGCHNSDLRNRGMTALLKVSSCDKNTGDYYEDSYEDISAYFDSKNNAIEPRSFSQNPPVLKRHQREGTRTTLQSDQEEIDYDDTISVEMKKEDFDIYDEDENQSPRSFQKKTRHYFIAAVERLWDYGMSSKPHVLRNRAQSGSVPQFKKVVFQEFTDGSFTQPLYRGELNEHLGLLGPYIRAEVEDNIMVTFRNQASRPYSFYSSLISYEEDQRQGAEPRKNFVKPNETKTYFWKVQHHMAPTKDEFDCKAWAYFSDVDLEKDVHSGLIGPLLVCHTNTLNPAHGRQVTVQEFALFFTIFDETKSWYFTENMERNCRAPCNIQMEDPTFKENYRFHAINGYIMDTLPGLVMAQDQRIRWYLLSMGSNENIHSIHFSGHVFTVRKKEEYKMALYNLYPGVFETVEMLPSKAGIWRVECLIGEHLHAGMSTLFLVYSNKCQNPLGMASGHIRDFQITASGQYGQWAPKLARLHYSGSINAWSTKEPFSWIKVDLLAPMIIHGIKTQGARQKFSSLYISQFIIMYSLDGKKWQTYRGNSTGTDMVFFGNVDSSGIKHNIFNPPIIARYIRLHPTHYSIRSTLRMELMGCDLNSCSMPLGMESKAISDAQITASSYFTNMFATWSPSKARLHLQGRSNAWRPQVNNPKEWLQVDFQKTMKVTGVTTQGVKSLDTSMYVKEFLISSSQDGHQWTLFFQNGKVKVFQGNQDSFTPVVNSLDPPLLTRYLRIHPQSWEHQIALRMEVLGCEAQDLY

SEQ ID NO: 1505 - DNA, 4371 bp, synthetic construct
  misc_feature 1..4371: note = Variant of human B-domain deleted Factor VIII
  source 1..4371: mol_type = other DNA
atgcagattgaactgtctacctgcttcttcctctgtttgctgaggttctgctttagcgccactagacggtactaccttggcgctgtggagctgtcctgggactatatgcagagtgatttgggagagcttcccgtcgacgcacgatttcctcctcgcgttccaaagtcatttccctttaacacaagccaggtgtacaagaagacgctcttcgtcgaattcaccgatcacctgttcaatatcgccaaacccagaccaccatggatgggtcttttggggcctaccatacaagcggaggtgtatgacacagttgttatcactctcaagaacatggcttctcatccggtaagtcttcacgcagtgggcgtgtcctactggaaagcttcagaaggagccgagtatgatgatcagacatcccagagggagaaagaagacgacaaggtatttccaggtgggtctcatacctatgtgtggcaagtgctcaaagagaatggccctatggcaagcgatccgccgtgtttgacttacagctacctttcacacgttgacctcgtcaaggacctcaactccgggttgattggagccttgttggtatgcagggaaggatctcttgccaaagagaagacacagaccctccacaagtttatccttctctttgctgtgttcgatgagggcaaaagttggcatagcgaaacgaagaattccctcatgcaggatcgcgacgcagccagcgccagagcttggcccaagatgcacactgtgaacggatatgtcaataggacgcttcctggcttgattgggtgtcatcggaaaagtgtctactggcacgtgatcggaatggggacaacaccagaggtccactccatatttctcgaaggccataccttccttgttcgaaaccacagacaggcatccttggggatctctcccattaccctgctcactgcccaaacgctccttatggacttgggtcagttccttctcttttgccatatcccgtcacaccagcatgatggtatggaagcttatgtgaaagtcgacagttgtcctgaggagccacagttgcgcatgaagaataatgaagaagccgaggattacgacgacgatctcaccgattctgagatggacgtggtgaggtttgatgacgacaactctccctccatcattcaagctcggagcggggcgaagaaacaccccaagacttgggtccactatatagcggcggaagaggaggattgggattacgctcctcttgtattggcaccagatgaccgctcatacaaaagccagtacctcaacaacggaccgcagagaattggccggaagtataagaaagtgcgatttatggcctatacagacgaaacctttaagacaagggaggccatccagcatgagagtgggattttgggacctcttctttacggcgaagttggtgataccctcctcatcatcttcaagaatcaagcttctcgcccctataacatttacccacacgggatcactgacgttaggcctttgtatagcagaagacttcccaaaggcgtgaagcatctcaaagacttccccattttgccaggcgagatctttaagtacaaatggaccgttacagtggaagatggaccgactaaatcagaccctcgatgccttacgcggtactattcctccttcgtgaatatggagagagatttggcaagcggactcataggaccactcctcatctgttacaaggaatctgtagaccagaggggtaaccagattatgagtgataaacgcaatgtgatcctttttagcgtcttcgacgagaaccggtcctggtacttgaccgagaatatacaaaggttccttcccaaccctgcaggggttcagttggaagaccctgagtttcaggccagcaatattatgcactcaatcaacggctatgtgtttgatagtctccagctttctgtttgcctccatgaagtagcctattggtacatcttgtcaattggtgctcaaacagacttcctctccgtcttcttctccggctacacctttaagcacaagggcgtgtatgaggacactctcacactctttccattttctggagaaaccgtgttcatgagcatggagaatccaggcctttggatcttgggttgccacaacagtgattttcgcaatcggggaatgactgctctcctcaaagtcagcagctgtgattggaacacaggcgactattacgaagattcttacgaggacataagtgcctactttgactccaagaataacgccattgagcccagatcattctcccagaatcctcccgtgcttaaaaggcatcagcgcgaaggtaccagaactactcttcagtctgatcaagaggagattgactatgacgacaccattagcgtggaaatgaagaaggaggatttcgatatctatgacgaagatgagaaccagtctccgcggagctttcagaagaagacgcgacactacttcattgcagcagtcgaaaggctttgggactacggtatgtcatcatcccctcatgtgttgcgcaatagagctcagagtggaagtgttccacagttcaagaaagtcgtctttcaagagtttacagatggcagcttcacacagcctctctatcggggcgagcttaacgaacatttgggactccttggtccctatatccgagccgaagtggaggacaacattatggttacctttaggaatcaagcctctcgcccctacagcttctactcctccctcatcagttatgaggaggatcagagacaaggcgctgaaccacggaagaactttgtgaaaccgaatgagacgaagacctacttctggaaagtacagcaccacatggcccccacaaaagacgaattcgattgcaaagcatgggcgtatttttcagacgttgacttggagaaagatgtacattcaggacttattggtcctttgttggtgtgtcacactaacactctcaatccagcccatggcaggcaggtgacagtccaggaattcgctcttttctttaccatctttgatgagaccaagtcctggtacttcacggaaaacatggagcgcaattgcagagccccctgtaacatacagatggaggaccctacctttaaggaaaattatcggttccacgcaatcaacggatacattatggatacactccctggccttgtgatggctcaggaccaacgaatcaggtggtacctcctcagcatgggttctaatgagaacatacactccattcacttttcaggacatgtgttcactgtccggaagaaagaagagtataagatggccctctacaatttgtatccaggcgtgtttgagaccgttgaaatgcttccctctaaagctggcatctggagagtagagtgcttgatcggagaacatcttcacgcaggtatgagcaccttgttcctcgtgtacagcaacaaatgtcagaatccacttggcatggccagtggacacattcgcgactttcagatcacagcatctggccagtatggacaatgggccccaaagttggctcgcctccattactccggtagcataaatgcgtggtccactaaagaacctttcagctggattaaggtcgatcttcttgcccccatgatcatccacggcattaagacacagggagcgaggcagaaattctcctccctctacatctcacagttcattattatgtatagtttggacggcaagaagtggcaaacttatagaggtaacagtactggaacagacatggtgttcttcggcaacgttgatagctctggcatcaaacacaacatctttaatcctcccataatagctcggtacatcagattgcatccgacccactacagcattaggagtacactccgaatggagcttatgggttgcgacttgaattcctgttcaatgccactcggaatggagtctaaagccatctctgatgcacagataaccgccagtagctactttacgaacatgtttgctacgtggtcaccctctaaggcaaggcttcatttgcaaggccggtctaatgcctggagacctcaggtgaacaacccgaaagaatggctccaggtggactttcagaagaccatgaaagtaacaggtgtcactactcagggagttaagtccttggatactagcatgtatgtgaaggagttccttatttcctcatcacaagatggccaccagtggaccctcttctttcagaatggtaaggtcaaagtgtttcagggcaatcaagacagcttcacacccgtggtgaacagtcttgatcctccactcttgacacgataccttcgaatccatccacagtcttgggagcaccagattgcattgcgcatggaagtacttggatgcgaggctcaggacctctac

SEQ ID NO: 1506 - protein, 1457 aa, synthetic construct
  REGION 1..1457: note = Variant of human B-domain deleted Factor VIII
MQIELSTCFFLCLLRFCFSATRRYYLGAVELSWDYMQSDLGELPVDARFPPRVPKSFPFNTSQVYKKTLFVEFTDHLFNIAKPRPPWMGLLGPTIQAEVYDTVVITLKNMASHPVSLHAVGVSYWKASEGAEYDDQTSQREKEDDKVFPGGSHTYVWQVLKENGPMASDPPCLTYSYLSHVDLVKDLNSGLIGALLVCREGSLAKEKTQTLHKFILLFAVFDEGKSWHSETKNSLMQDRDAASARAWPKMHTVNGYVNRTLPGLIGCHRKSVYWHVIGMGTTPEVHSIFLEGHTFLVRNHRQASLGISPITLLTAQTLLMDLGQFLLFCHIPSHQHDGMEAYVKVDSCPEEPQLRMKNNEEAEDYDDDLTDSEMDVVRFDDDNSPSIIQARSGAKKHPKTWVHYIAAEEEDWDYAPLVLAPDDRSYKSQYLNNGPQRIGRKYKKVRFMAYTDETFKTREAIQHESGILGPLLYGEVGDTLLIIFKNQASRPYNIYPHGITDVRPLYSRRLPKGVKHLKDFPILPGEIFKYKWTVTVEDGPTKSDPRCLTRYYSSFVNMERDLASGLIGPLLICYKESVDQRGNQIMSDKRNVILFSVFDENRSWYLTENIQRFLPNPAGVQLEDPEFQASNIMHSINGYVFDSLQLSVCLHEVAYWYILSIGAQTDFLSVFFSGYTFKHKGVYEDTLTLFPFSGETVFMSMENPGLWILGCHNSDFRNRGMTALLKVSSCDWNTGDYYEDSYEDISAYFDSKNNAIEPRSFSQNPPVLKRHQREGTRTTLQSDQEEIDYDDTISVEMKKEDFDIYDEDENQSPRSFQKKTRHYFIAAVERLWDYGMSSSPHVLRNRAQSGSVPQFKKVVFQEFTDGSFTQPLYRGELNEHLGLLGPYIRAEVEDNIMVTFRNQASRPYSFYSSLISYEEDQRQGAEPRKNFVKPNETKTYFWKVQHHMAPTKDEFDCKAWAYFSDVDLEKDVHSGLIGPLLVCHTNTLNPAHGRQVTVQEFALFFTIFDETKSWYFTENMERNCRAPCNIQMEDPTFKENYRFHAINGYIMDTLPGLVMAQDQRIRWYLLSMGSNENIHSIHFSGHVFTVRKKEEYKMALYNLYPGVFETVEMLPSKAGIWRVECLIGEHLHAGMSTLFLVYSNKCQNPLGMASGHIRDFQITASGQYGQWAPKLARLHYSGSINAWSTKEPFSWIKVDLLAPMIIHGIKTQGARQKFSSLYISQFIIMYSLDGKKWQTYRGNSTGTDMVFFGNVDSSGIKHNIFNPPIIARYIRLHPTHYSIRSTLRMELMGCDLNSCSMPLGMESKAISDAQITASSYFTNMFATWSPSKARLHLQGRSNAWRPQVNNPKEWLQVDFQKTMKVTGVTTQGVKSLDTSMYVKEFLISSSQDGHQWTLFFQNGKVKVFQGNQDSFTPVVNSLDPPLLTRYLRIHPQSWEHQIALRMEVLGCEAQDLY

SEQ ID NO: 1507 - DNA, 4371 bp, synthetic construct
  misc_feature 1..4371: note = Variant of human B-domain deleted Factor VIII
  source 1..4371: mol_type = other DNA
atgcagattgaactgtctacctgcttcttcctctgtttgctgaggttctgctttagcgccactagacggtactaccttggcgctgtggagctgtcctgggactatatgcagagtgatttgggagagcttcccgtcgacgcacgatttcctcctcgcgttccaaagtcatttccctttaacacaagccaggtgtacaagaagacgctcttcgtcgaattcaccgatcacctgttcaatatcgccaaacccagaccaccatggatgggtcttttggggcctaccatacaagcggaggtgtatgacacagttgttatcactctcaagaacatggcttctcatccggtaagtcttcacgcagtgggcgtgtcctactggaaagcttcagaaggagccgagtatgatgatcagacatcccagagggagaaagaagacgacaaggtatttccaggtgggtctcatacctatgtgtggcaagtgctcaaagagaatggccctatggcaagcgatccgccgtgtttgacttacagctacctttcacacgttgacctcgtcaaggacctcaactccgggttgattggagccttgttggtatgcagggaaggatctcttgccaaagagaagacacagaccctgcacaagtttatccttctctttgctgtgttcgatgagggcaaaagttggcatagcgaaacgaagaattccctcatgcaggatcgcgacgcagccagcgccagagcttggcccaagatgcacactgtgaacggatatgtcaataggacgcttcctggcttgattgggtgtcatcggaaaagtgtctactggcacgtgatcggaatggggacaacaccagaggtccactccatatttctcgaaggccataccttccttgttcgaaaccacagacaggcatccttggggatctctcccattacctttctcactgcccaaacgctccttcaagacttgggtcagttccttctcttttgccatatcccgtcacaccagcatgatggtatggaagcttatgtgaaagtcgacagttgtcctgaggagccacagttgcgcatgaagaataatgaagaagccgaggattacgacgacgatctcaccgattctgagatggacgtggtgaggtttgatgacgacaactctccctccatcattcaagctcggagcggggcgaagaaacaccccaagacttgggtccactatatagcggcggaagaggaggattgggattacgctcctcttgtattggcaccagatgaccgctcatacaaaagccagtacctcaacaacggaccgcagagaattggccggaagtataagaaagtgcgatttatggcctatacagacgaaacctttaagacaagggaggccatccagcatgagagtgggattttgggacctcttctttacggcgaagttggtgataccctcctcatcatcttcaagaatcaagcttctcgcccctataacatttacccacacgggatcactgacgttaggcctttgtatagcagaagacttcccaaaggcgtgaagcatctcaaagacttccccattttgccaggcgagatctttaagtacaaatggaccattacagtggaagatggaccgactaaatcagaccctcgatgccttacgcggtactattcctccttcgtgaatatggagagagatttggcaagcggactcataggaccactcctcatctgttacaaggaatctgtagaccagaggggtaaccagattatgagtgataaacgcaatgtgatcctttttagcgtcttcgacgagaaccggtcctggtacttgaccgagaatatacaaaggttccttcccaaccctgcagaggttcagttggaagaccctgagtttcaggccagcaatattatgcactcaatcaacggctatgtgtttgatagtctccagctttctgtttgcctccatgaagtagcctattggtacatcttgtcaattggtgctcaaacagacttcctctccgtcttcttctccggctacacctttaagcacaagaacgtgtatgaggacactctcacactctttccattttctggagaaaccgtgttcatgagcatggagaatccaggcctttggatcttgggttgccacaacagtgattttcgcaatcggggaatgactgctctcctcaaagtcagcagctgtgattggaacacaggcgactattacgaagattcttacgaggacataagtgcctactttgactccaagaataacgccattgagcccagatcattctcccagaatcctcccgtgcttaaaaggcatcagcgcgaaggtaccagaactactcttcagtctgatcaagaggagattgactatgacgacaccattagcgtggaaatgaagaaggaggatttcgatatctatgacgaagatgagaaccagtctccgcggagctttcagaagaagacgcgacactacttcattgcagcagtcgaaaggctttgggactacggtatgtcatcatcgcctcatgtgttgcgcaatagagctcagagtggaagtgttccacagttcaagaaagtcgtctttcaagagtttacagatggcagcttcacacagcctctctatcggggcgagcttaacgaacatttgggactccttggtccctatatccgagccgaagtggaggacaacattatggttacctttaggaatcaagcctctcgcccctacagcttctactcctccctcatcagttatgaggaggatcagagacaaggcgctgaaccacggaagaactttgtgaaaccgaatgagacgaagacctacttctggaaagtacagcaccacatggcccccacaaaagacgaattcgattgcaaagcatgggcgtatttttcagacgttgacttggagaaagatgtacattcaggacttattggtcctttgttggtgtgtcacactaacactctcaatccagcccatggcaggcaggtgacagtccaggaattcgctcttttctttaccatctttgatgagaccaagtcctggtacttcacggaaaacatggagcgcaattgcagagccccctgtaacatacagatggaggaccctacctttaaggaaaattatcggttccacgcaatcaacggatacattatggatacactccctggccttgtgatggctcaggaccaacgaatcaggtggtacctcctcagcatgggttctaatgagaacatacactccattcacttttcaggacatgtgttcactgtccggaagaaagaagagtataagatggccctctacaatttgtatccaggcgtgtttgagaccgttgaaatgcttccctctaaagctggcatctggagagtagagtgcttgatcggagaacatcttcacgcaggtatgagcaccttgttcctcgtgtacagcaacaaatgtcagaatccacttggcatggccagtggacacattcgcgactttcagatcacagcatctggccagtatggacaatgggccccaaagttggctcgcctccattactccggtagcataaatgcgtggtccactaaagaacctttcagctggattaaggtcgatcttcttgcccccatgatcatccacggcattaagacacagggagcgaggcagaaattctcctccctctacatctcacagttcattattatgtatagtttggacggcaagaagtggcaaacttatagaggtaacagtactggaacagacatggtgttcttcggcaacgttgatagctctggcatcaaacacaacatctttaatcctcccataatagctcggtacatcagattgcatccgacccactacagcattaggagtacactccgaatggagcttatgggttgcgacttgaattcctgttcaatgccactcggaatggagtctaaagccatctctgatgcacagataaccgccagtagctactttacgaacatgtttgctacgtggtcaccctctaaggcaaggcttcatttgcaaggccggtctaatgcctggagacctcaggtgaacaacccgaaagaatggctccaggtggactttcagaagaccatgaaagtaacaggtgtcactactcagggagttaagtccttggatactagcatgtatgtgaaggagttccttatttcctcatcacaagatggccaccagtggaccctcttctttcagaatggtaaggtcaaagtgtttcagggcaatcaagacagcttcacacccgtggtgaacagtcttgatcctccactcttgacacgataccttcgaatccatccacagtcttgggagcaccagattgcattgcgcatggaagtacttggatgcgaggctcaggacctctac

SEQ ID NO: 1508 - protein, 1457 aa, synthetic construct
  REGION 1..1457: note = Variant of human B-domain deleted Factor VIII
MQIELSTCFFLCLLRFCFSATRRYYLGAVELSWDYMQSDLGELPVDARFPPRVPKSFPFNTSQVYKKTLFVEFTDHLFNIAKPRPPWMGLLGPTIQAEVYDTVVITLKNMASHPVSLHAVGVSYWKASEGAEYDDQTSQREKEDDKVFPGGSHTYVWQVLKENGPMASDPPCLTYSYLSHVDLVKDLNSGLIGALLVCREGSLAKEKTQTLHKFILLFAVFDEGKSWHSETKNSLMQDRDAASARAWPKMHTVNGYVNRTLPGLIGCHRKSVYWHVIGMGTTPEVHSIFLEGHTFLVRNHRQASLGISPITFLTAQTLLQDLGQFLLFCHIPSHQHDGMEAYVKVDSCPEEPQLRMKNNEEAEDYDDDLTDSEMDVVRFDDDNSPSIIQARSGAKKHPKTWVHYIAAEEEDWDYAPLVLAPDDRSYKSQYLNNGPQRIGRKYKKVRFMAYTDETFKTREAIQHESGILGPLLYGEVGDTLLIIFKNQASRPYNIYPHGITDVRPLYSRRLPKGVKHLKDFPILPGEIFKYKWTITVEDGPTKSDPRCLTRYYSSFVNMERDLASGLIGPLLICYKESVDQRGNQIMSDKRNVILFSVFDENRSWYLTENIQRFLPNPAEVQLEDPEFQASNIMHSINGYVFDSLQLSVCLHEVAYWYILSIGAQTDFLSVFFSGYTFKHKNVYEDTLTLFPFSGETVFMSMENPGLWILGCHNSDFRNRGMTALLKVSSCDWNTGDYYEDSYEDISAYFDSKNNAIEPRSFSQNPPVLKRHQREGTRTTLQSDQEEIDYDDTISVEMKKEDFDIYDEDENQSPRSFQKKTRHYFIAAVERLWDYGMSSSPHVLRNRAQSGSVPQFKKVVFQEFTDGSFTQPLYRGELNEHLGLLGPYIRAEVEDNIMVTFRNQASRPYSFYSSLISYEEDQRQGAEPRKNFVKPNETKTYFWKVQHHMAPTKDEFDCKAWAYFSDVDLEKDVHSGLIGPLLVCHTNTLNPAHGRQVTVQEFALFFTIFDETKSWYFTENMERNCRAPCNIQMEDPTFKENYRFHAINGYIMDTLPGLVMAQDQRIRWYLLSMGSNENIHSIHFSGHVFTVRKKEEYKMALYNLYPGVFETVEMLPSKAGIWRVECLIGEHLHAGMSTLFLVYSNKCQNPLGMASGHIRDFQITASGQYGQWAPKLARLHYSGSINAWSTKEPFSWIKVDLLAPMIIHGIKTQGARQKFSSLYISQFIIMYSLDGKKWQTYRGNSTGTDMVFFGNVDSSGIKHNIFNPPIIARYIRLHPTHYSIRSTLRMELMGCDLNSCSMPLGMESKAISDAQITASSYFTNMFATWSPSKARLHLQGRSNAWRPQVNNPKEWLQVDFQKTMKVTGVTTQGVKSLDTSMYVKEFLISSSQDGHQWTLFFQNGKVKVFQGNQDSFTPVVNSLDPPLLTRYLRIHPQSWEHQIALRMEVLGCEAQDLY

SEQ ID NO: 1509 - DNA, 4371 bp, synthetic construct
  misc_feature 1..4371: note = Variant of human B-domain deleted Factor VIII
  source 1..4371: mol_type = other DNA
atgcagattgaactgtctacctgcttcttcctctgtttgctgaggttctgctttagcgccactagacggtactaccttggcgctgtggagctgtcctgggactatatgcagagtgatttgggagagcttcccgtcgacgcacgatttcctcctcgcgttccaaagtcatttccctttaacacaagccaggtgtacaagaagacgctcttcgtcgaattcaccgatcacctgttcaatatcgccaaacccagaccaccatggatgggtcttttggggcctaccatacaagcggaggtgtatgacacagttgttatcactctcaagaacatggcttctcatccggtaagtcttcacgcagtgggcgtgtcctactggaaagcttcagaaggagccgagtatgatgatcagacatcccagagggagaaagaagacgacaaggtatttccaggtgggtctcatacctatgtgtggcaagtgctcaaagagaatggccctatggcaagcgatccgccgtgtttgacttacagctacctttcacacgttgacctcgtcaaggacctcaactccgggttgattggagccttgttggtatgcagggaaggatctcttgccaaagagaagacacagaccaaacacaagtttatccttctctttgctgtgttcgatgagggcaaaagttggcatagcgaaacgaagaattccctcatgcaggatcgcgacgcagccagcgccagagcttggcccaagatgcacactgtgaacggatatgtcaataggacgcttcctggcttgattgggtgtcatcggaaaagtgtctactggcacgtgatcggaatggggacaacaccagaggtccactccatatttctcgaaggccataccttccttgttcgaaaccacagacaggcatccttggggatctctcccattacctttctcactgcccaaacgctccttcaagacttgggtcagttccttctcttttgccatatcccgtcacaccagcatgatggtatggaagcttatgtgaaagtcgacagttgtcctgaggagccacagttgcgcatgaagaataatgaagaagccgaggattacgacgacgatctcaccgattctgagatggacgtggtgaggtttgatgacgacaactctccctccatcattcaagctcggagcggggcgaagaaacaccccaagacttgggtccactatatagcggcggaagaggaggattgggattacgctcctcttgtattggcaccagatgaccgctcatacaaaagccagtacctcaacaacggaccgcagagaattggccggaagtataagaaagtgcgatttatggcctatacagacgaaacctttaagacaagggaggccatccagcatgagagtgggattttgggacctcttctttacggcgaagttggtgataccctcctcatcatcttcaagaatcaagcttctcgcccctataacatttacccacacgggatcactgacgttaggcctttgtatagcagaagacttcccaaaggcgtgaagcatctcaaagacttccccattttgccaggcgagatctttaagtacaaatggcgcgttacattggaagatggaccgactaaatcagaccctcgatgccttacgcggtactattcctccttcgtgaatatggagagagatttggcaagcggactcataggaccactcctcatctgttacaaggaatctgtagaccagaggggtaaccagattatgagtgataaacgcaatgtgatcctttttagcgtcttcgacgagaaccggtcctggtacttgaccgagaatatacaaaggttccttcccaaccctgcagaggttcagttggaagaccctgagtttcaggccagcaatattatgcactcaatcaacggctatgtgtttgatagtctccagctttctgtttgcctccatgaagtagcctattggtacatcttgtcaattggtgctcaaacagacttcctctccgtcttcttctccggctacacctttaagcacaagatggtgtatgaggacactctcacactctttccattttctggagaaaccgtgttcatgagcatggagaatccaggcctttggatcttgggttgccacaacagtgattttcgcaatcggggaatgactgctctcctcaaagtcagcagctgtgattggaacacaggcgactattacgaagattcttacgaggacataagtgcctactttgactccaagaataacgccattgagcccagatcattctcccagaatcctcccgtgcttaaaaggcatcagcgcgaaggtaccagaactactcttcagtctgatcaagaggagattgactatgacgacaccattagcgtggaaatgaagaaggaggatttcgatatctatgacgaagatgagaaccagtctccgcggagctttcagaagaagacgcgacactacttcattgcagcagtcgaaaggctttgggactacggtatgtcatcatcgcctcatgtgttgcgcaatagagctcagagtggaagtgttccacagttcaagaaagtcgtctttcaagagtttacagatggcagcttcacacagcctctctatcggggcgagcttaacgaacatttgggactccttggtccctatatccgagccgaagtggaggacaacattatggttacctttaggaatcaagcctctcgcccctacagcttctactcctccctcatcagttatgaggaggatcagagacaaggcgctgaaccacggaagaactttgtgaaaccgaatgagacgaagacctacttctggaaagtacagcaccacatggcccccacaaaagacgaattcgattgcaaagcatgggcgtatttttcagacgttgacttggagaaagatgtacattcaggacttattggtcctttgttggtgtgtcacactaacactctcaatccagcccatggcaggcaggtgacagtccaggaattcgctcttttctttaccatctttgatgagaccaagtcctggtacttcacggaaaacatggagcgcaattgcagagccccctgtaacatacagatggaggaccctacctttaaggaaaattatcggttccacgcaatcaacggatacattatggatacactccctggccttgtgatggctcaggaccaacgaatcaggtggtacctcctcagcatgggttctaatgagaacatacactccattcacttttcaggacatgtgttcactgtccggaagaaagaagagtataagatggccctctacaatttgtatccaggcgtgtttgagaccgttgaaatgcttccctctaaagctggcatctggagagtagagtgcttgatcggagaacatcttcacgcaggtatgagcaccttgttcctcgtgtacagcaacaaatgtcagaatccacttggcatggccagtggacacattcgcgactttcagatcacagcatctggccagtatggacaatgggccccaaagttggctcgcctccattactccggtagcataaatgcgtggtccactaaagaacctttcagctggattaaggtcgatcttcttgcccccatgatcatccacggcattaagacacagggagcgaggcagaaattctcctccctctacatctcacagttcattattatgtatagtttggacggcaagaagtggcaaacttatagaggtaacagtactggaacagacatggtgttcttcggcaacgttgatagctctggcatcaaacacaacatctttaatcctcccataatagctcggtacatcagattgcatccgacccactacagcattaggagtacactccgaatggagcttatgggttgcgacttgaattcctgttcaatgccactcggaatggagtctaaagccatctctgatgcacagataaccgccagtagctactttacgaacatgtttgctacgtggtcaccctctaaggcaaggcttcatttgcaaggccggtctaatgcctggagacctcaggtgaacaacccgaaagaatggctccaggtggactttcagaagaccatgaaagtaacaggtgtcactactcagggagttaagtccttggatactagcatgtatgtgaaggagttccttatttcctcatcacaagatggccaccagtggaccctcttctttcagaatggtaaggtcaaagtgtttcagggcaatcaagacagcttcacacccgtggtgaacagtcttgatcctccactcttgacacgataccttcgaatccatccacagtcttgggagcaccagattgcattgcgcatggaagtacttggatgcgaggctcaggacctctac

SEQ ID NO: 1510 - protein, 1457 aa, synthetic construct
  REGION 1..1457: note = Variant of human B-domain deleted Factor VIII
MQIELSTCFFLCLLRFCFSATRRYYLGAVELSWDYMQSDLGELPVDARFPPRVPKSFPFNTSQVYKKTLFVEFTDHLFNIAKPRPPWMGLLGPTIQAEVYDTVVITLKNMASHPVSLHAVGVSYWKASEGAEYDDQTSQREKEDDKVFPGGSHTYVWQVLKENGPMASDPPCLTYSYLSHVDLVKDLNSGLIGALLVCREGSLAKEKTQTKHKFILLFAVFDEGKSWHSETKNSLMQDRDAASARAWPKMHTVNGYVNRTLPGLIGCHRKSVYWHVIGMGTTPEVHSIFLEGHTFLVRNHRQASLGISPITFLTAQTLLQDLGQFLLFCHIPSHQHDGMEAYVKVDSCPEEPQLRMKNNEEAEDYDDDLTDSEMDVVRFDDDNSPSIIQARSGAKKHPKTWVHYIAAEEEDWDYAPLVLAPDDRSYKSQYLNNGPQRIGRKYKKVRFMAYTDETFKTREAIQHESGILGPLLYGEVGDTLLIIFKNQASRPYNIYPHGITDVRPLYSRRLPKGVKHLKDFPILPGEIFKYKWRVTLEDGPTKSDPRCLTRYYSSFVNMERDLASGLIGPLLICYKESVDQRGNQIMSDKRNVILFSVFDENRSWYLTENIQRFLPNPAEVQLEDPEFQASNIMHSINGYVFDSLQLSVCLHEVAYWYILSIGAQTDFLSVFFSGYTFKHKMVYEDTLTLFPFSGETVFMSMENPGLWILGCHNSDFRNRGMTALLKVSSCDWNTGDYYEDSYEDISAYFDSKNNAIEPRSFSQNPPVLKRHQREGTRTTLQSDQEEIDYDDTISVEMKKEDFDIYDEDENQSPRSFQKKTRHYFIAAVERLWDYGMSSSPHVLRNRAQSGSVPQFKKVVFQEFTDGSFTQPLYRGELNEHLGLLGPYIRAEVEDNIMVTFRNQASRPYSFYSSLISYEEDQRQGAEPRKNFVKPNETKTYFWKVQHHMAPTKDEFDCKAWAYFSDVDLEKDVHSGLIGPLLVCHTNTLNPAHGRQVTVQEFALFFTIFDETKSWYFTENMERNCRAPCNIQMEDPTFKENYRFHAINGYIMDTLPGLVMAQDQRIRWYLLSMGSNENIHSIHFSGHVFTVRKKEEYKMALYNLYPGVFETVEMLPSKAGIWRVECLIGEHLHAGMSTLFLVYSNKCQNPLGMASGHIRDFQITASGQYGQWAPKLARLHYSGSINAWSTKEPFSWIKVDLLAPMIIHGIKTQGARQKFSSLYISQFIIMYSLDGKKWQTYRGNSTGTDMVFFGNVDSSGIKHNIFNPPIIARYIRLHPTHYSIRSTLRMELMGCDLNSCSMPLGMESKAISDAQITASSYFTNMFATWSPSKARLHLQGRSNAWRPQVNNPKEWLQVDFQKTMKVTGVTTQGVKSLDTSMYVKEFLISSSQDGHQWTLFFQNGKVKVFQGNQDSFTPVVNSLDPPLLTRYLRIHPQSWEHQIALRMEVLGCEAQDLY

SEQ ID NO: 1511 - DNA, 4371 bp, synthetic construct
  misc_feature 1..4371: note = Variant of human B-domain deleted Factor VIII
  source 1..4371: mol_type = other DNA
atgcagattgaactgtctacctgcttcttcctctgtttgctgaggttctgctttagcgccactagacggtactaccttggcgctgtggagctgtcctgggactatatgcagagtgatttgggagagcttcccgtcgacgcacgatttcctcctcgcgttccaaagtcatttccctttaacacaagccaggtgtacaagaagacgctcttcgtcgaattcaccgatcacctgttcaatatcgccaaacccagaccaccatggatgggtcttttggggcctaccatacaagcggaggtgtatgacacagttgttatcactctcaagaacatggcttctcatccggtaagtcttcacgcagtgggcgtgtcctactggaaagcttcagaaggagccgagtatgatgatcagacatcccagagggagaaagaagacgacaaggtatttccaggtgggtctcatacctatgtgtggcaagtgctcaaagagaatggccctatggcaagcgatccgccgtgtttgacttacagctacctttcacacgttgacctcgtcaaggacctcaactccgggttgattggagccttgttggtatgcagggaaggatctcttgccaaagagaagacacagaccctgcacaagtttatccttctctttgctgtgttcgatgagggcaaaagttggcatagcgaaacgaagaattccctcatgcaggatcgcgacgcagccagcgccagagcttggcccaagatgcacactgtgaacggatatgtcaataggacgcttcctggcttgattgggtgtcatcggaaaagtgtctactggcacgtgatcggaatggggacaacaccagaggtccactccatatttctcgaaggccataccttccttgttcgaaaccacagacaggcatccttggggatctctcccattacctttctcactgcccaaacgctccttatggacttgggtcagttccttctcttttgccatatcccgtcacaccagcatgatggtatggaagcttatgtgaaagtcgacagttgtcctgaggagccacagttgcgcatgaagaataatgaagaagccgaggattacgacgacgatctcaccgattctgagatggacgtggtgaggtttgatgacgacaactctccctccatcattcaagctcggagcggggcgaagaaacaccccaagacttgggtccactatatagcggcggaagaggaggattgggattacgctcctcttgtattggcaccagatgaccgctcatacaaaagccagtacctcaacaacggaccgcagagaattggccggaagtataagaaagtgcgatttatggcctatacagacgaaacctttaagacaagggaggccatccagcatgagagtgggattttgggacctcttctttacggcgaagttggtgataccctcctcatcatcttcaagaatcaagcttctcgcccctataacatttacccacacgggatcactgacgttaggcctttgtatagcagaagacttcccaaaggcgtgaagcatctcaaagacttccccattttgccaggcgagatctttaagtacaaatggaccgtcacagtggaagatggaccgactaaatcagaccctcgatgccttacgcggtactattcctccttcgtgaattgggagagagatttggcaagcggactcataggaccactcctcatctgttacaaggaatctgtagaccagaggggtaaccagattatgagtgataaacgcaatgtgatcctttttagcgtcttcgacgagaaccggtcctggtacttgaccgagaatatacaaaggttccttcccaacgaagcaggggttcagttggaagaccctgagtttcaggccagcaatattatgcactcaatcaacggctatgtgtttgatagtctccagctttctgtttgcctccatgaagtagcctattggtacatcttgtcaattggtgctcaaacagacttcctctccgtcttcttctccggctacacctttaagcacaagaacgtgtatgaggacactctcacactctttccattttctggagaaaccgtgttcatgagcatggagaatccaggcctttggatcttgggttgccacaacagtgattttcgcaatcggggaatgactgctctcctcaaagtcagcagctgtgattggaacacaggcgactattacgaagattcttacgaggacataagtgcctactttgactccaagaataacgccattgagcccagatcattctcccagaatcctcccgtgcttaaaaggcatcagcgcgaaggtaccagaactactcttcagtctgatcaagaggagattgactatgacgacaccattagcgtggaaatgaagaaggaggatttcgatatctatgacgaagatgagaaccagtctccgcggagctttcagaagaagacgcgacactacttcattgcagcagtcgaaaggctttgggactacggtatgtcatcaaaacctcatgtgttgcgcaatagagctcagagtggaagtgttccacagttcaagaaagtcgtctttcaagagtttacagatggcagcttcacacagcctctctatcggggcgagcttaacgaacatttgggactccttggtccctatatccgagccgaagtggaggacaacattatggttacctttaggaatcaagcctctcgcccctacagcttctactcctccctcatcagttatgaggaggatcagagacaaggcgctgaaccacggaagaactttgtgaaaccgaatgagacgaagacctacttctggaaagtacagcaccacatggcccccacaaaagacgaattcgattgcaaagcatgggcgtatttttcagacgttgacttggagaaagatgtacattcaggacttattggtcctttgttggtgtgtcacactaacactctcaatccagcccatggcaggcaggtgacagtccaggaattcgctcttttctttaccatctttgatgagaccaagtcctggtacttcacggaaaacatggagcgcaattgcagagccccctgtaacatacagatggaggaccctacctttaaggaaaattatcggttccacgcaatcaacggatacattatggatacactccctggccttgtgatggctcaggaccaacgaatcaggtggtacctcctcagcatgggttctaatgagaacatacactccattcacttttcaggacatgtgttcactgtccggaagaaagaagagtataagatggccctctacaatttgtatccaggcgtgtttgagaccgttgaaatgcttccctctaaagctggcatctggagagtagagtgcttgatcggagaacatcttcacgcaggtatgagcaccttgttcctcgtgtacagcaacaaatgtcagaatccacttggcatggccagtggacacattcgcgactttcagatcacagcatctggccagtatggacaatgggccccaaagttggctcgcctccattactccggtagcataaatgcgtggtccactaaagaacctttcagctggattaaggtcgatcttcttgcccccatgatcatccacggcattaagacacagggagcgaggcagaaattctcctccctctacatctcacagttcattattatgtatagtttggacggcaagaagtggcaaacttatagaggtaacagtactggaacagacatggtgttcttcggcaacgttgatagctctggcatcaaacacaacatctttaatcctcccataatagctcggtacatcagattgcatccgacccactacagcattaggagtacactccgaatggagcttatgggttgcgacttgaattcctgttcaatgccactcggaatggagtctaaagccatctctgatgcacagataaccgccagtagctactttacgaacatgtttgctacgtggtcaccctctaaggcaaggcttcatttgcaaggccggtctaatgcctggagacctcaggtgaacaacccgaaagaatggctccaggtggactttcagaagaccatgaaagtaacaggtgtcactactcagggagttaagtccttggatactagcatgtatgtgaaggagttccttatttcctcatcacaagatggccaccagtggaccctcttctttcagaatggtaaggtcaaagtgtttcagggcaatcaagacagcttcacacccgtggtgaacagtcttgatcctccactcttgacacgataccttcgaatccatccacagtcttgggagcaccagattgcattgcgcatggaagtacttggatgcgaggctcaggacctctac

SEQ ID NO: 1512 - protein, 1457 aa, synthetic construct
  REGION 1..1457: note = Variant of human B-domain deleted Factor VIII
MQIELSTCFFLCLLRFCFSATRRYYLGAVELSWDYMQSDLGELPVDARFPPRVPKSFPFNTSQVYKKTLFVEFTDHLFNIAKPRPPWMGLLGPTIQAEVYDTVVITLKNMASHPVSLHAVGVSYWKASEGAEYDDQTSQREKEDDKVFPGGSHTYVWQVLKENGPMASDPPCLTYSYLSHVDLVKDLNSGLIGALLVCREGSLAKEKTQTLHKFILLFAVFDEGKSWHSETKNSLMQDRDAASARAWPKMHTVNGYVNRTLPGLIGCHRKSVYWHVIGMGTTPEVHSIFLEGHTFLVRNHRQASLGISPITFLTAQTLLMDLGQFLLFCHIPSHQHDGMEAYVKVDSCPEEPQLRMKNNEEAEDYDDDLTDSEMDVVRFDDDNSPSIIQARSGAKKHPKTWVHYIAAEEEDWDYAPLVLAPDDRSYKSQYLNNGPQRIGRKYKKVRFMAYTDETFKTREAIQHESGILGPLLYGEVGDTLLIIFKNQASRPYNIYPHGITDVRPLYSRRLPKGVKHLKDFPILPGEIFKYKWTVTVEDGPTKSDPRCLTRYYSSFVNWERDLASGLIGPLLICYKESVDQRGNQIMSDKRNVILFSVFDENRSWYLTENIQRFLPNEAGVQLEDPEFQASNIMHSINGYVFDSLQLSVCLHEVAYWYILSIGAQTDFLSVFFSGYTFKHKNVYEDTLTLFPFSGETVFMSMENPGLWILGCHNSDFRNRGMTALLKVSSCDWNTGDYYEDSYEDISAYFDSKNNAIEPRSFSQNPPVLKRHQREGTRTTLQSDQEEIDYDDTISVEMKKEDFDIYDEDENQSPRSFQKKTRHYFIAAVERLWDYGMSSKPHVLRNRAQSGSVPQFKKVVFQEFTDGSFTQPLYRGELNEHLGLLGPYIRAEVEDNIMVTFRNQASRPYSFYSSLISYEEDQRQGAEPRKNFVKPNETKTYFWKVQHHMAPTKDEFDCKAWAYFSDVDLEKDVHSGLIGPLLVCHTNTLNPAHGRQVTVQEFALFFTIFDETKSWYFTENMERNCRAPCNIQMEDPTFKENYRFHAINGYIMDTLPGLVMAQDQRIRWYLLSMGSNENIHSIHFSGHVFTVRKKEEYKMALYNLYPGVFETVEMLPSKAGIWRVECLIGEHLHAGMSTLFLVYSNKCQNPLGMASGHIRDFQITASGQYGQWAPKLARLHYSGSINAWSTKEPFSWIKVDLLAPMIIHGIKTQGARQKFSSLYISQFIIMYSLDGKKWQTYRGNSTGTDMVFFGNVDSSGIKHNIFNPPIIARYIRLHPTHYSIRSTLRMELMGCDLNSCSMPLGMESKAISDAQITASSYFTNMFATWSPSKARLHLQGRSNAWRPQVNNPKEWLQVDFQKTMKVTGVTTQGVKSLDTSMYVKEFLISSSQDGHQWTLFFQNGKVKVFQGNQDSFTPVVNSLDPPLLTRYLRIHPQSWEHQIALRMEVLGCEAQDLY

SEQ ID NO: 1513 - DNA, 4371 bp, synthetic construct
  misc_feature 1..4371: note = Variant of human B-domain deleted Factor VIII
  source 1..4371: mol_type = other DNA
atgcagattgaactgtctacctgcttcttcctctgtttgctgaggttctgctttagcgccactagacggtactaccttggcgctgtggagctgtcctgggactatatgcagagtgatttgggagagcttcccgtcgacgcacgatttcctcctcgcgttccaaagtcatttccctttaacacaagccaggtgtacaagaagacgctcttcgtcgaattcaccgatcacctgttcaatatcgccaaacccagaccaccatggatgggtcttttggggcctaccatacaagcggaggtgtatgacacagttgttatcactctcaagaacatggcttctcatccggtaagtcttcacgcagtgggcgtgtcctactggaaagcttcagaaggagccgagtatgatgatcagacatcccagagggagaaagaagacgacaaggtatttccaggtgggtctcatacctatgtgtggcaagtgctcaaagagaatggccctatggcaagcgatccgccgtgtttgacttacagctacctttcacacgttgacctcgtcaaggacctcaactccgggttgattggagccttgttggtatgcagggaaggatctcttgccaaagagaagacacagaccctggccaagtttatccttctctttgctgtgttcgatgagggcaaaagttggcatagcgaaacgaagaattccctcatgcaggatcgcgacgcagccagcgccagagcttggcccaagatgcacactgtgaacggatatgtcaataggacgcttcctggcttgattgggtgtcatcggaaaagtgtctactggcacgtgatcggaatggggacaacaccagaggtccactccatatttctcgaaggccataccttccttgttcgaaaccacagacaggcatccttggggatctctcccattacctttctcactgcccaaacgctccttcgtgacttgggtcagttccttctcttttgccatatcccgtcacaccagcatgatggtatggaagcttatgtgaaagtcgacagttgtcctgaggagccacagttgcgcatgaagaataatgaagaagccgaggattacgacgacgatctcaccgattctgagatggacgtggtgaggtttgatgacgacaactctccctccatcattcaagctcggagcggggcgaagaaacaccccaagacttgggtccactatatagcggcggaagaggaggattgggattacgctcctcttgtattggcaccagatgaccgctcatacaaaagccagtacctcaacaacggaccgcagagaattggccggaagtataagaaagtgcgatttatggcctatacagacgaaacctttaagacaagggaggccatccagcatgagagtgggattttgggacctcttctttacggcgaagttggtgataccctcctcatcatcttcaagaatcaagcttctcgcccctataacatttacccacacgggatcactgacgttaggcctttgtatagcagaagacttcccaaaggcgtgaagcatctcaaagacttccccattttgccaggcgagatctttaagtacaaatggaccattacagtggaagatggaccgactaaatcagaccctcgatgccttacgcggtactattcctccttcgtgaattgggagagagatttggcaagcggactcataggaccactcctcatctgttacaaggaatctgtagaccagaggggtaaccagattatgagtgataaacgcaatgtgatcctttttagcgtcttcgacgagaaccggtcctggtacttgaccgagaatatacaaaggttccttcccaaccccgcaggcgttcagttggaagaccctgagtttcaggccagcaatattatgcactcaatcaacggctatgtgtttgatagtctccagctttctgtttgcctccatgaagtagcctattggtacatcttgtcaattggtgctcaaacagacttcctctccgtcttcttctccggctacacctttaagcacaagggcgtgtatgaggacactctcacactctttccattttctggagaaaccgtgttcatgagcatggagaatccaggcctttggatcttgggttgccacaacagtgattttcgcaatcggggaatgactgctctcctcaaagtcagcagctgtgattggaacacaggcgactattacgaagattcttacgaggacataagtgcctactttgactccaagaataacgccattgagcccagatcattctcccagaatcctcccgtgcttaaaaggcatcagcgcgaaggtaccagaactactcttcagtctgatcaagaggagattgactatgacgacaccattagcgtggaaatgaagaaggaggatttcgatatctatgacgaagatgagaaccagtctccgcggagctttcagaagaagacgcgacactacttcattgcagcagtcgaaaggctttgggactacggtatgtcatcatcccctcatgtgttgcgcaatagagctcagagtggaagtgttccacagttcaagaaagtcgtctttcaagagtttacagatggcagcttcacacagcctctctatcggggcgagcttaacgaacatttgggactccttggtccctatatccgagccgaagtggaggacaacattatggttacctttaggaatcaagcctctcgcccctacagcttctactcctccctcatcagttatgaggaggatcagagacaaggcgctgaaccacggaagaactttgtgaaaccgaatgagacgaagacctacttctggaaagtacagcaccacatggcccccacaaaagacgaattcgattgcaaagcatgggcgtatttttcagacgttgacttggagaaagatgtacattcaggacttattggtcctttgttggtgtgtcacactaacactctcaatccagcccatggcaggcaggtgacagtccaggaattcgctcttttctttaccatctttgatgagaccaagtcctggtacttcacggaaaacatggagcgcaattgcagagccccctgtaacatacagatggaggaccctacctttaaggaaaattatcggttccacgcaatcaacggatacattatggatacactccctggccttgtgatggctcaggaccaacgaatcaggtggtacctcctcagcatgggttctaatgagaacatacactccattcacttttcaggacatgtgttcactgtccggaagaaagaagagtataagatggccctctacaatttgtatccaggcgtgtttgagaccgttgaaatgcttccctctaaagctggcatctggagagtagagtgcttgatcggagaacatcttcacgcaggtatgagcaccttgttcctcgtgtacagcaacaaatgtcagaatccacttggcatggccagtggacacattcgcgactttcagatcacagcatctggccagtatggacaatgggccccaaagttggctcgcctccattactccggtagcataaatgcgtggtccactaaagaacctttcagctggattaaggtcgatcttcttgcccccatgatcatccacggcattaagacacagggagcgaggcagaaattctcctccctctacatctcacagttcattattatgtatagtttggacggcaagaagtggcaaacttatagaggtaacagtactggaacagacatggtgttcttcggcaacgttgatagctctggcatcaaacacaacatctttaatcctcccataatagctcggtacatcagattgcatccgacccactacagcattaggagtacactccgaatggagcttatgggttgcgacttgaattcctgttcaatgccactcggaatggagtctaaagccatctctgatgcacagataaccgccagtagctactttacgaacatgtttgctacgtggtcaccctctaaggcaaggcttcatttgcaaggccggtctaatgcctggagacctcaggtgaacaacccgaaagaatggctccaggtggactttcagaagaccatgaaagtaacaggtgtcactactcagggagttaagtccttggatactagcatgtatgtgaaggagttccttatttcctcatcacaagatggccaccagtggaccctcttctttcagaatggtaaggtcaaagtgtttcagggcaatcaagacagcttcacacccgtggtgaacagtcttgatcctccactcttgacacgataccttcgaatccatccacagtcttgggagcaccagattgcattgcgcatggaagtacttggatgcgaggctcaggacctctac

SEQ ID NO: 1514 - protein, 1457 aa, synthetic construct
  REGION 1..1457: note = Variant of human B-domain deleted Factor VIII
MQIELSTCFFLCLLRFCFSATRRYYLGAVELSWDYMQSDLGELPVDARFPPRVPKSFPFNTSQVYKKTLFVEFTDHLFNIAKPRPPWMGLLGPTIQAEVYDTVVITLKNMASHPVSLHAVGVSYWKASEGAEYDDQTSQREKEDDKVFPGGSHTYVWQVLKENGPMASDPPCLTYSYLSHVDLVKDLNSGLIGALLVCREGSLAKEKTQTLAKFILLFAVFDEGKSWHSETKNSLMQDRDAASARAWPKMHTVNGYVNRTLPGLIGCHRKSVYWHVIGMGTTPEVHSIFLEGHTFLVRNHRQASLGISPITFLTAQTLLRDLGQFLLFCHIPSHQHDGMEAYVKVDSCPEEPQLRMKNNEEAEDYDDDLTDSEMDVVRFDDDNSPSIIQARSGAKKHPKTWVHYIAAEEEDWDYAPLVLAPDDRSYKSQYLNNGPQRIGRKYKKVRFMAYTDETFKTREAIQHESGILGPLLYGEVGDTLLIIFKNQASRPYNIYPHGITDVRPLYSRRLPKGVKHLKDFPILPGEIFKYKWTITVEDGPTKSDPRCLTRYYSSFVNWERDLASGLIGPLLICYKESVDQRGNQIMSDKRNVILFSVFDENRSWYLTENIQRFLPNPAGVQLEDPEFQASNIMHSINGYVFDSLQLSVCLHEVAYWYILSIGAQTDFLSVFFSGYTFKHKGVYEDTLTLFPFSGETVFMSMENPGLWILGCHNSDFRNRGMTALLKVSSCDWNTGDYYEDSYEDISAYFDSKNNAIEPRSFSQNPPVLKRHQREGTRTTLQSDQEEIDYDDTISVEMKKEDFDIYDEDENQSPRSFQKKTRHYFIAAVERLWDYGMSSSPHVLRNRAQSGSVPQFKKVVFQEFTDGSFTQPLYRGELNEHLGLLGPYIRAEVEDNIMVTFRNQASRPYSFYSSLISYEEDQRQGAEPRKNFVKPNETKTYFWKVQHHMAPTKDEFDCKAWAYFSDVDLEKDVHSGLIGPLLVCHTNTLNPAHGRQVTVQEFALFFTIFDETKSWYFTENMERNCRAPCNIQMEDPTFKENYRFHAINGYIMDTLPGLVMAQDQRIRWYLLSMGSNENIHSIHFSGHVFTVRKKEEYKMALYNLYPGVFETVEMLPSKAGIWRVECLIGEHLHAGMSTLFLVYSNKCQNPLGMASGHIRDFQITASGQYGQWAPKLARLHYSGSINAWSTKEPFSWIKVDLLAPMIIHGIKTQGARQKFSSLYISQFIIMYSLDGKKWQTYRGNSTGTDMVFFGNVDSSGIKHNIFNPPIIARYIRLHPTHYSIRSTLRMELMGCDLNSCSMPLGMESKAISDAQITASSYFTNMFATWSPSKARLHLQGRSNAWRPQVNNPKEWLQVDFQKTMKVTGVTTQGVKSLDTSMYVKEFLISSSQDGHQWTLFFQNGKVKVFQGNQDSFTPVVNSLDPPLLTRYLRIHPQSWEHQIALRMEVLGCEAQDLY

SEQ ID NO: 1515 - DNA, 4371 bp, synthetic construct
  misc_feature 1..4371: note = Variant of human B-domain deleted Factor VIII
  source 1..4371: mol_type = other DNA
atgcagattgaactgtctacctgcttcttcctctgtttgctgaggttctgctttagcgccactagacggtactaccttggcgctgtggagctgtcctgggactatatgcagagtgatttgggagagcttcccgtcgacgcacgatttcctcctcgcgttccaaagtcatttccctttaacacaagccaggtgtacaagaagacgctcttcgtcgaattcaccgatcacctgttcaatatcgccaaacccagaccaccatggatgggtcttttggggcctaccatacaagcggaggtgtatgacacagttgttatcactctcaagaacatggcttctcatccggtaagtcttcacgcagtgggcgtgtcctactggaaagcttcagaaggagccgagtatgatgatcagacatcccagagggagaaagaagacgacaaggtatttccaggtgggtctcatacctatgtgtggcaagtgctcaaagagaatggccctatggcaagcgatccgccgtgtttgacttacagctacctttcacacgttgacctcgtcaaggacctcaactccgggttgattggagccttgttggtatgcagggaaggatctcttgccaaagagaagacacagaccctgcacaagtttatccttctctttgctgtgttcgatgagggcaaaagttggcatagcgaaacgaagaattccctcatgcaggatcgcgacgcagccagcgccagagcttggcccaagatgcacactgtgaacggatatgtcaataggacgcttcctggcttgattgggtgtcatcggaaaagtgtctactggcacgtgatcggaatggggacaacaccagaggtccactccatatttctcgaaggccataccttccttgttcgaaaccacagacaggcatccttggggatctctcccattacctttctcactgcccaaacgctccttatggacttgggtcagttccttctcttttgccatatcccgtcacaccagcatgatggtatggaagcttatgtgaaagtcgacagttgtcctgaggagccacagttgcgcatgaagaataatgaagaagccgaggattacgacgacgatctcaccgattctgagatggacgtggtgaggtttgatgacgacaactctccctccatcattcaagctcggagcggggcgaagaaacaccccaagacttgggtccactatatagcggcggaagaggaggattgggattacgctcctcttgtattggcaccagatgaccgctcatacaaaagccagtacctcaacaacggaccgcagagaattggccggaagtataagaaagtgcgatttatggcctatacagacgaaacctttaagacaagggaggccatccagcatgagagtgggattttgggacctcttctttacggcgaagttggtgataccctcctcatcatcttcaagaatcaagcttctcgcccctataacatttacccacacgggatcactgacgttaggcctttgtatagcagaagacttcccaaaggcgtgaagcatctcaaagacttccccattttgccaggcgagatctttaagtacaaatggcgcattacagtggaagatggaccgactaaatcagaccctcgatgccttacgcggtactattcctccttcgtgaatatggagagagatttggcaagcggactcataggaccactcctcatctgttacaaggaatctgtagaccagaggggtaaccagattatgagtgataaacgcaatgtgatcctttttagcgtcttcgacgagaaccggtcctggtacttgaccgagaatatacaaaggttccttcccaaccctgcaggggttcagttggaagaccctgagtttcaggccagcaatattatgcactcaatcaacggctatgtgtttgatagtctccagctttctgtttgcctccatgaagtagcctattggtacatcttgtcaattggtgctcaaacagacttcctctccgtcttcttctccggctacacctttaagcacaagaacgtgtatgaggacactctcacactctttccattttctggagaaaccgtgttcatgagcatggagaatccaggcctttggatcttgggttgccacaacagtgattttcgcaatcggggaatgactgctctcctcaaagtcagcagctgtgattggaacacaggcgactattacgaagattcttacgaggacataagtgcctactttgactccaagaataacgccattgagcccagatcattctcccagaatcctcccgtgcttaaaaggcatcagcgcgaaggtaccagaactactcttcagtctgatcaagaggagattgactatgacgacaccattagcgtggaaatgaagaaggaggatttcgatatctatgacgaagatgagaaccagtctccgcggagctttcagaagaagacgcgacactacttcattgcagcagtcgaaaggctttgggactacggtatgtcatcaaaacctcatgtgttgcgcaatagagctcagagtggaagtgttccacagttcaagaaagtcgtctttcaagagtttacagatggcagcttcacacagcctctctatcggggcgagcttaacgaacatttgggactccttggtccctatatccgagccgaagtggaggacaacattatggttacctttaggaatcaagcctctcgcccctacagcttctactcctccctcatcagttatgaggaggatcagagacaaggcgctgaaccacggaagaactttgtgaaaccgaatgagacgaagacctacttctggaaagtacagcaccacatggcccccacaaaagacgaattcgattgcaaagcatgggcgtatttttcagacgttgacttggagaaagatgtacattcaggacttattggtcctttgttggtgtgtcacactaacactctcaatccagcccatggcaggcaggtgacagtccaggaattcgctcttttctttaccatctttgatgagaccaagtcctggtacttcacggaaaacatggagcgcaattgcagagccccctgtaacatacagatggaggaccctacctttaaggaaaattatcggttccacgcaatcaacggatacattatggatacactccctggccttgtgatggctcaggaccaacgaatcaggtggtacctcctcagcatgggttctaatgagaacatacactccattcacttttcaggacatgtgttcactgtccggaagaaagaagagtataagatggccctctacaatttgtatccaggcgtgtttgagaccgttgaaatgcttccctctaaagctggcatctggagagtagagtgcttgatcggagaacatcttcacgcaggtatgagcaccttgttcctcgtgtacagcaacaaatgtcagaatccacttggcatggccagtggacacattcgcgactttcagatcacagcatctggccagtatggacaatgggccccaaagttggctcgcctccattactccggtagcataaatgcgtggtccactaaagaacctttcagctggattaaggtcgatcttcttgcccccatgatcatccacggcattaagacacagggagcgaggcagaaattctcctccctctacatctcacagttcattattatgtatagtttggacggcaagaagtggcaaacttatagaggtaacagtactggaacagacatggtgttcttcggcaacgttgatagctctggcatcaaacacaacatctttaatcctcccataatagctcggtacatcagattgcatccgacccactacagcattaggagtacactccgaatggagcttatgggttgcgacttgaattcctgttcaatgccactcggaatggagtctaaagccatctctgatgcacagataaccgccagtagctactttacgaacatgtttgctacgtggtcaccctctaaggcaaggcttcatttgcaaggccggtctaatgcctggagacctcaggtgaacaacccgaaagaatggctccaggtggactttcagaagaccatgaaagtaacaggtgtcactactcagggagttaagtccttggatactagcatgtatgtgaaggagttccttatttcctcatcacaagatggccaccagtggaccctcttctttcagaatggtaaggtcaaagtgtttcagggcaatcaagacagcttcacacccgtggtgaacagtcttgatcctccactcttgacacgataccttcgaatccatccacagtcttgggagcaccagattgcattgcgcatggaagtacttggatgcgaggctcaggacctctac

SEQ ID NO: 1516 - protein, 1457 aa, synthetic construct
  REGION 1..1457: note = Variant of human B-domain deleted Factor VIII
MQIELSTCFFLCLLRFCFSATRRYYLGAVELSWDYMQSDLGELPVDARFPPRVPKSFPFNTSQVYKKTLFVEFTDHLFNIAKPRPPWMGLLGPTIQAEVYDTVVITLKNMASHPVSLHAVGVSYWKASEGAEYDDQTSQREKEDDKVFPGGSHTYVWQVLKENGPMASDPPCLTYSYLSHVDLVKDLNSGLIGALLVCREGSLAKEKTQTLHKFILLFAVFDEGKSWHSETKNSLMQDRDAASARAWPKMHTVNGYVNRTLPGLIGCHRKSVYWHVIGMGTTPEVHSIFLEGHTFLVRNHRQASLGISPITFLTAQTLLMDLGQFLLFCHIPSHQHDGMEAYVKVDSCPEEPQLRMKNNEEAEDYDDDLTDSEMDVVRFDDDNSPSIIQARSGAKKHPKTWVHYIAAEEEDWDYAPLVLAPDDRSYKSQYLNNGPQRIGRKYKKVRFMAYTDETFKTREAIQHESGILGPLLYGEVGDTLLIIFKNQASRPYNIYPHGITDVRPLYSRRLPKGVKHLKDFPILPGEIFKYKWRITVEDGPTKSDPRCLTRYYSSFVNMERDLASGLIGPLLICYKESVDQRGNQIMSDKRNVILFSVFDENRSWYLTENIQRFLPNPAGVQLEDPEFQASNIMHSINGYVFDSLQLSVCLHEVAYWYILSIGAQTDFLSVFFSGYTFKHKNVYEDTLTLFPFSGETVFMSMENPGLWILGCHNSDFRNRGMTALLKVSSCDWNTGDYYEDSYEDISAYFDSKNNAIEPRSFSQNPPVLKRHQREGTRTTLQSDQEEIDYDDTISVEMKKEDFDIYDEDENQSPRSFQKKTRHYFIAAVERLWDYGMSSKPHVLRNRAQSGSVPQFKKVVFQEFTDGSFTQPLYRGELNEHLGLLGPYIRAEVEDNIMVTFRNQASRPYSFYSSLISYEEDQRQGAEPRKNFVKPNETKTYFWKVQHHMAPTKDEFDCKAWAYFSDVDLEKDVHSGLIGPLLVCHTNTLNPAHGRQVTVQEFALFFTIFDETKSWYFTENMERNCRAPCNIQMEDPTFKENYRFHAINGYIMDTLPGLVMAQDQRIRWYLLSMGSNENIHSIHFSGHVFTVRKKEEYKMALYNLYPGVFETVEMLPSKAGIWRVECLIGEHLHAGMSTLFLVYSNKCQNPLGMASGHIRDFQITASGQYGQWAPKLARLHYSGSINAWSTKEPFSWIKVDLLAPMIIHGIKTQGARQKFSSLYISQFIIMYSLDGKKWQTYRGNSTGTDMVFFGNVDSSGIKHNIFNPPIIARYIRLHPTHYSIRSTLRMELMGCDLNSCSMPLGMESKAISDAQITASSYFTNMFATWSPSKARLHLQGRSNAWRPQVNNPKEWLQVDFQKTMKVTGVTTQGVKSLDTSMYVKEFLISSSQDGHQWTLFFQNGKVKVFQGNQDSFTPVVNSLDPPLLTRYLRIHPQSWEHQIALRMEVLGCEAQDLY

SEQ ID NO: 1517 - DNA, 4371 bp, synthetic construct
  misc_feature 1..4371: note = Variant of human B-domain deleted Factor VIII
  source 1..4371: mol_type = other DNA
atgcagattgaactgtctacctgcttcttcctctgtttgctgaggttctgctttagcgccactagacggtactaccttggcgctgtggagctgtcctgggactatatgcagagtgatttgggagagcttcccgtcgacgcacgatttcctcctcgcgttccaaagtcatttccctttaacacaagccaggtgtacaagaagacgctcttcgtcgaattcaccgatcacctgttcaatatcgccaaacccagaccaccatggatgggtcttttggggcctaccatacaagcggaggtgtatgacacagttgttatcactctcaagaacatggcttctcatccggtaagtcttcacgcagtgggcgtgtcctactggaaagcttcagaaggagccgagtatgatgatcagacatcccagagggagaaagaagacgacaaggtatttccaggtgggtctcatacctatgtgtggcaagtgctcaaagagaatggccctatggcaagcgatccgccgtgtttgacttacagctacctttcacacgttgacctcgtcaaggacctcaactccgggttgattggagccttgttggtatgcagggaaggatctcttgccaaagagaagacacagaccctggccaagtttatccttctctttgctgtgttcgatgagggcaaaagttggcatagcgaaacgaagaattccctcatgcaggatcgcgacgcagccagcgccagagcttggcccaagatgcacactgtgaacggatatgtcaataggacgcttcctggcttgattgggtgtcatcggaaaagtgtctactggcacgtgatcggaatggggacaacaccagaggtccactccatatttctcgaaggccataccttccttgttcgaaaccacagacaggcatccttggggatctctcccattaccttcctcactgcccaaacgctccttatggacttgggtcagttccttctcttttgccatatcccgtcacaccagcatgatggtatggaagcttatgtgaaagtcgacagttgtcctgaggagccacagttgcgcatgaagaataatgaagaagccgaggattacgacgacgatctcaccgattctgagatggacgtggtgaggtttgatgacgacaactctccctccatcattcaagctcggagcggggcgaagaaacaccccaagacttgggtccactatatagcggcggaagaggaggattgggattacgctcctcttgtattggcaccagatgaccgctcatacaaaagccagtacctcaacaacggaccgcagagaattggccggaagtataagaaagtgcgatttatggcctatacagacgaaacctttaagacaagggaggccatccagcatgagagtgggattttgggacctcttctttacggcgaagttggtgataccctcctcatcatcttcaagaatcaagcttctcgcccctataacatttacccacacgggatcactgacgttaggcctttgtatagcagaagacttcccaaaggcgtgaagcatctcaaagacttccccattttgccaggcgagatctttaagtacaaatggaccattacagtggaagatggaccgactaaatcagaccctcgatgccttacgcggtactattcctccttcgtgaatatggagagagatttggcaagcggactcataggaccactcctcatctgttacaaggaatctgtagaccagaggggtaaccagattatgagtgataaacgcaatgtgatcctttttagcgtcttcgacgagaaccggtcctggtacttgaccgagaatatacaaaggttccttcccaaccctgcagaggttcagttggaagaccctgagtttcaggccagcaatattatgcactcaatcaacggctatgtgtttgatagtctccagctttctgtttgcctccatgaagtagcctattggtacatcttgtcaattggtgctcaaacagacttcctctccgtcttcttctccggctacacctttaagcacaagggcgtgtatgaggacactctcacactctttccattttctggagaaaccgtgttcatgagcatggagaatccaggcctttggatcttgggttgccacaacagtgattttcgcaatcggggaatgactgctctcctcaaagtcagcagctgtgattggaacacaggcgactattacgaagattcttacgaggacataagtgcctactttgactccaagaataacgccattgagcccagatcattctcccagaatcctcccgtgcttaaaaggcatcagcgcgaaggtaccagaactactcttcagtctgatcaagaggagattgactatgacgacaccattagcgtggaaatgaagaaggaggatttcgatatctatgacgaagatgagaaccagtctccgcggagctttcagaagaagacgcgacactacttcattgcagcagtcgaaaggctttgggactacggtatgtcatcatcccctcatgtgttgcgcaatagagctcagagtggaagtgttccacagttcaagaaagtcgtctttcaagagtttacagatggcagcttcacacagcctctctatcggggcgagcttaacgaacatttgggactccttggtccctatatccgagccgaagtggaggacaacattatggttacctttaggaatcaagcctctcgcccctacagcttctactcctccctcatcagttatgaggaggatcagagacaaggcgctgaaccacggaagaactttgtgaaaccgaatgagacgaagacctacttctggaaagtacagcaccacatggcccccacaaaagacgaattcgattgcaaagcatgggcgtatttttcagacgttgacttggagaaagatgtacattcaggacttattggtcctttgttggtgtgtcacactaacactctcaatccagcccatggcaggcaggtgacagtccaggaattcgctcttttctttaccatctttgatgagaccaagtcctggtacttcacggaaaacatggagcgcaattgcagagccccctgtaacatacagatggaggaccctacctttaaggaaaattatcggttccacgcaatcaacggatacattatggatacactccctggccttgtgatggctcaggaccaacgaatcaggtggtacctcctcagcatgggttctaatgagaacatacactccattcacttttcaggacatgtgttcactgtccggaagaaagaagagtataagatggccctctacaatttgtatccaggcgtgtttgagaccgttgaaatgcttccctctaaagctggcatctggagagtagagtgcttgatcggagaacatcttcacgcaggtatgagcaccttgttcctcgtgtacagcaacaaatgtcagaatccacttggcatggccagtggacacattcgcgactttcagatcacagcatctggccagtatggacaatgggccccaaagttggctcgcctccattactccggtagcataaatgcgtggtccactaaagaacctttcagctggattaaggtcgatcttcttgcccccatgatcatccacggcattaagacacagggagcgaggcagaaattctcctccctctacatctcacagttcattattatgtatagtttggacggcaagaagtggcaaacttatagaggtaacagtactggaacagacatggtgttcttcggcaacgttgatagctctggcatcaaacacaacatctttaatcctcccataatagctcggtacatcagattgcatccgacccactacagcattaggagtacactccgaatggagcttatgggttgcgacttgaattcctgttcaatgccactcggaatggagtctaaagccatctctgatgcacagataaccgccagtagctactttacgaacatgtttgctacgtggtcaccctctaaggcaaggcttcatttgcaaggccggtctaatgcctggagacctcaggtgaacaacccgaaagaatggctccaggtggactttcagaagaccatgaaagtaacaggtgtcactactcagggagttaagtccttggatactagcatgtatgtgaaggagttccttatttcctcatcacaagatggccaccagtggaccctcttctttcagaatggtaaggtcaaagtgtttcagggcaatcaagacagcttcacacccgtggtgaacagtcttgatcctccactcttgacacgataccttcgaatccatccacagtcttgggagcaccagattgcattgcgcatggaagtacttggatgcgaggctcaggacctctac

SEQ ID NO: 1518 - protein, 1457 aa, synthetic construct
  REGION 1..1457: note = Variant of human B-domain deleted Factor VIII
MQIELSTCFFLCLLRFCFSATRRYYLGAVELSWDYMQSDLGELPVDARFPPRVPKSFPFNTSQVYKKTLFVEFTDHLFNIAKPRPPWMGLLGPTIQAEVYDTVVITLKNMASHPVSLHAVGVSYWKASEGAEYDDQTSQREKEDDKVFPGGSHTYVWQVLKENGPMASDPPCLTYSYLSHVDLVKDLNSGLIGALLVCREGSLAKEKTQTLAKFILLFAVFDEGKSWHSETKNSLMQDRDAASARAWPKMHTVNGYVNRTLPGLIGCHRKSVYWHVIGMGTTPEVHSIFLEGHTFLVRNHRQASLGISPITFLTAQTLLMDLGQFLLFCHIPSHQHDGMEAYVKVDSCPEEPQLRMKNNEEAEDYDDDLTDSEMDVVRFDDDNSPSIIQARSGAKKHPKTWVHYIAAEEEDWDYAPLVLAPDDRSYKSQYLNNGPQRIGRKYKKVRFMAYTDETFKTREAIQHESGILGPLLYGEVGDTLLIIFKNQASRPYNIYPHGITDVRPLYSRRLPKGVKHLKDFPILPGEIFKYKWTITVEDGPTKSDPRCLTRYYSSFVNMERDLASGLIGPLLICYKESVDQRGNQIMSDKRNVILFSVFDENRSWYLTENIQRFLPNPAEVQLEDPEFQASNIMHSINGYVFDSLQLSVCLHEVAYWYILSIGAQTDFLSVFFSGYTFKHKGVYEDTLTLFPFSGETVFMSMENPGLWILGCHNSDFRNRGMTALLKVSSCDWNTGDYYEDSYEDISAYFDSKNNAIEPRSFSQNPPVLKRHQREGTRTTLQSDQEEIDYDDTISVEMKKEDFDIYDEDENQSPRSFQKKTRHYFIAAVERLWDYGMSSSPHVLRNRAQSGSVPQFKKVVFQEFTDGSFTQPLYRGELNEHLGLLGPYIRAEVEDNIMVTFRNQASRPYSFYSSLISYEEDQRQGAEPRKNFVKPNETKTYFWKVQHHMAPTKDEFDCKAWAYFSDVDLEKDVHSGLIGPLLVCHTNTLNPAHGRQVTVQEFALFFTIFDETKSWYFTENMERNCRAPCNIQMEDPTFKENYRFHAINGYIMDTLPGLVMAQDQRIRWYLLSMGSNENIHSIHFSGHVFTVRKKEEYKMALYNLYPGVFETVEMLPSKAGIWRVECLIGEHLHAGMSTLFLVYSNKCQNPLGMASGHIRDFQITASGQYGQWAPKLARLHYSGSINAWSTKEPFSWIKVDLLAPMIIHGIKTQGARQKFSSLYISQFIIMYSLDGKKWQTYRGNSTGTDMVFFGNVDSSGIKHNIFNPPIIARYIRLHPTHYSIRSTLRMELMGCDLNSCSMPLGMESKAISDAQITASSYFTNMFATWSPSKARLHLQGRSNAWRPQVNNPKEWLQVDFQKTMKVTGVTTQGVKSLDTSMYVKEFLISSSQDGHQWTLFFQNGKVKVFQGNQDSFTPVVNSLDPPLLTRYLRIHPQSWEHQIALRMEVLGCEAQDLY

SEQ ID NO: 1519 - DNA, 4371 bp, synthetic construct
  misc_feature 1..4371: note = Variant of human B-domain deleted Factor VIII
  source 1..4371: mol_type = other DNA
atgcagattgaactgtctacctgcttcttcctctgtttgctgaggttctgctttagcgccactagacggtactaccttggcgctgtggagctgtcctgggactatatgcagagtgatttgggagagcttcccgtcgacgcacgatttcctcctcgcgttccaaagtcatttccctttaacacaagccaggtgtacaagaagacgctcttcgtcgaattcaccgatcacctgttcaatatcgccaaacccagaccaccatggatgggtcttttggggcctaccatacaagcggaggtgtatgacacagttgttatcactctcaagaacatggcttctcatccggtaagtcttcacgcagtgggcgtgtcctactggaaagcttcagaaggagccgagtatgatgatcagacatcccagagggagaaagaagacgacaaggtatttccaggtgggtctcatacctatgtgtggcaagtgctcaaagagaatggccctatggcaagcgatccgccgtgtttgacttacagctacctttcacacgttgacctcgtcaaggacctcaactccgggttgattggagccttgttggtatgcagggaaggatctcttgccaaagagaagacacagaccctccacaagtttatccttctctttgctgtgttcgatgagggcaaaagttggcatagcgaaacgaagaattccctcatgcaggatcgcgacgcagccagcgccagagcttggcccaagatgcacactgtgaacggatatgtcaataggacgcttcctggcttgattgggtgtcatcggaaaagtgtctactggcacgtgatcggaatggggacaacaccagaggtccactccatatttctcgaaggccataccttccttgttcgaaaccacagacaggcatccttggggatctctcccattaccttcctcactgcccaaacgctccttatggacttgggtcagttccttctcttttgccatatcccgtcacaccagcatgatggtatggaagcttatgtgaaagtcgacagttgtcctgaggagccacagttgcgcatgaagaataatgaagaagccgaggattacgacgacgatctcaccgattctgagatggacgtggtgaggtttgatgacgacaactctccctccatcattcaagctcggagcggggcgaagaaacaccccaagacttgggtccactatatagcggcggaagaggaggattgggattacgctcctcttgtattggcaccagatgaccgctcatacaaaagccagtacctcaacaacggaccgcagagaattggccggaagtataagaaagtgcgatttatggcctatacagacgaaacctttaagacaagggaggccatccagcatgagagtgggattttgggacctcttctttacggcgaagttggtgataccctcctcatcatcttcaagaatcaagcttctcgcccctataacatttacccacacgggatcactgacgttaggcctttgtatagcagaagacttcccaaaggcgtgaagcatctcaaagacttccccattttgccaggcgagatctttaagtacaaatggaccgttacagtggaagatggaccgactaaatcagaccctcgatgccttacgcggtactattcctccttcgtgaatatggagagagatttggcaagcggactcataggaccactcctcatctgttacaaggaatctgtagaccagaggggtaaccagattatgagtgataaacgcaatgtgatcctttttagcgtcttcgacgagaaccggtcctggtacttgaccgagaatatacaaaggttccttcccaacgaagcagaggttcagttggaagaccctgagtttcaggccagcaatattatgcactcaatcaacggctatgtgtttgatagtctccagctttctgtttgcctccatgaagtagcctattggtacatcttgtcaattggtgctcaaacagacttcctctccgtcttcttctccggctacacctttaagcacaagggcgtgtatgaggacactctcacactctttccattttctggagaaaccgtgttcatgagcatggagaatccaggcctttggatcttgggttgccacaacagtgattttcgcaatcggggaatgactgctctcctcaaagtcagcagctgtgattggaacacaggcgactattacgaagattcttacgaggacataagtgcctactttgactccaagaataacgccattgagcccagatcattctcccagaatcctcccgtgcttaaaaggcatcagcgcgaaggtaccagaactactcttcagtctgatcaagaggagattgactatgacgacaccattagcgtggaaatgaagaaggaggatttcgatatctatgacgaagatgagaaccagtctccgcggagctttcagaagaagacgcgacactacttcattgcagcagtcgaaaggctttgggactacggtatgtcatcatcccctcatgtgttgcgcaatagagctcagagtggaagtgttccacagttcaagaaagtcgtctttcaagagtttacagatggcagcttcacacagcctctctatcggggcgagcttaacgaacatttgggactccttggtccctatatccgagccgaagtggaggacaacattatggttacctttaggaatcaagcctctcgcccctacagcttctactcctccctcatcagttatgaggaggatcagagacaaggcgctgaaccacggaagaactttgtgaaaccgaatgagacgaagacctacttctggaaagtacagcaccacatggcccccacaaaagacgaattcgattgcaaagcatgggcgtatttttcagacgttgacttggagaaagatgtacattcaggacttattggtcctttgttggtgtgtcacactaacactctcaatccagcccatggcaggcaggtgacagtccaggaattcgctcttttctttaccatctttgatgagaccaagtcctggtacttcacggaaaacatggagcgcaattgcagagccccctgtaacatacagatggaggaccctacctttaaggaaaattatcggttccacgcaatcaacggatacattatggatacactccctggccttgtgatggctcaggaccaacgaatcaggtggtacctcctcagcatgggttctaatgagaacatacactccattcacttttcaggacatgtgttcactgtccggaagaaagaagagtataagatggccctctacaatttgtatccaggcgtgtttgagaccgttgaaatgcttccctctaaagctggcatctggagagtagagtgcttgatcggagaacatcttcacgcaggtatgagcaccttgttcctcgtgtacagcaacaaatgtcagaatccacttggcatggccagtggacacattcgcgactttcagatcacagcatctggccagtatggacaatgggccccaaagttggctcgcctccattactccggtagcataaatgcgtggtccactaaagaacctttcagctggattaaggtcgatcttcttgcccccatgatcatccacggcattaagacacagggagcgaggcagaaattctcctccctctacatctcacagttcattattatgtatagtttggacggcaagaagtggcaaacttatagaggtaacagtactggaacagacatggtgttcttcggcaacgttgatagctctggcatcaaacacaacatctttaatcctcccataatagctcggtacatcagattgcatccgacccactacagcattaggagtacactccgaatggagcttatgggttgcgacttgaattcctgttcaatgccactcggaatggagtctaaagccatctctgatgcacagataaccgccagtagctactttacgaacatgtttgctacgtggtcaccctctaaggcaaggcttcatttgcaaggccggtctaatgcctggagacctcaggtgaacaacccgaaagaatggctccaggtggactttcagaagaccatgaaagtaacaggtgtcactactcagggagttaagtccttggatactagcatgtatgtgaaggagttccttatttcctcatcacaagatggccaccagtggaccctcttctttcagaatggtaaggtcaaagtgtttcagggcaatcaagacagcttcacacccgtggtgaacagtcttgatcctccactcttgacacgataccttcgaatccatccacagtcttgggagcaccagattgcattgcgcatggaagtacttggatgcgaggctcaggacctctac

SEQ ID NO: 1520 - protein, 1457 aa, synthetic construct
  REGION 1..1457: note = Variant of human B-domain deleted Factor VIII
MQIELSTCFFLCLLRFCFSATRRYYLGAVELSWDYMQSDLGELPVDARFPPRVPKSFPFNTSQVYKKTLFVEFTDHLFNIAKPRPPWMGLLGPTIQAEVYDTVVITLKNMASHPVSLHAVGVSYWKASEGAEYDDQTSQREKEDDKVFPGGSHTYVWQVLKENGPMASDPPCLTYSYLSHVDLVKDLNSGLIGALLVCREGSLAKEKTQTLHKFILLFAVFDEGKSWHSETKNSLMQDRDAASARAWPKMHTVNGYVNRTLPGLIGCHRKSVYWHVIGMGTTPEVHSIFLEGHTFLVRNHRQASLGISPITFLTAQTLLMDLGQFLLFCHIPSHQHDGMEAYVKVDSCPEEPQLRMKNNEEAEDYDDDLTDSEMDVVRFDDDNSPSIIQARSGAKKHPKTWVHYIAAEEEDWDYAPLVLAPDDRSYKSQYLNNGPQRIGRKYKKVRFMAYTDETFKTREAIQHESGILGPLLYGEVGDTLLIIFKNQASRPYNIYPHGITDVRPLYSRRLPKGVKHLKDFPILPGEIFKYKWTVTVEDGPTKSDPRCLTRYYSSFVNMERDLASGLIGPLLICYKESVDQRGNQIMSDKRNVILFSVFDENRSWYLTENIQRFLPNEAEVQLEDPEFQASNIMHSINGYVFDSLQLSVCLHEVAYWYILSIGAQTDFLSVFFSGYTFKHKGVYEDTLTLFPFSGETVFMSMENPGLWILGCHNSDFRNRGMTALLKVSSCDWNTGDYYEDSYEDISAYFDSKNNAIEPRSFSQNPPVLKRHQREGTRTTLQSDQEEIDYDDTISVEMKKEDFDIYDEDENQSPRSFQKKTRHYFIAAVERLWDYGMSSSPHVLRNRAQSGSVPQFKKVVFQEFTDGSFTQPLYRGELNEHLGLLGPYIRAEVEDNIMVTFRNQASRPYSFYSSLISYEEDQRQGAEPRKNFVKPNETKTYFWKVQHHMAPTKDEFDCKAWAYFSDVDLEKDVHSGLIGPLLVCHTNTLNPAHGRQVTVQEFALFFTIFDETKSWYFTENMERNCRAPCNIQMEDPTFKENYRFHAINGYIMDTLPGLVMAQDQRIRWYLLSMGSNENIHSIHFSGHVFTVRKKEEYKMALYNLYPGVFETVEMLPSKAGIWRVECLIGEHLHAGMSTLFLVYSNKCQNPLGMASGHIRDFQITASGQYGQWAPKLARLHYSGSINAWSTKEPFSWIKVDLLAPMIIHGIKTQGARQKFSSLYISQFIIMYSLDGKKWQTYRGNSTGTDMVFFGNVDSSGIKHNIFNPPIIARYIRLHPTHYSIRSTLRMELMGCDLNSCSMPLGMESKAISDAQITASSYFTNMFATWSPSKARLHLQGRSNAWRPQVNNPKEWLQVDFQKTMKVTGVTTQGVKSLDTSMYVKEFLISSSQDGHQWTLFFQNGKVKVFQGNQDSFTPVVNSLDPPLLTRYLRIHPQSWEHQIALRMEVLGCEAQDLY

SEQ ID NO: 1521 - DNA, 4371 bp, synthetic construct
  misc_feature 1..4371: note = Variant of human B-domain deleted Factor VIII
  source 1..4371: mol_type = other DNA
atgcagattgaactgtctacctgcttcttcctctgtttgctgaggttctgctttagcgccactagacggtactaccttggcgctgtggagctgtcctgggactatatgcagagtgatttgggagagcttcccgtcgacgcacgatttcctcctcgcgttccaaagtcatttccctttaacacaagccaggtgtacaagaagacgctcttcgtcgaattcaccgatcacctgttcaatatcgccaaacccagaccaccatggatgggtcttttggggcctaccatacaagcggaggtgtatgacacagttgttatcactctcaagaacatggcttctcatccggtaagtcttcacgcagtgggcgtgtcctactggaaagcttcagaaggagccgagtatgatgatcagacatcccagagggagaaagaagacgacaaggtatttccaggtgggtctcatacctatgtgtggcaagtgctcaaagagaatggccctatggcaagcgatccgccgtgtttgacttacagctacctttcacacgttgacctcgtcaaggacctcaactccgggttgattggagccttgttggtatgcagggaaggatctcttgccaaagagaagacacagacccaagccaagtttatccttctctttgctgtgttcgatgagggcaaaagttggcatagcgaaacgaagaattccctcatgcaggatcgcgacgcagccagcgccagagcttggcccaagatgcacactgtgaacggatatgtcaataggacgcttcctggcttgattgggtgtcatcggaaaagtgtctactggcacgtgatcggaatggggacaacaccagaggtccactccatatttctcgaaggccataccttccttgttcgaaaccacagacaggcatccttggggatctctcccattacctttctcactgcccaaacgctccttcgtgacttgggtcagttccttctcttttgccatatcccgtcacaccagcatgatggtatggaagcttatgtgaaagtcgacagttgtcctgaggagccacagttgcgcatgaagaataatgaagaagccgaggattacgacgacgatctcaccgattctgagatggacgtggtgaggtttgatgacgacaactctccctccatcattcaagctcggagcggggcgaagaaacaccccaagacttgggtccactatatagcggcggaagaggaggattgggattacgctcctcttgtattggcaccagatgaccgctcatacaaaagccagtacctcaacaacggaccgcagagaattggccggaagtataagaaagtgcgatttatggcctatacagacgaaacctttaagacaagggaggccatccagcatgagagtgggattttgggacctcttctttacggcgaagttggtgataccctcctcatcatcttcaagaatcaagcttctcgcccctataacatttacccacacgggatcactgacgttaggcctttgtatagcagaagacttcccaaaggcgtgaagcatctcaaagacttccccattttgccaggcgagatctttaagtacaaatggaccgttacagtggaagatggaccgactaaatcagaccctcgatgccttacgcggtactattcctccttcgtgaattgggagagagatttggcaagcggactcataggaccactcctcatctgttacaaggaatctgtagaccagaggggtaaccagattatgagtgataaacgcaatgtgatcctttttagcgtcttcgacgagaaccggtcctggtacttgaccgagaatatacaaaggttccttcccaacgaagcaggggttcagttggaagaccctgagtttcaggccagcaatattatgcactcaatcaacggctatgtgtttgatagtctccagctttctgtttgcctccatgaagtagcctattggtacatcttgtcaattggtgctcaaacagacttcctctccgtcttcttctccggctacacctttaagcacaagaacgtgtatgaggacactctcacactctttccattttctggagaaaccgtgttcatgagcatggagaatccaggcctttggatcttgggttgccacaacagtgattttcgcaatcggggaatgactgctctcctcaaagtcagcagctgtgattggaacacaggcgactattacgaagattcttacgaggacataagtgcctactttgactccaagaataacgccattgagcccagatcattctcccagaatcctcccgtgcttaaaaggcatcagcgcgaaggtaccagaactactcttcagtctgatcaagaggagattgactatgacgacaccattagcgtggaaatgaagaaggaggatttcgatatctatgacgaagatgagaaccagtctccgcggagctttcagaagaagacgcgacactacttcattgcagcagtcgaaaggctttgggactacggtatgtcatcatcgcctcatgtgttgcgcaatagagctcagagtggaagtgttccacagttcaagaaagtcgtctttcaagagtttacagatggcagcttcacacagcctctctatcggggcgagcttaacgaacatttgggactccttggtccctatatccgagccgaagtggaggacaacattatggttacctttaggaatcaagcctctcgcccctacagcttctactcctccctcatcagttatgaggaggatcagagacaaggcgctgaaccacggaagaactttgtgaaaccgaatgagacgaagacctacttctggaaagtacagcaccacatggcccccacaaaagacgaattcgattgcaaagcatgggcgtatttttcagacgttgacttggagaaagatgtacattcaggacttattggtcctttgttggtgtgtcacactaacactctcaatccagcccatggcaggcaggtgacagtccaggaattcgctcttttctttaccatctttgatgagaccaagtcctggtacttcacggaaaacatggagcgcaattgcagagccccctgtaacatacagatggaggaccctacctttaaggaaaattatcggttccacgcaatcaacggatacattatggatacactccctggccttgtgatggctcaggaccaacgaatcaggtggtacctcctcagcatgggttctaatgagaacatacactccattcacttttcaggacatgtgttcactgtccggaagaaagaagagtataagatggccctctacaatttgtatccaggcgtgtttgagaccgttgaaatgcttccctctaaagctggcatctggagagtagagtgcttgatcggagaacatcttcacgcaggtatgagcaccttgttcctcgtgtacagcaacaaatgtcagaatccacttggcatggccagtggacacattcgcgactttcagatcacagcatctggccagtatggacaatgggccccaaagttggctcgcctccattactccggtagcataaatgcgtggtccactaaagaacctttcagctggattaaggtcgatcttcttgcccccatgatcatccacggcattaagacacagggagcgaggcagaaattctcctccctctacatctcacagttcattattatgtatagtttggacggcaagaagtggcaaacttatagaggtaacagtactggaacagacatggtgttcttcggcaacgttgatagctctggcatcaaacacaacatctttaatcctcccataatagctcggtacatcagattgcatccgacccactacagcattaggagtacactccgaatggagcttatgggttgcgacttgaattcctgttcaatgccactcggaatggagtctaaagccatctctgatgcacagataaccgccagtagctactttacgaacatgtttgctacgtggtcaccctctaaggcaaggcttcatttgcaaggccggtctaatgcctggagacctcaggtgaacaacccgaaagaatggctccaggtggactttcagaagaccatgaaagtaacaggtgtcactactcagggagttaagtccttggatactagcatgtatgtgaaggagttccttatttcctcatcacaagatggccaccagtggaccctcttctttcagaatggtaaggtcaaagtgtttcagggcaatcaagacagcttcacacccgtggtgaacagtcttgatcctccactcttgacacgataccttcgaatccatccacagtcttgggagcaccagattgcattgcgcatggaagtacttggatgcgaggctcaggacctctac

SEQ ID NO: 1522 - protein, 1457 aa, synthetic construct
  REGION 1..1457: note = Variant of human B-domain deleted Factor VIII
MQIELSTCFFLCLLRFCFSATRRYYLGAVELSWDYMQSDLGELPVDARFPPRVPKSFPFNTSQVYKKTLFVEFTDHLFNIAKPRPPWMGLLGPTIQAEVYDTVVITLKNMASHPVSLHAVGVSYWKASEGAEYDDQTSQREKEDDKVFPGGSHTYVWQVLKENGPMASDPPCLTYSYLSHVDLVKDLNSGLIGALLVCREGSLAKEKTQTQAKFILLFAVFDEGKSWHSETKNSLMQDRDAASARAWPKMHTVNGYVNRTLPGLIGCHRKSVYWHVIGMGTTPEVHSIFLEGHTFLVRNHRQASLGISPITFLTAQTLLRDLGQFLLFCHIPSHQHDGMEAYVKVDSCPEEPQLRMKNNEEAEDYDDDLTDSEMDVVRFDDDNSPSIIQARSGAKKHPKTWVHYIAAEEEDWDYAPLVLAPDDRSYKSQYLNNGPQRIGRKYKKVRFMAYTDETFKTREAIQHESGILGPLLYGEVGDTLLIIFKNQASRPYNIYPHGITDVRPLYSRRLPKGVKHLKDFPILPGEIFKYKWTVTVEDGPTKSDPRCLTRYYSSFVNWERDLASGLIGPLLICYKESVDQRGNQIMSDKRNVILFSVFDENRSWYLTENIQRFLPNEAGVQLEDPEFQASNIMHSINGYVFDSLQLSVCLHEVAYWYILSIGAQTDFLSVFFSGYTFKHKNVYEDTLTLFPFSGETVFMSMENPGLWILGCHNSDFRNRGMTALLKVSSCDWNTGDYYEDSYEDISAYFDSKNNAIEPRSFSQNPPVLKRHQREGTRTTLQSDQEEIDYDDTISVEMKKEDFDIYDEDENQSPRSFQKKTRHYFIAAVERLWDYGMSSSPHVLRNRAQSGSVPQFKKVVFQEFTDGSFTQPLYRGELNEHLGLLGPYIRAEVEDNIMVTFRNQASRPYSFYSSLISYEEDQRQGAEPRKNFVKPNETKTYFWKVQHHMAPTKDEFDCKAWAYFSDVDLEKDVHSGLIGPLLVCHTNTLNPAHGRQVTVQEFALFFTIFDETKSWYFTENMERNCRAPCNIQMEDPTFKENYRFHAINGYIMDTLPGLVMAQDQRIRWYLLSMGSNENIHSIHFSGHVFTVRKKEEYKMALYNLYPGVFETVEMLPSKAGIWRVECLIGEHLHAGMSTLFLVYSNKCQNPLGMASGHIRDFQITASGQYGQWAPKLARLHYSGSINAWSTKEPFSWIKVDLLAPMIIHGIKTQGARQKFSSLYISQFIIMYSLDGKKWQTYRGNSTGTDMVFFGNVDSSGIKHNIFNPPIIARYIRLHPTHYSIRSTLRMELMGCDLNSCSMPLGMESKAISDAQITASSYFTNMFATWSPSKARLHLQGRSNAWRPQVNNPKEWLQVDFQKTMKVTGVTTQGVKSLDTSMYVKEFLISSSQDGHQWTLFFQNGKVKVFQGNQDSFTPVVNSLDPPLLTRYLRIHPQSWEHQIALRMEVLGCEAQDLY

SEQ ID NO: 1523 - DNA, 4371 bp, synthetic construct
  misc_feature 1..4371: note = Variant of human B-domain deleted Factor VIII
  source 1..4371: mol_type = other DNA
atgcagattgaactgtctacctgcttcttcctctgtttgctgaggttctgctttagcgccactagacggtactaccttggcgctgtggagctgtcctgggactatatgcagagtgatttgggagagcttcccgtcgacgcacgatttcctcctcgcgttccaaagtcatttccctttaacacaagccaggtgtacaagaagacgctcttcgtcgaattcaccgatcacctgttcaatatcgccaaacccagaccaccatggatgggtcttttggggcctaccatacaagcggaggtgtatgacacagttgttatcactctcaagaacatggcttctcatccggtaagtcttcacgcagtgggcgtgtcctactggaaagcttcagaaggagccgagtatgatgatcagacatcccagagggagaaagaagacgacaaggtatttccaggtgggtctcatacctatgtgtggcaagtgctcaaagagaatggccctatggcaagcgatccgccgtgtttgacttacagctacctttcacacgttgacctcgtcaaggacctcaactccgggttgattggagccttgttggtatgcagggaaggatctcttgccaaagagaagacacagaccctggccaagtttatccttctctttgctgtgttcgatgagggcaaaagttggcatagcgaaacgaagaattccctcatgcaggatcgcgacgcagccagcgccagagcttggcccaagatgcacactgtgaacggatatgtcaataggacgcttcctggcttgattgggtgtcatcggaaaagtgtctactggcacgtgatcggaatggggacaacaccagaggtccactccatatttctcgaaggccataccttccttgttcgaaaccacagacaggcatccttggggatctctcccattacctttctcactgcccaaacgctccttatggacttgggtcagttccttctcttttgccatatcccgtcacaccagcatgatggtatggaagcttatgtgaaagtcgacagttgtcctgaggagccacagttgcgcatgaagaataatgaagaagccgaggattacgacgacgatctcaccgattctgagatggacgtggtgaggtttgatgacgacaactctccctccatcattcaagctcggagcggggcgaagaaacaccccaagacttgggtccactatatagcggcggaagaggaggattgggattacgctcctcttgtattggcaccagatgaccgctcatacaaaagccagtacctcaacaacggaccgcagagaattggccggaagtataagaaagtgcgatttatggcctatacagacgaaacctttaagacaagggaggccatccagcatgagagtgggattttgggacctcttctttacggcgaagttggtgataccctcctcatcatcttcaagaatcaagcttctcgcccctataacatttacccacacgggatcactgacgttaggcctttgtatagcagaagacttcccaaaggcgtgaagcatctcaaagacttccccattttgccaggcgagatctttaagtacaaatggaccattacagtggaagatggaccgactaaatcagaccctcgatgccttacgcggtactattcctccttcgtgaattgggagagagatttggcaagcggactcataggaccactcctcatctgttacaaggaatctgtagaccagaggggtaaccagattatgagtgataaacgcaatgtgatcctttttagcgtcttcgacgagaaccggtcctggtacttgaccgagaatatacaaaggttccttcccaaccccgcaggcgttcagttggaagaccctgagtttcaggccagcaatattatgcactcaatcaacggctatgtgtttgatagtctccagctttctgtttgcctccatgaagtagcctattggtacatcttgtcaattggtgctcaaacagacttcctctccgtcttcttctccggctacacctttaagcacaagaacgtgtatgaggacactctcacactctttccattttctggagaaaccgtgttcatgagcatggagaatccaggcctttggatcttgggttgccacaacagtgattttcgcaatcggggaatgactgctctcctcaaagtcagcagctgtgattggaacacaggcgactattacgaagattcttacgaggacataagtgcctactttgactccaagaataacgccattgagcccagatcattctcccagaatcctcccgtgcttaaaaggcatcagcgcgaaggtaccagaactactcttcagtctgatcaagaggagattgactatgacgacaccattagcgtggaatggaagaaggaggatttcgatatctatgacgaagatgagaaccagtctccgcggagctttcagaagaagacgcgacactacttcattgcagcagtcgaaaggctttgggactacggtatgtcatcatcgcctcatgtgttgcgcaatagagctcagagtggaagtgttccacagttcaagaaagtcgtctttcaagagtttacagatggcagcttcacacagcctctctatcggggcgagcttaacgaacatttgggactccttggtccctatatccgagccgaagtggaggacaacattatggttacctttaggaatcaagcctctcgcccctacagcttctactcctccctcatcagttatgaggaggatcagagacaaggcgctgaaccacggaagaactttgtgaaaccgaatgagacgaagacctacttctggaaagtacagcaccacatggcccccacaaaagacgaattcgattgcaaagcatgggcgtatttttcagacgttgacttggagaaagatgtacattcaggacttattggtcctttgttggtgtgtcacactaacactctcaatccagcccatggcaggcaggtgacagtccaggaattcgctcttttctttaccatctttgatgagaccaagtcctggtacttcacggaaaacatggagcgcaattgcagagccccctgtaacatacagatggaggaccctacctttaaggaaaattatcggttccacgcaatcaacggatacattatggatacactccctggccttgtgatggctcaggaccaacgaatcaggtggtacctcctcagcatgggttctaatgagaacatacactccattcacttttcaggacatgtgttcactgtccggaagaaagaagagtataagatggccctctacaatttgtatccaggcgtgtttgagaccgttgaaatgcttccctctaaagctggcatctggagagtagagtgcttgatcggagaacatcttcacgcaggtatgagcaccttgttcctcgtgtacagcaacaaatgtcagaatccacttggcatggccagtggacacattcgcgactttcagatcacagcatctggccagtatggacaatgggccccaaagttggctcgcctccattactccggtagcataaatgcgtggtccactaaagaacctttcagctggattaaggtcgatcttcttgcccccatgatcatccacggcattaagacacagggagcgaggcagaaattctcctccctctacatctcacagttcattattatgtatagtttggacggcaagaagtggcaaacttatagaggtaacagtactggaacagacatggtgttcttcggcaacgttgatagctctggcatcaaacacaacatctttaatcctcccataatagctcggtacatcagattgcatccgacccactacagcattaggagtacactccgaatggagcttatgggttgcgacttgaattcctgttcaatgccactcggaatggagtctaaagccatctctgatgcacagataaccgccagtagctactttacgaacatgtttgctacgtggtcaccctctaaggcaaggcttcatttgcaaggccggtctaatgcctggagacctcaggtgaacaacccgaaagaatggctccaggtggactttcagaagaccatgaaagtaacaggtgtcactactcagggagttaagtccttggatactagcatgtatgtgaaggagttccttatttcctcatcacaagatggccaccagtggaccctcttctttcagaatggtaaggtcaaagtgtttcagggcaatcaagacagcttcacacccgtggtgaacagtcttgatcctccactcttgacacgataccttcgaatccatccacagtcttgggagcaccagattgcattgcgcatggaagtacttggatgcgaggctcaggacctctac

SEQ ID NO: 1524 - protein, 1457 aa, synthetic construct
  REGION 1..1457: note = Variant of human B-domain deleted Factor VIII
MQIELSTCFFLCLLRFCFSATRRYYLGAVELSWDYMQSDLGELPVDARFPPRVPKSFPFNTSQVYKKTLFVEFTDHLFNIAKPRPPWMGLLGPTIQAEVYDTVVITLKNMASHPVSLHAVGVSYWKASEGAEYDDQTSQREKEDDKVFPGGSHTYVWQVLKENGPMASDPPCLTYSYLSHVDLVKDLNSGLIGALLVCREGSLAKEKTQTLAKFILLFAVFDEGKSWHSETKNSLMQDRDAASARAWPKMHTVNGYVNRTLPGLIGCHRKSVYWHVIGMGTTPEVHSIFLEGHTFLVRNHRQASLGISPITFLTAQTLLMDLGQFLLFCHIPSHQHDGMEAYVKVDSCPEEPQLRMKNNEEAEDYDDDLTDSEMDVVRFDDDNSPSIIQARSGAKKHPKTWVHYIAAEEEDWDYAPLVLAPDDRSYKSQYLNNGPQRIGRKYKKVRFMAYTDETFKTREAIQHESGILGPLLYGEVGDTLLIIFKNQASRPYNIYPHGITDVRPLYSRRLPKGVKHLKDFPILPGEIFKYKWTITVEDGPTKSDPRCLTRYYSSFVNWERDLASGLIGPLLICYKESVDQRGNQIMSDKRNVILFSVFDENRSWYLTENIQRFLPNPAGVQLEDPEFQASNIMHSINGYVFDSLQLSVCLHEVAYWYILSIGAQTDFLSVFFSGYTFKHKNVYEDTLTLFPFSGETVFMSMENPGLWILGCHNSDFRNRGMTALLKVSSCDWNTGDYYEDSYEDISAYFDSKNNAIEPRSFSQNPPVLKRHQREGTRTTLQSDQEEIDYDDTISVEWKKEDFDIYDEDENQSPRSFQKKTRHYFIAAVERLWDYGMSSSPHVLRNRAQSGSVPQFKKVVFQEFTDGSFTQPLYRGELNEHLGLLGPYIRAEVEDNIMVTFRNQASRPYSFYSSLISYEEDQRQGAEPRKNFVKPNETKTYFWKVQHHMAPTKDEFDCKAWAYFSDVDLEKDVHSGLIGPLLVCHTNTLNPAHGRQVTVQEFALFFTIFDETKSWYFTENMERNCRAPCNIQMEDPTFKENYRFHAINGYIMDTLPGLVMAQDQRIRWYLLSMGSNENIHSIHFSGHVFTVRKKEEYKMALYNLYPGVFETVEMLPSKAGIWRVECLIGEHLHAGMSTLFLVYSNKCQNPLGMASGHIRDFQITASGQYGQWAPKLARLHYSGSINAWSTKEPFSWIKVDLLAPMIIHGIKTQGARQKFSSLYISQFIIMYSLDGKKWQTYRGNSTGTDMVFFGNVDSSGIKHNIFNPPIIARYIRLHPTHYSIRSTLRMELMGCDLNSCSMPLGMESKAISDAQITASSYFTNMFATWSPSKARLHLQGRSNAWRPQVNNPKEWLQVDFQKTMKVTGVTTQGVKSLDTSMYVKEFLISSSQDGHQWTLFFQNGKVKVFQGNQDSFTPVVNSLDPPLLTRYLRIHPQSWEHQIALRMEVLGCEAQDLY

SEQ ID NO: 1525 - DNA, 4371 bp, synthetic construct
  misc_feature 1..4371: note = Variant of human B-domain deleted Factor VIII
  source 1..4371: mol_type = other DNA
atgcagattgaactgtctacctgcttcttcctctgtttgctgaggttctgctttagcgccactagacggtactaccttggcgctgtggagctgtcctgggactatatgcagagtgatttgggagagcttcccgtcgacgcacgatttcctcctcgcgttccaaagtcatttccctttaacacaagccaggtgtacaagaagacgctcttcgtcgaattcaccgatcacctgttcaatatcgccaaacccagaccaccatggatgggtcttttggggcctaccatacaagcggaggtgtatgacacagttgttatcactctcaagaacatggcttctcatccggtaagtcttcacgcagtgggcgtgtcctactggaaagcttcagaaggagccgagtatgatgatcagacatcccagagggagaaagaagacgacaaggtatttccaggtgggtctcatacctatgtgtggcaagtgctcaaagagaatggccctatggcaagcgatccgccgtgtttgacttacagctacctttcacacgttgacctcgtcaaggacctcaactccgggttgattggagccttgttggtatgcagggaaggatctcttgccaaagagaagacacagaccctggccaagtttatccttctctttgctgtgttcgatgagggcaaaagttggcatagcgaaacgaagaattccctcatgcaggatcgcgacgcagccagcgccagagcttggcccaagatgcacactgtgaacggatatgtcaataggacgcttcctggcttgattgggtgtcatcggaaaagtgtctactggcacgtgatcggaatggggacaacaccagaggtccactccatatttctcgaaggccataccttccttgttcgaaaccacagacaggcatccttggggatctctcccattacctttctcactgcccaaacgctccttcgtgacttgggtcagttccttctcttttgccatatcccgtcacaccagcatgatggtatggaagcttatgtgaaagtcgacagttgtcctgaggagccacagttgcgcatgaagaataatgaagaagccgaggattacgacgacgatctcaccgattctgagatggacgtggtgaggtttgatgacgacaactctccctccatcattcaagctcggagcggggcgaagaaacaccccaagacttgggtccactatatagcggcggaagaggaggattgggattacgctcctcttgtattggcaccagatgaccgctcatacaaaagccagtacctcaacaacggaccgcagagaattggccggaagtataagaaagtgcgatttatggcctatacagacgaaacctttaagacaagggaggccatccagcatgagagtgggattttgggacctcttctttacggcgaagttggtgataccctcctcatcatcttcaagaatcaagcttctcgcccctataacatttacccacacgggatcactgacgttaggcctttgtatagcagaagacttcccaaaggcgtgaagcatctcaaagacttccccattttgccaggcgagatctttaagtacaaatggaccattacagtggaagatggaccgactaaatcagaccctcgatgccttacgcggtactattcctccttcgtgaatatggagagagatttggcaagcggactcataggaccactcctcatctgttacaaggaatctgtagaccagaggggtaaccagattatgagtgataaacgcaatgtgatcctttttagcgtcttcgacgagaaccggtcctggtacttgaccgagaatatacaaaggttccttcccaaccctgcaggggttcagttggaagaccctgagtttcaggccagcaatattatgcactcaatcaacggctatgtgtttgatagtctccagctttctgtttgcctccatgaagtagcctattggtacatcttgtcaattggtgctcaaacagacttcctctccgtcttcttctccggctacacctttaagcacaagatggtgtatgaggacactctcacactctttccattttctggagaaaccgtgttcatgagcatggagaatccaggcctttggatcttgggttgccacaacagtgattttcgcaatcggggaatgactgctctcctcaaagtcagcagctgtgattggaacacaggcgactattacgaagattcttacgaggacataagtgcctactttgactccaagaataacgccattgagcccagatcattctcccagaatcctcccgtgcttaaaaggcatcagcgcgaaggtaccagaactactcttcagtctgatcaagaggagattgactatgacgacaccattagcgtggaaatgaagaaggaggatttcgatatctatgacgaagatgagaaccagtctccgcggagctttcagaagaagacgcgacactacttcattgcagcagtcgaaaggctttgggactacggtatgtcatcatcgcctcatgtgttgcgcaatagagctcagagtggaagtgttccacagttcaagaaagtcgtctttcaagagtttacagatggcagcttcacacagcctctctatcggggcgagcttaacgaacatttgggactccttggtccctatatccgagccgaagtggaggacaacattatggttacctttaggaatcaagcctctcgcccctacagcttctactcctccctcatcagttatgaggaggatcagagacaaggcgctgaaccacggaagaactttgtgaaaccgaatgagacgaagacctacttctggaaagtacagcaccacatggcccccacaaaagacgaattcgattgcaaagcatgggcgtatttttcagacgttgacttggagaaagatgtacattcaggacttattggtcctttgttggtgtgtcacactaacactctcaatccagcccatggcaggcaggtgacagtccaggaattcgctcttttctttaccatctttgatgagaccaagtcctggtacttcacggaaaacatggagcgcaattgcagagccccctgtaacatacagatggaggaccctacctttaaggaaaattatcggttccacgcaatcaacggatacattatggatacactccctggccttgtgatggctcaggaccaacgaatcaggtggtacctcctcagcatgggttctaatgagaacatacactccattcacttttcaggacatgtgttcactgtccggaagaaagaagagtataagatggccctctacaatttgtatccaggcgtgtttgagaccgttgaaatgcttccctctaaagctggcatctggagagtagagtgcttgatcggagaacatcttcacgcaggtatgagcaccttgttcctcgtgtacagcaacaaatgtcagaatccacttggcatggccagtggacacattcgcgactttcagatcacagcatctggccagtatggacaatgggccccaaagttggctcgcctccattactccggtagcataaatgcgtggtccactaaagaacctttcagctggattaaggtcgatcttcttgcccccatgatcatccacggcattaagacacagggagcgaggcagaaattctcctccctctacatctcacagttcattattatgtatagtttggacggcaagaagtggcaaacttatagaggtaacagtactggaacagacatggtgttcttcggcaacgttgatagctctggcatcaaacacaacatctttaatcctcccataatagctcggtacatcagattgcatccgacccactacagcattaggagtacactccgaatggagcttatgggttgcgacttgaattcctgttcaatgccactcggaatggagtctaaagccatctctgatgcacagataaccgccagtagctactttacgaacatgtttgctacgtggtcaccctctaaggcaaggcttcatttgcaaggccggtctaatgcctggagacctcaggtgaacaacccgaaagaatggctccaggtggactttcagaagaccatgaaagtaacaggtgtcactactcagggagttaagtccttggatactagcatgtatgtgaaggagttccttatttcctcatcacaagatggccaccagtggaccctcttctttcagaatggtaaggtcaaagtgtttcagggcaatcaagacagcttcacacccgtggtgaacagtcttgatcctccactcttgacacgataccttcgaatccatccacagtcttgggagcaccagattgcattgcgcatggaagtacttggatgcgaggctcaggacctctac

SEQ ID NO: 1526 - protein, 1457 aa, synthetic construct
  REGION 1..1457: note = Variant of human B-domain deleted Factor VIII
MQIELSTCFFLCLLRFCFSATRRYYLGAVELSWDYMQSDLGELPVDARFPPRVPKSFPFNTSQVYKKTLFVEFTDHLFNIAKPRPPWMGLLGPTIQAEVYDTVVITLKNMASHPVSLHAVGVSYWKASEGAEYDDQTSQREKEDDKVFPGGSHTYVWQVLKENGPMASDPPCLTYSYLSHVDLVKDLNSGLIGALLVCREGSLAKEKTQTLAKFILLFAVFDEGKSWHSETKNSLMQDRDAASARAWPKMHTVNGYVNRTLPGLIGCHRKSVYWHVIGMGTTPEVHSIFLEGHTFLVRNHRQASLGISPITFLTAQTLLRDLGQFLLFCHIPSHQHDGMEAYVKVDSCPEEPQLRMKNNEEAEDYDDDLTDSEMDVVRFDDDNSPSIIQARSGAKKHPKTWVHYIAAEEEDWDYAPLVLAPDDRSYKSQYLNNGPQRIGRKYKKVRFMAYTDETFKTREAIQHESGILGPLLYGEVGDTLLIIFKNQASRPYNIYPHGITDVRPLYSRRLPKGVKHLKDFPILPGEIFKYKWTITVEDGPTKSDPRCLTRYYSSFVNMERDLASGLIGPLLICYKESVDQRGNQIMSDKRNVILFSVFDENRSWYLTENIQRFLPNPAGVQLEDPEFQASNIMHSINGYVFDSLQLSVCLHEVAYWYILSIGAQTDFLSVFFSGYTFKHKMVYEDTLTLFPFSGETVFMSMENPGLWILGCHNSDFRNRGMTALLKVSSCDWNTGDYYEDSYEDISAYFDSKNNAIEPRSFSQNPPVLKRHQREGTRTTLQSDQEEIDYDDTISVEMKKEDFDIYDEDENQSPRSFQKKTRHYFIAAVERLWDYGMSSSPHVLRNRAQSGSVPQFKKVVFQEFTDGSFTQPLYRGELNEHLGLLGPYIRAEVEDNIMVTFRNQASRPYSFYSSLISYEEDQRQGAEPRKNFVKPNETKTYFWKVQHHMAPTKDEFDCKAWAYFSDVDLEKDVHSGLIGPLLVCHTNTLNPAHGRQVTVQEFALFFTIFDETKSWYFTENMERNCRAPCNIQMEDPTFKENYRFHAINGYIMDTLPGLVMAQDQRIRWYLLSMGSNENIHSIHFSGHVFTVRKKEEYKMALYNLYPGVFETVEMLPSKAGIWRVECLIGEHLHAGMSTLFLVYSNKCQNPLGMASGHIRDFQITASGQYGQWAPKLARLHYSGSINAWSTKEPFSWIKVDLLAPMIIHGIKTQGARQKFSSLYISQFIIMYSLDGKKWQTYRGNSTGTDMVFFGNVDSSGIKHNIFNPPIIARYIRLHPTHYSIRSTLRMELMGCDLNSCSMPLGMESKAISDAQITASSYFTNMFATWSPSKARLHLQGRSNAWRPQVNNPKEWLQVDFQKTMKVTGVTTQGVKSLDTSMYVKEFLISSSQDGHQWTLFFQNGKVKVFQGNQDSFTPVVNSLDPPLLTRYLRIHPQSWEHQIALRMEVLGCEAQDLY

SEQ ID NO: 1527 - DNA, 4371 bp, synthetic construct
  misc_feature 1..4371: note = Variant of human B-domain deleted Factor VIII
  source 1..4371: mol_type = other DNA
atgcagattgaactgtctacctgcttcttcctctgtttgctgaggttctgctttagcgccactagacggtactaccttggcgctgtggagctgtcctgggactatatgcagagtgatttgggagagcttcccgtcgacgcacgatttcctcctcgcgttccaaagtcatttccctttaacacaagccaggtgtacaagaagacgctcttcgtcgaattcaccgatcacctgttcaatatcgccaaacccagaccaccatggatgggtcttttggggcctaccatacaagcggaggtgtatgacacagttgttatcactctcaagaacatggcttctcatccggtaagtcttcacgcagtgggcgtgtcctactggaaagcttcagaaggagccgagtatgatgatcagacatcccagagggagaaagaagacgacaaggtatttccaggtgggtctcatacctatgtgtggcaagtgctcaaagagaatggccctatggcaagcgatccgccgtgtttgacttacagctacctttcacacgttgacctcgtcaaggacctcaactccgggttgattggagccttgttggtatgcagggaaggatctcttgccaaagagaagacacagaccaaacacaagtttatccttctctttgctgtgttcgatgagggcaaaagttggcatagcgaaacgaagaattccctcatgcaggatcgcgacgcagccagcgccagagcttggcccaagatgcacactgtgaacggatatgtcaataggacgcttcctggcttgattgggtgtcatcggaaaagtgtctactggcacgtgatcggaatggggacaacaccagaggtccactccatatttctcgaaggccataccttccttgttcgaaaccacagacaggcatccttggggatctctcccattaccctgctcactgcccaaacgctccttatggacttgggtcagttccttctcttttgccatatcccgtcacaccagcatgatggtatggaagcttatgtgaaagtcgacagttgtcctgaggagccacagttgcgcatgaagaataatgaagaagccgaggattacgacgacgatctcaccgattctgagatggacgtggtgaggtttgatgacgacaactctccctccatcattcaagctcggagcggggcgaagaaacaccccaagacttgggtccactatatagcggcggaagaggaggattgggattacgctcctcttgtattggcaccagatgaccgctcatacaaaagccagtacctcaacaacggaccgcagagaattggccggaagtataagaaagtgcgatttatggcctatacagacgaaacctttaagacaagggaggccatccagcatgagagtgggattttgggacctcttctttacggcgaagttggtgataccctcctcatcatcttcaagaatcaagcttctcgcccctataacatttacccacacgggatcactgacgttaggcctttgtatagcagaagacttcccaaaggcgtgaagcatctcaaagacttccccattttgccaggcgagatctttaagtacaaatggaccgttacagtggaagatggaccgactaaatcagaccctcgatgccttacgcggtactattcctccttcgtgaatatggagagagatttggcaagcggactcataggaccactcctcatctgttacaaggaatctgtagaccagaggggtaaccagattatgagtgataaacgcaatgtgatcctttttagcgtcttcgacgagaaccggtcctggtacttgaccgagaatatacaaaggttccttcccaaccctgcagaggttcagttggaagaccctgagtttcaggccagcaatattatgcactcaatcaacggctatgtgtttgatagtctccagctttctgtttgcctccatgaagtagcctattggtacatcttgtcaattggtgctcaaacagacttcctctccgtcttcttctccggctacacctttaagcacaagatggtgtatgaggacactctcacactctttccattttctggagaaaccgtgttcatgagcatggagaatccaggcctttggatcttgggttgccacaacagtgattttcgcaatcggggaatgactgctctcctcaaagtcagcagctgtgattggaacacaggcgactattacgaagattcttacgaggacataagtgcctactttgactccaagaataacgccattgagcccagatcattctcccagaatcctcccgtgcttaaaaggcatcagcgcgaaggtaccagaactactcttcagtctgatcaagaggagattgactatgacgacaccattagcgtggaaatgaagaaggaggatttcgatatctatgacgaagatgagaaccagtctccgcggagctttcagaagaagacgcgacactacttcattgcagcagtcgaaaggctttgggactacggtatgtcatcatcgcctcatgtgttgcgcaatagagctcagagtggaagtgttccacagttcaagaaagtcgtctttcaagagtttacagatggcagcttcacacagcctctctatcggggcgagcttaacgaacatttgggactccttggtccctatatccgagccgaagtggaggacaacattatggttacctttaggaatcaagcctctcgcccctacagcttctactcctccctcatcagttatgaggaggatcagagacaaggcgctgaaccacggaagaactttgtgaaaccgaatgagacgaagacctacttctggaaagtacagcaccacatggcccccacaaaagacgaattcgattgcaaagcatgggcgtatttttcagacgttgacttggagaaagatgtacattcaggacttattggtcctttgttggtgtgtcacactaacactctcaatccagcccatggcaggcaggtgacagtccaggaattcgctcttttctttaccatctttgatgagaccaagtcctggtacttcacggaaaacatggagcgcaattgcagagccccctgtaacatacagatggaggaccctacctttaaggaaaattatcggttccacgcaatcaacggatacattatggatacactccctggccttgtgatggctcaggaccaacgaatcaggtggtacctcctcagcatgggttctaatgagaacatacactccattcacttttcaggacatgtgttcactgtccggaagaaagaagagtataagatggccctctacaatttgtatccaggcgtgtttgagaccgttgaaatgcttccctctaaagctggcatctggagagtagagtgcttgatcggagaacatcttcacgcaggtatgagcaccttgttcctcgtgtacagcaacaaatgtcagaatccacttggcatggccagtggacacattcgcgactttcagatcacagcatctggccagtatggacaatgggccccaaagttggctcgcctccattactccggtagcataaatgcgtggtccactaaagaacctttcagctggattaaggtcgatcttcttgcccccatgatcatccacggcattaagacacagggagcgaggcagaaattctcctccctctacatctcacagttcattattatgtatagtttggacggcaagaagtggcaaacttatagaggtaacagtactggaacagacatggtgttcttcggcaacgttgatagctctggcatcaaacacaacatctttaatcctcccataatagctcggtacatcagattgcatccgacccactacagcattaggagtacactccgaatggagcttatgggttgcgacttgaattcctgttcaatgccactcggaatggagtctaaagccatctctgatgcacagataaccgccagtagctactttacgaacatgtttgctacgtggtcaccctctaaggcaaggcttcatttgcaaggccggtctaatgcctggagacctcaggtgaacaacccgaaagaatggctccaggtggactttcagaagaccatgaaagtaacaggtgtcactactcagggagttaagtccttggatactagcatgtatgtgaaggagttccttatttcctcatcacaagatggccaccagtggaccctcttctttcagaatggtaaggtcaaagtgtttcagggcaatcaagacagcttcacacccgtggtgaacagtcttgatcctccactcttgacacgataccttcgaatccatccacagtcttgggagcaccagattgcattgcgcatggaagtacttggatgcgaggctcaggacctctac

SEQ ID NO: 1528 - protein, 1457 aa, synthetic construct
  REGION 1..1457: note = Variant of human B-domain deleted Factor VIII
MQIELSTCFFLCLLRFCFSATRRYYLGAVELSWDYMQSDLGELPVDARFPPRVPKSFPFNTSQVYKKTLFVEFTDHLFNIAKPRPPWMGLLGPTIQAEVYDTVVITLKNMASHPVSLHAVGVSYWKASEGAEYDDQTSQREKEDDKVFPGGSHTYVWQVLKENGPMASDPPCLTYSYLSHVDLVKDLNSGLIGALLVCREGSLAKEKTQTKHKFILLFAVFDEGKSWHSETKNSLMQDRDAASARAWPKMHTVNGYVNRTLPGLIGCHRKSVYWHVIGMGTTPEVHSIFLEGHTFLVRNHRQASLGISPITLLTAQTLLMDLGQFLLFCHIPSHQHDGMEAYVKVDSCPEEPQLRMKNNEEAEDYDDDLTDSEMDVVRFDDDNSPSIIQARSGAKKHPKTWVHYIAAEEEDWDYAPLVLAPDDRSYKSQYLNNGPQRIGRKYKKVRFMAYTDETFKTREAIQHESGILGPLLYGEVGDTLLIIFKNQASRPYNIYPHGITDVRPLYSRRLPKGVKHLKDFPILPGEIFKYKWTVTVEDGPTKSDPRCLTRYYSSFVNMERDLASGLIGPLLICYKESVDQRGNQIMSDKRNVILFSVFDENRSWYLTENIQRFLPNPAEVQLEDPEFQASNIMHSINGYVFDSLQLSVCLHEVAYWYILSIGAQTDFLSVFFSGYTFKHKMVYEDTLTLFPFSGETVFMSMENPGLWILGCHNSDFRNRGMTALLKVSSCDWNTGDYYEDSYEDISAYFDSKNNAIEPRSFSQNPPVLKRHQREGTRTTLQSDQEEIDYDDTISVEMKKEDFDIYDEDENQSPRSFQKKTRHYFIAAVERLWDYGMSSSPHVLRNRAQSGSVPQFKKVVFQEFTDGSFTQPLYRGELNEHLGLLGPYIRAEVEDNIMVTFRNQASRPYSFYSSLISYEEDQRQGAEPRKNFVKPNETKTYFWKVQHHMAPTKDEFDCKAWAYFSDVDLEKDVHSGLIGPLLVCHTNTLNPAHGRQVTVQEFALFFTIFDETKSWYFTENMERNCRAPCNIQMEDPTFKENYRFHAINGYIMDTLPGLVMAQDQRIRWYLLSMGSNENIHSIHFSGHVFTVRKKEEYKMALYNLYPGVFETVEMLPSKAGIWRVECLIGEHLHAGMSTLFLVYSNKCQNPLGMASGHIRDFQITASGQYGQWAPKLARLHYSGSINAWSTKEPFSWIKVDLLAPMIIHGIKTQGARQKFSSLYISQFIIMYSLDGKKWQTYRGNSTGTDMVFFGNVDSSGIKHNIFNPPIIARYIRLHPTHYSIRSTLRMELMGCDLNSCSMPLGMESKAISDAQITASSYFTNMFATWSPSKARLHLQGRSNAWRPQVNNPKEWLQVDFQKTMKVTGVTTQGVKSLDTSMYVKEFLISSSQDGHQWTLFFQNGKVKVFQGNQDSFTPVVNSLDPPLLTRYLRIHPQSWEHQIALRMEVLGCEAQDLY

SEQ ID NO: 1529 - DNA, 4371 bp, synthetic construct
  misc_feature 1..4371: note = Variant of human B-domain deleted Factor VIII
  source 1..4371: mol_type = other DNA
atgcagattgaactgtctacctgcttcttcctctgtttgctgaggttctgctttagcgccactagacggtactaccttggcgctgtggagctgtcctgggactatatgcagagtgatttgggagagcttcccgtcgacgcacgatttcctcctcgcgttccaaagtcatttccctttaacacaagccaggtgtacaagaagacgctcttcgtcgaattcaccgatcacctgttcaatatcgccaaacccagaccaccatggatgggtcttttggggcctaccatacaagcggaggtgtatgacacagttgttatcactctcaagaacatggcttctcatccggtaagtcttcacgcagtgggcgtgtcctactggaaagcttcagaaggagccgagtatgatgatcagacatcccagagggagaaagaagacgacaaggtatttccaggtgggtctcatacctatgtgtggcaagtgctcaaagagaatggccctatggcaagcgatccgccgtgtttgacttacagctacctttcacacgttgacctcgtcaaggacctcaactccgggttgattggagccttgttggtatgcagggaaggatctcttgccaaagagaagacacagaccctggccaagtttatccttctctttgctgtgttcgatgagggcaaaagttggcatagcgaaacgaagaattccctcatgcaggatcgcgacgcagccagcgccagagcttggcccaagatgcacactgtgaacggatatgtcaataggacgcttcctggcttgattgggtgtcatcggaaaagtgtctactggcacgtgatcggaatggggacaacaccagaggtccactccatatttctcgaaggccataccttccttgttcgaaaccacagacaggcatccttggggatctctcccattaccctgctcactgcccaaacgctccttatggacttgggtcagttccttctcttttgccatatcccgtcacaccagcatgatggtatggaagcttatgtgaaagtcgacagttgtcctgaggagccacagttgcgcatgaagaataatgaagaagccgaggattacgacgacgatctcaccgattctgagatggacgtggtgaggtttgatgacgacaactctccctccatcattcaagctcggagcggggcgaagaaacaccccaagacttgggtccactatatagcggcggaagaggaggattgggattacgctcctcttgtattggcaccagatgaccgctcatacaaaagccagtacctcaacaacggaccgcagagaattggccggaagtataagaaagtgcgatttatggcctatacagacgaaacctttaagacaagggaggccatccagcatgagagtgggattttgggacctcttctttacggcgaagttggtgataccctcctcatcatcttcaagaatcaagcttctcgcccctataacatttacccacacgggatcactgacgttaggcctttgtatagcagaagacttcccaaaggcgtgaagcatctcaaagacttccccattttgccaggcgagatctttaagtacaaatggaccgttacagtggaagatggaccgactaaatcagaccctcgatgccttacgcggtactattcctccttcgtgaatatggagagagatttggcaagcggactcataggaccactcctcatctgttacaaggaatctgtagaccagaggggtaaccagattatgagtgataaacgcaatgtgatcctttttagcgtcttcgacgagaaccggtcctggtacttgaccgagaatatacaaaggttccttcccaaccctgcagaggttcagttggaagaccctgagtttcaggccagcaatattatgcactcaatcaacggctatgtgtttgatagtctccagctttctgtttgcctccatgaagtagcctattggtacatcttgtcaattggtgctcaaacagacttcctctccgtcttcttctccggctacacctttaagcacaagatggtgtatgaggacactctcacactctttccattttctggagaaaccgtgttcatgagcatggagaatccaggcctttggatcttgggttgccacaacagtgattttcgcaatcggggaatgactgctctcctcaaagtcagcagctgtgattggaacacaggcgactattacgaagattcttacgaggacataagtgcctactttgactccaagaataacgccattgagcccagatcattctcccagaatcctcccgtgcttaaaaggcatcagcgcgaaggtaccagaactactcttcagtctgatcaagaggagattgactatgacgacaccattagcgtggaaatgaagaaggaggatttcgatatctatgacgaagatgagaaccagtctccgcggagctttcagaagaagacgcgacactacttcattgcagcagtcgaaaggctttgggactacggtatgtcatcaaaacctcatgtgttgcgcaatagagctcagagtggaagtgttccacagttcaagaaagtcgtctttcaagagtttacagatggcagcttcacacagcctctctatcggggcgagcttaacgaacatttgggactccttggtccctatatccgagccgaagtggaggacaacattatggttacctttaggaatcaagcctctcgcccctacagcttctactcctccctcatcagttatgaggaggatcagagacaaggcgctgaaccacggaagaactttgtgaaaccgaatgagacgaagacctacttctggaaagtacagcaccacatggcccccacaaaagacgaattcgattgcaaagcatgggcgtatttttcagacgttgacttggagaaagatgtacattcaggacttattggtcctttgttggtgtgtcacactaacactctcaatccagcccatggcaggcaggtgacagtccaggaattcgctcttttctttaccatctttgatgagaccaagtcctggtacttcacggaaaacatggagcgcaattgcagagccccctgtaacatacagatggaggaccctacctttaaggaaaattatcggttccacgcaatcaacggatacattatggatacactccctggccttgtgatggctcaggaccaacgaatcaggtggtacctcctcagcatgggttctaatgagaacatacactccattcacttttcaggacatgtgttcactgtccggaagaaagaagagtataagatggccctctacaatttgtatccaggcgtgtttgagaccgttgaaatgcttccctctaaagctggcatctggagagtagagtgcttgatcggagaacatcttcacgcaggtatgagcaccttgttcctcgtgtacagcaacaaatgtcagaatccacttggcatggccagtggacacattcgcgactttcagatcacagcatctggccagtatggacaatgggccccaaagttggctcgcctccattactccggtagcataaatgcgtggtccactaaagaacctttcagctggattaaggtcgatcttcttgcccccatgatcatccacggcattaagacacagggagcgaggcagaaattctcctccctctacatctcacagttcattattatgtatagtttggacggcaagaagtggcaaacttatagaggtaacagtactggaacagacatggtgttcttcggcaacgttgatagctctggcatcaaacacaacatctttaatcctcccataatagctcggtacatcagattgcatccgacccactacagcattaggagtacactccgaatggagcttatgggttgcgacttgaattcctgttcaatgccactcggaatggagtctaaagccatctctgatgcacagataaccgccagtagctactttacgaacatgtttgctacgtggtcaccctctaaggcaaggcttcatttgcaaggccggtctaatgcctggagacctcaggtgaacaacccgaaagaatggctccaggtggactttcagaagaccatgaaagtaacaggtgtcactactcagggagttaagtccttggatactagcatgtatgtgaaggagttccttatttcctcatcacaagatggccaccagtggaccctcttctttcagaatggtaaggtcaaagtgtttcagggcaatcaagacagcttcacacccgtggtgaacagtcttgatcctccactcttgacacgataccttcgaatccatccacagtcttgggagcaccagattgcattgcgcatggaagtacttggatgcgaggctcaggacctctac

SEQ ID NO: 1530 - protein, 1457 aa, synthetic construct
  REGION 1..1457: note = Variant of human B-domain deleted Factor VIII
MQIELSTCFFLCLLRFCFSATRRYYLGAVELSWDYMQSDLGELPVDARFPPRVPKSFPFNTSQVYKKTLFVEFTDHLFNIAKPRPPWMGLLGPTIQAEVYDTVVITLKNMASHPVSLHAVGVSYWKASEGAEYDDQTSQREKEDDKVFPGGSHTYVWQVLKENGPMASDPPCLTYSYLSHVDLVKDLNSGLIGALLVCREGSLAKEKTQTLAKFILLFAVFDEGKSWHSETKNSLMQDRDAASARAWPKMHTVNGYVNRTLPGLIGCHRKSVYWHVIGMGTTPEVHSIFLEGHTFLVRNHRQASLGISPITLLTAQTLLMDLGQFLLFCHIPSHQHDGMEAYVKVDSCPEEPQLRMKNNEEAEDYDDDLTDSEMDVVRFDDDNSPSIIQARSGAKKHPKTWVHYIAAEEEDWDYAPLVLAPDDRSYKSQYLNNGPQRIGRKYKKVRFMAYTDETFKTREAIQHESGILGPLLYGEVGDTLLIIFKNQASRPYNIYPHGITDVRPLYSRRLPKGVKHLKDFPILPGEIFKYKWTVTVEDGPTKSDPRCLTRYYSSFVNMERDLASGLIGPLLICYKESVDQRGNQIMSDKRNVILFSVFDENRSWYLTENIQRFLPNPAEVQLEDPEFQASNIMHSINGYVFDSLQLSVCLHEVAYWYILSIGAQTDFLSVFFSGYTFKHKMVYEDTLTLFPFSGETVFMSMENPGLWILGCHNSDFRNRGMTALLKVSSCDWNTGDYYEDSYEDISAYFDSKNNAIEPRSFSQNPPVLKRHQREGTRTTLQSDQEEIDYDDTISVEMKKEDFDIYDEDENQSPRSFQKKTRHYFIAAVERLWDYGMSSKPHVLRNRAQSGSVPQFKKVVFQEFTDGSFTQPLYRGELNEHLGLLGPYIRAEVEDNIMVTFRNQASRPYSFYSSLISYEEDQRQGAEPRKNFVKPNETKTYFWKVQHHMAPTKDEFDCKAWAYFSDVDLEKDVHSGLIGPLLVCHTNTLNPAHGRQVTVQEFALFFTIFDETKSWYFTENMERNCRAPCNIQMEDPTFKENYRFHAINGYIMDTLPGLVMAQDQRIRWYLLSMGSNENIHSIHFSGHVFTVRKKEEYKMALYNLYPGVFETVEMLPSKAGIWRVECLIGEHLHAGMSTLFLVYSNKCQNPLGMASGHIRDFQITASGQYGQWAPKLARLHYSGSINAWSTKEPFSWIKVDLLAPMIIHGIKTQGARQKFSSLYISQFIIMYSLDGKKWQTYRGNSTGTDMVFFGNVDSSGIKHNIFNPPIIARYIRLHPTHYSIRSTLRMELMGCDLNSCSMPLGMESKAISDAQITASSYFTNMFATWSPSKARLHLQGRSNAWRPQVNNPKEWLQVDFQKTMKVTGVTTQGVKSLDTSMYVKEFLISSSQDGHQWTLFFQNGKVKVFQGNQDSFTPVVNSLDPPLLTRYLRIHPQSWEHQIALRMEVLGCEAQDLY

SEQ ID NO: 1531 - DNA, 4371 bp, synthetic construct
  misc_feature 1..4371: note = Variant of human B-domain deleted Factor VIII
  source 1..4371: mol_type = other DNA
atgcagattgaactgtctacctgcttcttcctctgtttgctgaggttctgctttagcgccactagacggtactaccttggcgctgtggagctgtcctgggactatatgcagagtgatttgggagagcttcccgtcgacgcacgatttcctcctcgcgttccaaagtcatttccctttaacacaagccaggtgtacaagaagacgctcttcgtcgaattcaccgatcacctgttcaatatcgccaaacccagaccaccatggatgggtcttttggggcctaccatacaagcggaggtgtatgacacagttgttatcactctcaagaacatggcttctcatccggtaagtcttcacgcagtgggcgtgtcctactggaaagcttcagaaggagccgagtatgatgatcagacatcccagagggagaaagaagacgacaaggtatttccaggtgggtctcatacctatgtgtggcaagtgctcaaagagaatggccctatggcaagcgatccgccgtgtttgacttacagctacctttcacacgttgacctcgtcaaggacctcaactccgggttgattggagccttgttggtatgcagggaaggatctcttgccaaagagaagacacagcccctggccaagtttatccttctctttgctgtgttcgatgagggcaaaagttggcatagcgaaacgaagaattccctcatgcaggatcgcgacgcagccagcgccagagcttggcccaagatgcacactgtgaacggatatgtcaataggacgcttcctggcttgattgggtgtcatcggaaaagtgtctactggcacgtgatcggaatggggacaacaccagaggtccactccatatttctcgaaggccataccttccttgttcgaaaccacagacaggcatccttggggatctctcccattaccttcctcactgcccaaacgctccttcgtgacttgggtcagttccttctcttttgccatatcccgtcacaccagcatgatggtatggaagcttatgtgaaagtcgacagttgtcctgaggagccacagttgcgcatgaagaataatgaagaagccgaggattacgacgacgatctcaccgattctgagatggacgtggtgaggtttgatgacgacaactctccctccatcattcaagctcggagcggggcgaagaaacaccccaagacttgggtccactatatagcggcggaagaggaggattgggattacgctcctcttgtattggcaccagatgaccgctcatacaaaagccagtacctcaacaacggaccgcagagaattggccggaagtataagaaagtgcgatttatggcctatacagacgaaacctttaagacaagggaggccatccagcatgagagtgggattttgggacctcttctttacggcgaagttggtgataccctcctcatcatcttcaagaatcaagcttctcgcccctataacatttacccacacgggatcactgacgttaggcctttgtatagcagaagacttcccaaaggcgtgaagcatctcaaagacttccccattttgccaggcgagatctttaagtacaaatggaccgttacagtggaagatggaccgactaaatcagaccctcgatgccttacgcggtactattcctccttcgtgaattgggagagagatttggcaagcggactcataggaccactcctcatctgttacaaggaatctgtagaccagaggggtaaccagattatgagtgataaacgcaatgtgatcctttttagcgtcttcgacgagaaccggtcctggtacttgaccgagaatatacagaggttccttcccaaccccgcaggcgttcagttggaagaccctgagtttcaggccagcaatattatgcactcaatcaacggctatgtgtttgatagtctccagctttctgtttgcctccatgaagtagcctattggtacatcttgtcaattggtgctcaaacagacttcctctccgtcttcttctccggctacacctttaagcacaagggcgtgtatgaggacactctcacactctttccattttctggagaaaccgtgttcatgagcatggagaatccaggcctttggatcttgggttgccacaacagtgattttcgcaatcggggaatgactgctctcctcaaagtcagcagctgtgattggaacacaggcgactattacgaagattcttacgaggacataagtgcctactttgactccaagaataacgccattgagcccagatcattctcccagaatcctcccgtgcttaaaaggcatcagcgcgaaggtaccagaactactcttcagtctgatcaagaggagattgactatgacgacaccattagcgtggaaatgaagaaggaggatttcgatatctatgacgaagatgagaaccagtctccgcggagctttcagaagaagacgcgacactacttcattgcagcagtcgaaaggctttgggactacggtatgtcatcatcgcctcatgtgttgcgcaatagagctcagagtggaagtgttccacagttcaagaaagtcgtctttcaagagtttacagatggcagcttcacacagcctctctatcggggcgagcttaacgaacatttgggactccttggtccctatatccgagccgaagtggaggacaacattatggttacctttaggaatcaagcctctcgcccctacagcttctactcctccctcatcagttatgaggaggatcagagacaaggcgctgaaccacggaagaactttgtgaaaccgaatgagacgaagacctacttctggaaagtacagcaccacatggcccccacaaaagacgaattcgattgcaaagcatgggcgtatttttcagacgttgacttggagaaagatgtacattcaggacttattggtcctttgttggtgtgtcacactaacactctcaatccagcccatggcaggcaggtgacagtccaggaattcgctcttttctttaccatctttgatgagaccaagtcctggtacttcacggaaaacatggagcgcaattgcagagccccctgtaacatacagatggaggaccctacctttaaggaaaattatcggttccacgcaatcaacggatacattatggatacactccctggccttgtgatggctcaggaccaacgaatcaggtggtacctcctcagcatgggttctaatgagaacatacactccattcacttttcaggacatgtgttcactgtccggaagaaagaagagtataagatggccctctacaatttgtatccaggcgtgtttgagaccgttgaaatgcttccctctaaagctggcatctggagagtagagtgcttgatcggagaacatcttcacgcaggtatgagcaccttgttcctcgtgtacagcaacaaatgtcagaatccacttggcatggccagtggacacattcgcgactttcagatcacagcatctggccagtatggacaatgggccccaaagttggctcgcctccattactccggtagcataaatgcgtggtccactaaagaacctttcagctggattaaggtcgatcttcttgcccccatgatcatccacggcattaagacacagggagcgaggcagaaattctcctccctctacatctcacagttcattattatgtatagtttggacggcaagaagtggcaaacttatagaggtaacagtactggaacagacatggtgttcttcggcaacgttgatagctctggcatcaaacacaacatctttaatcctcccataatagctcggtacatcagattgcatccgacccactacagcattaggagtacactccgaatggagcttatgggttgcgacttgaattcctgttcaatgccactcggaatggagtctaaagccatctctgatgcacagataaccgccagtagctactttacgaacatgtttgctacgtggtcaccctctaaggcaaggcttcatttgcaaggccggtctaatgcctggagacctcaggtgaacaacccgaaagaatggctccaggtggactttcagaagaccatgaaagtaacaggtgtcactactcagggagttaagtccttggatactagcatgtatgtgaaggagttccttatttcctcatcacaagatggccaccagtggaccctcttctttcagaatggtaaggtcaaagtgtttcagggcaatcaagacagcttcacacccgtggtgaacagtcttgatcctccactcttgacacgataccttcgaatccatccacagtcttgggagcaccagattgcattgcgcatggaagtacttggatgcgaggctcaggacctctac

SEQ ID NO: 1532 - protein, 1457 aa, synthetic construct
  REGION 1..1457: note = Variant of human B-domain deleted Factor VIII
MQIELSTCFFLCLLRFCFSATRRYYLGAVELSWDYMQSDLGELPVDARFPPRVPKSFPFNTSQVYKKTLFVEFTDHLFNIAKPRPPWMGLLGPTIQAEVYDTVVITLKNMASHPVSLHAVGVSYWKASEGAEYDDQTSQREKEDDKVFPGGSHTYVWQVLKENGPMASDPPCLTYSYLSHVDLVKDLNSGLIGALLVCREGSLAKEKTQPLAKFILLFAVFDEGKSWHSETKNSLMQDRDAASARAWPKMHTVNGYVNRTLPGLIGCHRKSVYWHVIGMGTTPEVHSIFLEGHTFLVRNHRQASLGISPITFLTAQTLLRDLGQFLLFCHIPSHQHDGMEAYVKVDSCPEEPQLRMKNNEEAEDYDDDLTDSEMDVVRFDDDNSPSIIQARSGAKKHPKTWVHYIAAEEEDWDYAPLVLAPDDRSYKSQYLNNGPQRIGRKYKKVRFMAYTDETFKTREAIQHESGILGPLLYGEVGDTLLIIFKNQASRPYNIYPHGITDVRPLYSRRLPKGVKHLKDFPILPGEIFKYKWTVTVEDGPTKSDPRCLTRYYSSFVNWERDLASGLIGPLLICYKESVDQRGNQIMSDKRNVILFSVFDENRSWYLTENIQRFLPNPAGVQLEDPEFQASNIMHSINGYVFDSLQLSVCLHEVAYWYILSIGAQTDFLSVFFSGYTFKHKGVYEDTLTLFPFSGETVFMSMENPGLWILGCHNSDFRNRGMTALLKVSSCDWNTGDYYEDSYEDISAYFDSKNNAIEPRSFSQNPPVLKRHQREGTRTTLQSDQEEIDYDDTISVEMKKEDFDIYDEDENQSPRSFQKKTRHYFIAAVERLWDYGMSSSPHVLRNRAQSGSVPQFKKVVFQEFTDGSFTQPLYRGELNEHLGLLGPYIRAEVEDNIMVTFRNQASRPYSFYSSLISYEEDQRQGAEPRKNFVKPNETKTYFWKVQHHMAPTKDEFDCKAWAYFSDVDLEKDVHSGLIGPLLVCHTNTLNPAHGRQVTVQEFALFFTIFDETKSWYFTENMERNCRAPCNIQMEDPTFKENYRFHAINGYIMDTLPGLVMAQDQRIRWYLLSMGSNENIHSIHFSGHVFTVRKKEEYKMALYNLYPGVFETVEMLPSKAGIWRVECLIGEHLHAGMSTLFLVYSNKCQNPLGMASGHIRDFQITASGQYGQWAPKLARLHYSGSINAWSTKEPFSWIKVDLLAPMIIHGIKTQGARQKFSSLYISQFIIMYSLDGKKWQTYRGNSTGTDMVFFGNVDSSGIKHNIFNPPIIARYIRLHPTHYSIRSTLRMELMGCDLNSCSMPLGMESKAISDAQITASSYFTNMFATWSPSKARLHLQGRSNAWRPQVNNPKEWLQVDFQKTMKVTGVTTQGVKSLDTSMYVKEFLISSSQDGHQWTLFFQNGKVKVFQGNQDSFTPVVNSLDPPLLTRYLRIHPQSWEHQIALRMEVLGCEAQDLY

SEQ ID NO: 1533 - DNA, 4371 bp, synthetic construct
  misc_feature 1..4371: note = Variant of human B-domain deleted Factor VIII
  source 1..4371: mol_type = other DNA
atgcagattgaactgtctacctgcttcttcctctgtttgctgaggttctgctttagcgccactagacggtactaccttggcgctgtggagctgtcctgggactatatgcagagtgatttgggagagcttcccgtcgacgcacgatttcctcctcgcgttccaaagtcatttccctttaacacaagccaggtgtacaagaagacgctcttcgtcgaattcaccgatcacctgttcaatatcgccaaacccagaccaccatggatgggtcttttggggcctaccatacaagcggaggtgtatgacacagttgttatcactctcaagaacatggcttctcatccggtaagtcttcacgcagtgggcgtgtcctactggaaagcttcagaaggagccgagtatgatgatcagacatcccagagggagaaagaagacgacaaggtatttccaggtgggtctcatacctatgtgtggcaagtgctcaaagagaatggccctatggcaagcgatccgccgtgtttgacttacagctacctttcacacgttgacctcgtcaaggacctcaactccgggttgattggagccttgttggtatgcagggaaggatctcttgccaaagagaagacacagaccctggccaagtttatccttctctttgctgtgttcgatgagggcaaaagttggcatagcgaaacgaagaattccctcatgcaggatcgcgacgcagccagcgccagagcttggcccaagatgcacactgtgaacggatatgtcaataggacgcttcctggcttgattgggtgtcatcggaaaagtgtctactggcacgtgatcggaatggggacaacaccagaggtccactccatatttctcgaaggccataccttccttgttcgaaaccacagacaggcatccttggggatctctcccattaccctgctcactgcccaaacgctccttatggacttgggtcagttccttctcttttgccatatcccgtcacaccagcatgatggtatggaagcttatgtgaaagtcgacagttgtcctgaggagccacagttgcgcatgaagaataatgaagaagccgaggattacgacgacgatctcaccgattctgagatggacgtggtgaggtttgatgacgacaactctccctccatcattcaagctcggagcggggcgaagaaacaccccaagacttgggtccactatatagcggcggaagaggaggattgggattacgctcctcttgtattggcaccagatgaccgctcatacaaaagccagtacctcaacaacggaccgcagagaattggccggaagtataagaaagtgcgatttatggcctatacagacgaaacctttaagacaagggaggccatccagcatgagagtgggattttgggacctcttctttacggcgaagttggtgataccctcctcatcatcttcaagaatcaagcttctcgcccctataacatttacccacacgggatcactgacgttaggcctttgtatagcagaagacttcccaaaggcgtgaagcatctcaaagacttccccattttgccaggcgagatctttaagtacaaatggaccattacagtggaagatggaccgactaaatcagaccctcgatgccttacgcggtactattcctccttcgtgaatatggagagagatttggcaagcggactcataggaccactcctcatctgttacaaggaatctgtagaccagaggggtaaccagattatgagtgataaacgcaatgtgatcctttttagcgtcttcgacgagaaccggtcctggtacttgaccgagaatatacaaaggttccttcccaaccccgcaggcgttcagttggaagaccctgagtttcaggccagcaatattatgcactcaatcaacggctatgtgtttgatagtctccagctttctgtttgcctccatgaagtagcctattggtacatcttgtcaattggtgctcaaacagacttcctctccgtcttcttctccggctacacctttaagcacaagaacgtgtatgaggacactctcacactctttccattttctggagaaaccgtgttcatgagcatggagaatccaggcctttggatcttgggttgccacaacagtgattttcgcaatcggggaatgactgctctcctcaaagtcagcagctgtgattggaacacaggcgactattacgaagattcttacgaggacataagtgcctactttgactccaagaataacgccattgagcccagatcattctcccagaatcctcccgtgcttaaaaggcatcagcgcgaaggtaccagaactactcttcagtctgatcaagaggagattgactatgacgacaccattagcgtggaatggaagaaggaggatttcgatatctatgacgaagatgagaaccagtctccgcggagctttcagaagaagacgcgacactacttcattgcagcagtcgaaaggctttgggactacggtatgtcatcaaaacctcatgtgttgcgcaatagagctcagagtggaagtgttccacagttcaagaaagtcgtctttcaagagtttacagatggcagcttcacacagcctctctatcggggcgagcttaacgaacatttgggactccttggtccctatatccgagccgaagtggaggacaacattatggttacctttaggaatcaagcctctcgcccctacagcttctactcctccctcatcagttatgaggaggatcagagacaaggcgctgaaccacggaagaactttgtgaaaccgaatgagacgaagacctacttctggaaagtacagcaccacatggcccccacaaaagacgaattcgattgcaaagcatgggcgtatttttcagacgttgacttggagaaagatgtacattcaggacttattggtcctttgttggtgtgtcacactaacactctcaatccagcccatggcaggcaggtgacagtccaggaattcgctcttttctttaccatctttgatgagaccaagtcctggtacttcacggaaaacatggagcgcaattgcagagccccctgtaacatacagatggaggaccctacctttaaggaaaattatcggttccacgcaatcaacggatacattatggatacactccctggccttgtgatggctcaggaccaacgaatcaggtggtacctcctcagcatgggttctaatgagaacatacactccattcacttttcaggacatgtgttcactgtccggaagaaagaagagtataagatggccctctacaatttgtatccaggcgtgtttgagaccgttgaaatgcttccctctaaagctggcatctggagagtagagtgcttgatcggagaacatcttcacgcaggtatgagcaccttgttcctcgtgtacagcaacaaatgtcagaatccacttggcatggccagtggacacattcgcgactttcagatcacagcatctggccagtatggacaatgggccccaaagttggctcgcctccattactccggtagcataaatgcgtggtccactaaagaacctttcagctggattaaggtcgatcttcttgcccccatgatcatccacggcattaagacacagggagcgaggcagaaattctcctccctctacatctcacagttcattattatgtatagtttggacggcaagaagtggcaaacttatagaggtaacagtactggaacagacatggtgttcttcggcaacgttgatagctctggcatcaaacacaacatctttaatcctcccataatagctcggtacatcagattgcatccgacccactacagcattaggagtacactccgaatggagcttatgggttgcgacttgaattcctgttcaatgccactcggaatggagtctaaagccatctctgatgcacagataaccgccagtagctactttacgaacatgtttgctacgtggtcaccctctaaggcaaggcttcatttgcaaggccggtctaatgcctggagacctcaggtgaacaacccgaaagaatggctccaggtggactttcagaagaccatgaaagtaacaggtgtcactactcagggagttaagtccttggatactagcatgtatgtgaaggagttccttatttcctcatcacaagatggccaccagtggaccctcttctttcagaatggtaaggtcaaagtgtttcagggcaatcaagacagcttcacacccgtggtgaacagtcttgatcctccactcttgacacgataccttcgaatccatccacagtcttgggagcaccagattgcattgcgcatggaagtacttggatgcgaggctcaggacctctac

SEQ ID NO: 1534 - protein, 1457 aa, synthetic construct
  REGION 1..1457: note = Variant of human B-domain deleted Factor VIII
MQIELSTCFFLCLLRFCFSATRRYYLGAVELSWDYMQSDLGELPVDARFPPRVPKSFPFNTSQVYKKTLFVEFTDHLFNIAKPRPPWMGLLGPTIQAEVYDTVVITLKNMASHPVSLHAVGVSYWKASEGAEYDDQTSQREKEDDKVFPGGSHTYVWQVLKENGPMASDPPCLTYSYLSHVDLVKDLNSGLIGALLVCREGSLAKEKTQTLAKFILLFAVFDEGKSWHSETKNSLMQDRDAASARAWPKMHTVNGYVNRTLPGLIGCHRKSVYWHVIGMGTTPEVHSIFLEGHTFLVRNHRQASLGISPITLLTAQTLLMDLGQFLLFCHIPSHQHDGMEAYVKVDSCPEEPQLRMKNNEEAEDYDDDLTDSEMDVVRFDDDNSPSIIQARSGAKKHPKTWVHYIAAEEEDWDYAPLVLAPDDRSYKSQYLNNGPQRIGRKYKKVRFMAYTDETFKTREAIQHESGILGPLLYGEVGDTLLIIFKNQASRPYNIYPHGITDVRPLYSRRLPKGVKHLKDFPILPGEIFKYKWTITVEDGPTKSDPRCLTRYYSSFVNMERDLASGLIGPLLICYKESVDQRGNQIMSDKRNVILFSVFDENRSWYLTENIQRFLPNPAGVQLEDPEFQASNIMHSINGYVFDSLQLSVCLHEVAYWYILSIGAQTDFLSVFFSGYTFKHKNVYEDTLTLFPFSGETVFMSMENPGLWILGCHNSDFRNRGMTALLKVSSCDWNTGDYYEDSYEDISAYFDSKNNAIEPRSFSQNPPVLKRHQREGTRTTLQSDQEEIDYDDTISVEWKKEDFDIYDEDENQSPRSFQKKTRHYFIAAVERLWDYGMSSKPHVLRNRAQSGSVPQFKKVVFQEFTDGSFTQPLYRGELNEHLGLLGPYIRAEVEDNIMVTFRNQASRPYSFYSSLISYEEDQRQGAEPRKNFVKPNETKTYFWKVQHHMAPTKDEFDCKAWAYFSDVDLEKDVHSGLIGPLLVCHTNTLNPAHGRQVTVQEFALFFTIFDETKSWYFTENMERNCRAPCNIQMEDPTFKENYRFHAINGYIMDTLPGLVMAQDQRIRWYLLSMGSNENIHSIHFSGHVFTVRKKEEYKMALYNLYPGVFETVEMLPSKAGIWRVECLIGEHLHAGMSTLFLVYSNKCQNPLGMASGHIRDFQITASGQYGQWAPKLARLHYSGSINAWSTKEPFSWIKVDLLAPMIIHGIKTQGARQKFSSLYISQFIIMYSLDGKKWQTYRGNSTGTDMVFFGNVDSSGIKHNIFNPPIIARYIRLHPTHYSIRSTLRMELMGCDLNSCSMPLGMESKAISDAQITASSYFTNMFATWSPSKARLHLQGRSNAWRPQVNNPKEWLQVDFQKTMKVTGVTTQGVKSLDTSMYVKEFLISSSQDGHQWTLFFQNGKVKVFQGNQDSFTPVVNSLDPPLLTRYLRIHPQSWEHQIALRMEVLGCEAQDLY

SEQ ID NO: 1535 - DNA, 4371 bp, synthetic construct
  misc_feature 1..4371: note = Variant of human B-domain deleted Factor VIII
  source 1..4371: mol_type = other DNA
atgcagattgaactgtctacctgcttcttcctctgtttgctgaggttctgctttagcgccactagacggtactaccttggcgctgtggagctgtcctgggactatatgcagagtgatttgggagagcttcccgtcgacgcacgatttcctcctcgcgttccaaagtcatttccctttaacacaagccaggtgtacaagaagacgctcttcgtcgaattcaccgatcacctgttcaatatcgccaaacccagaccaccatggatgggtcttttggggcctaccatacaagcggaggtgtatgacacagttgttatcactctcaagaacatggcttctcatccggtaagtcttcacgcagtgggcgtgtcctactggaaagcttcagaaggagccgagtatgatgatcagacatcccagagggagaaagaagacgacaaggtatttccaggtgggtctcatacctatgtgtggcaagtgctcaaagagaatggccctatggcaagcgatccgccgtgtttgacttacagctacctttcacacgttgacctcgtcaaggacctcaactccgggttgattggagccttgttggtatgcagggaaggatctcttgccaaagagaagacacagaccaaacacaagtttatccttctctttgctgtgttcgatgagggcaaaagttggcatagcgaaacgaagaattccctcatgcaggatcgcgacgcagccagcgccagagcttggcccaagatgcacactgtgaacggatatgtcaataggacgcttcctggcttgattgggtgtcatcggaaaagtgtctactggcacgtgatcggaatggggacaacaccagaggtccactccatatttctcgaaggccataccttccttgttcgaaaccacagacaggcatccttggggatctctcccattaccttcctcactgcccaaacgctccttcgtgacttgggtcagttccttctcttttgccatatcccgtcacaccagcatgatggtatggaagcttatgtgaaagtcgacagttgtcctgaggagccacagttgcgcatgaagaataatgaagaagccgaggattacgacgacgatctcaccgattctgagatggacgtggtgaggtttgatgacgacaactctccctccatcattcaagctcggagcggggcgaagaaacaccccaagacttgggtccactatatagcggcggaagaggaggattgggattacgctcctcttgtattggcaccagatgaccgctcatacaaaagccagtacctcaacaacggaccgcagagaattggccggaagtataagaaagtgcgatttatggcctatacagacgaaacctttaagacaagggaggccatccagcatgagagtgggattttgggacctcttctttacggcgaagttggtgataccctcctcatcatcttcaagaatcaagcttctcgcccctataacatttacccacacgggatcactgacgttaggcctttgtatagcagaagacttcccaaaggcgtgaagcatctcaaagacttccccattttgccaggcgagatctttaagtacaaatggaccgttacagtggaagatggaccgactaaatcagaccctcgatgccttacgcggtactattcctccttcgtgaattgggagagagatttggcaagcggactcataggaccactcctcatctgttacaaggaatctgtagaccagaggggtaaccagattatgagtgataaacgcaatgtgatcctttttagcgtcttcgacgagaaccggtcctggtacttgaccgagaatatacagaggttccttcccaaccccgcaggcgttcagttggaagaccctgagtttcaggccagcaatattatgcactcaatcaacggctatgtgtttgatagtctccagctttctgtttgcctccatgaagtagcctattggtacatcttgtcaattggtgctcaaacagacttcctctccgtcttcttctccggctacacctttaagcacaagatggtgtatgaggacactctcacactctttccattttctggagaaaccgtgttcatgagcatggagaatccaggcctttggatcttgggttgccacaacagtgattttcgcaatcggggaatgactgctctcctcaaagtcagcagctgtgattggaacacaggcgactattacgaagattcttacgaggacataagtgcctactttgactccaagaataacgccattgagcccagatcattctcccagaatcctcccgtgcttaaaaggcatcagcgcgaaggtaccagaactactcttcagtctgatcaagaggagattgactatgacgacaccattagcgtggaaatgaagaaggaggatttcgatatctatgacgaagatgagaaccagtctccgcggagctttcagaagaagacgcgacactacttcattgcagcagtcgaaaggctttgggactacggtatgtcatcaaaacctcatgtgttgcgcaatagagctcagagtggaagtgttccacagttcaagaaagtcgtctttcaagagtttacagatggcagcttcacacagcctctctatcggggcgagcttaacgaacatttgggactccttggtccctatatccgagccgaagtggaggacaacattatggttacctttaggaatcaagcctctcgcccctacagcttctactcctccctcatcagttatgaggaggatcagagacaaggcgctgaaccacggaagaactttgtgaaaccgaatgagacgaagacctacttctggaaagtacagcaccacatggcccccacaaaagacgaattcgattgcaaagcatgggcgtatttttcagacgttgacttggagaaagatgtacattcaggacttattggtcctttgttggtgtgtcacactaacactctcaatccagcccatggcaggcaggtgacagtccaggaattcgctcttttctttaccatctttgatgagaccaagtcctggtacttcacggaaaacatggagcgcaattgcagagccccctgtaacatacagatggaggaccctacctttaaggaaaattatcggttccacgcaatcaacggatacattatggatacactccctggccttgtgatggctcaggaccaacgaatcaggtggtacctcctcagcatgggttctaatgagaacatacactccattcacttttcaggacatgtgttcactgtccggaagaaagaagagtataagatggccctctacaatttgtatccaggcgtgtttgagaccgttgaaatgcttccctctaaagctggcatctggagagtagagtgcttgatcggagaacatcttcacgcaggtatgagcaccttgttcctcgtgtacagcaacaaatgtcagaatccacttggcatggccagtggacacattcgcgactttcagatcacagcatctggccagtatggacaatgggccccaaagttggctcgcctccattactccggtagcataaatgcgtggtccactaaagaacctttcagctggattaaggtcgatcttcttgcccccatgatcatccacggcattaagacacagggagcgaggcagaaattctcctccctctacatctcacagttcattattatgtatagtttggacggcaagaagtggcaaacttatagaggtaacagtactggaacagacatggtgttcttcggcaacgttgatagctctggcatcaaacacaacatctttaatcctcccataatagctcggtacatcagattgcatccgacccactacagcattaggagtacactccgaatggagcttatgggttgcgacttgaattcctgttcaatgccactcggaatggagtctaaagccatctctgatgcacagataaccgccagtagctactttacgaacatgtttgctacgtggtcaccctctaaggcaaggcttcatttgcaaggccggtctaatgcctggagacctcaggtgaacaacccgaaagaatggctccaggtggactttcagaagaccatgaaagtaacaggtgtcactactcagggagttaagtccttggatactagcatgtatgtgaaggagttccttatttcctcatcacaagatggccaccagtggaccctcttctttcagaatggtaaggtcaaagtgtttcagggcaatcaagacagcttcacacccgtggtgaacagtcttgatcctccactcttgacacgataccttcgaatccatccacagtcttgggagcaccagattgcattgcgcatggaagtacttggatgcgaggctcaggacctctac

SEQ ID NO: 1536 - protein, 1457 aa, synthetic construct
  REGION 1..1457: note = Variant of human B-domain deleted Factor VIII
MQIELSTCFFLCLLRFCFSATRRYYLGAVELSWDYMQSDLGELPVDARFPPRVPKSFPFNTSQVYKKTLFVEFTDHLFNIAKPRPPWMGLLGPTIQAEVYDTVVITLKNMASHPVSLHAVGVSYWKASEGAEYDDQTSQREKEDDKVFPGGSHTYVWQVLKENGPMASDPPCLTYSYLSHVDLVKDLNSGLIGALLVCREGSLAKEKTQTKHKFILLFAVFDEGKSWHSETKNSLMQDRDAASARAWPKMHTVNGYVNRTLPGLIGCHRKSVYWHVIGMGTTPEVHSIFLEGHTFLVRNHRQASLGISPITFLTAQTLLRDLGQFLLFCHIPSHQHDGMEAYVKVDSCPEEPQLRMKNNEEAEDYDDDLTDSEMDVVRFDDDNSPSIIQARSGAKKHPKTWVHYIAAEEEDWDYAPLVLAPDDRSYKSQYLNNGPQRIGRKYKKVRFMAYTDETFKTREAIQHESGILGPLLYGEVGDTLLIIFKNQASRPYNIYPHGITDVRPLYSRRLPKGVKHLKDFPILPGEIFKYKWTVTVEDGPTKSDPRCLTRYYSSFVNWERDLASGLIGPLLICYKESVDQRGNQIMSDKRNVILFSVFDENRSWYLTENIQRFLPNPAGVQLEDPEFQASNIMHSINGYVFDSLQLSVCLHEVAYWYILSIGAQTDFLSVFFSGYTFKHKMVYEDTLTLFPFSGETVFMSMENPGLWILGCHNSDFRNRGMTALLKVSSCDWNTGDYYEDSYEDISAYFDSKNNAIEPRSFSQNPPVLKRHQREGTRTTLQSDQEEIDYDDTISVEMKKEDFDIYDEDENQSPRSFQKKTRHYFIAAVERLWDYGMSSKPHVLRNRAQSGSVPQFKKVVFQEFTDGSFTQPLYRGELNEHLGLLGPYIRAEVEDNIMVTFRNQASRPYSFYSSLISYEEDQRQGAEPRKNFVKPNETKTYFWKVQHHMAPTKDEFDCKAWAYFSDVDLEKDVHSGLIGPLLVCHTNTLNPAHGRQVTVQEFALFFTIFDETKSWYFTENMERNCRAPCNIQMEDPTFKENYRFHAINGYIMDTLPGLVMAQDQRIRWYLLSMGSNENIHSIHFSGHVFTVRKKEEYKMALYNLYPGVFETVEMLPSKAGIWRVECLIGEHLHAGMSTLFLVYSNKCQNPLGMASGHIRDFQITASGQYGQWAPKLARLHYSGSINAWSTKEPFSWIKVDLLAPMIIHGIKTQGARQKFSSLYISQFIIMYSLDGKKWQTYRGNSTGTDMVFFGNVDSSGIKHNIFNPPIIARYIRLHPTHYSIRSTLRMELMGCDLNSCSMPLGMESKAISDAQITASSYFTNMFATWSPSKARLHLQGRSNAWRPQVNNPKEWLQVDFQKTMKVTGVTTQGVKSLDTSMYVKEFLISSSQDGHQWTLFFQNGKVKVFQGNQDSFTPVVNSLDPPLLTRYLRIHPQSWEHQIALRMEVLGCEAQDLY

SEQ ID NO: 1537 - DNA, 4371 bp, synthetic construct
  misc_feature 1..4371: note = Variant of human B-domain deleted Factor VIII
  source 1..4371: mol_type = other DNA
atgcagattgaactgtctacctgcttcttcctctgtttgctgaggttctgctttagcgccactagacggtactaccttggcgctgtggagctgtcctgggactatatgcagagtgatttgggagagcttcccgtcgacgcacgatttcctcctcgcgttccaaagtcatttccctttaacacaagccaggtgtacaagaagacgctcttcgtcgaattcaccgatcacctgttcaatatcgccaaacccagaccaccatggatgggtcttttggggcctaccatacaagcggaggtgtatgacacagttgttatcactctcaagaacatggcttctcatccggtaagtcttcacgcagtgggcgtgtcctactggaaagcttcagaaggagccgagtatgatgatcagacatcccagagggagaaagaagacgacaaggtatttccaggtgggtctcatacctatgtgtggcaagtgctcaaagagaatggccctatggcaagcgatccgccgtgtttgacttacagctacctttcacacgttgacctcgtcaaggacctcaactccgggttgattggagccttgttggtatgcagggaaggatctcttgccaaagagaagacacagaccctccacaagtttatccttctctttgctgtgttcgatgagggcaaaagttggcatagcgaaacgaagaattccctcatgcaggatcgcgacgcagccagcgccagagcttggcccaagatgcacactgtgaacggatatgtcaataggacgcttcctggcttgattgggtgtcatcggaaaagtgtctactggcacgtgatcggaatggggacaacaccagaggtccactccatatttctcgaaggccataccttccttgttcgaaaccacagacaggcatccttggggatctctcccattacctttctcactgcccaaacgctccttatggacttgggtcagttccttctcttttgccatatcccgtcacaccagcatgatggtatggaagcttatgtgaaagtcgacagttgtcctgaggagccacagttgcgcatgaagaataatgaagaagccgaggattacgacgacgatctcaccgattctgagatggacgtggtgaggtttgatgacgacaactctccctccatcattcaagctcggagcggggcgaagaaacaccccaagacttgggtccactatatagcggcggaagaggaggattgggattacgctcctcttgtattggcaccagatgaccgctcatacaaaagccagtacctcaacaacggaccgcagagaattggccggaagtataagaaagtgcgatttatggcctatacagacgaaacctttaagacaagggaggccatccagcatgagagtgggattttgggacctcttctttacggcgaagttggtgataccctcctcatcatcttcaagaatcaagcttctcgcccctataacatttacccacacgggatcactgacgttaggcctttgtatagcagaagacttcccaaaggcgtgaagcatctcaaagacttccccattttgccaggcgagatctttaagtacaaatggaccgtcacagtggaagatggaccgactaaatcagaccctcgatgccttacgcggtactattcctccttcgtgaatatggagagagatttggcaagcggactcataggaccactcctcatctgttacaaggaatctgtagaccagaggggtaaccagattatgagtgataaacgcaatgtgatcctttttagcgtcttcgacgagaaccggtcctggtacttgaccgagaatatacaaaggttccttcccaaccccgcaggcgttcagttggaagaccctgagtttcaggccagcaatattatgcactcaatcaacggctatgtgtttgatagtctccagctttctgtttgcctccatgaagtagcctattggtacatcttgtcaattggtgctcaaacagacttcctctccgtcttcttctccggctacacctttaagcacaagatggtgtatgaggacactctcacactctttccattttctggagaaaccgtgttcatgagcatggagaatccaggcctttggatcttgggttgccacaacagtgattttcgcaatcggggaatgactgctctcctcaaagtcagcagctgtgattggaacacaggcgactattacgaagattcttacgaggacataagtgcctactttgactccaagaataacgccattgagcccagatcattctcccagaatcctcccgtgcttaaaaggcatcagcgcgaaggtaccagaactactcttcagtctgatcaagaggagattgactatgacgacaccattagcgtggaaatgaagaaggaggatttcgatatctatgacgaagatgagaaccagtctccgcggagctttcagaagaagacgcgacactacttcattgcagcagtcgaaaggctttgggactacggtatgtcatcatcccctcatgtgttgcgcaatagagctcagagtggaagtgttccacagttcaagaaagtcgtctttcaagagtttacagatggcagcttcacacagcctctctatcggggcgagcttaacgaacatttgggactccttggtccctatatccgagccgaagtggaggacaacattatggttacctttaggaatcaagcctctcgcccctacagcttctactcctccctcatcagttatgaggaggatcagagacaacaggctgaaccacggaagaactttgtgaaaccgaatgagacgaagacctacttctggaaagtacagcaccacatggcccccacaaaagacgaattcgattgcaaagcatgggcgtatttttcagacgttgacttggagaaagatgtacattcaggacttattggtcctttgttggtgtgtcacactaacactctcaatccagcccatggcaggcaggtgacagtccaggaattcgctcttttctttaccatctttgatgagaccaagtcctggtacttcacggaaaacatggagcgcaattgcagagccccctgtaacatacagatggaggaccctacctttaaggaaaattatcggttccacgcaatcaacggatacattatggatacactccctggccttgtgatggctcaggaccaacgaatcaggtggtacctcctcagcatgggttctaatgagaacatacactccattcacttttcaggacatgtgttcactgtccggaagaaagaagagtataagatggccctctacaatttgtatccaggcgtgtttgagaccgttgaaatgcttccctctaaagctggcatctggagagtagagtgcttgatcggagaacatcttcacgcaggtatgagcaccttgttcctcgtgtacagcaacaaatgtcagaatccacttggcatggccagtggacacattcgcgactttcagatcacagcatctggccagtatggacaatgggccccaaagttggctcgcctccattactccggtagcataaatgcgtggtccactaaagaacctttcagctggattaaggtcgatcttcttgcccccatgatcatccacggcattaagacacagggagcgaggcagaaattctcctccctctacatctcacagttcattattatgtatagtttggacggcaagaagtggcaaacttatagaggtaacagtactggaacagacatggtgttcttcggcaacgttgatagctctggcatcaaacacaacatctttaatcctcccataatagctcggtacatcagattgcatccgacccactacagcattaggagtacactccgaatggagcttatgggttgcgacttgaattcctgttcaatgccactcggaatggagtctaaagccatctctgatgcacagataaccgccagtagctactttacgaacatgtttgctacgtggtcaccctctaaggcaaggcttcatttgcaaggccggtctaatgcctggagacctcaggtgaacaacccgaaagaatggctccaggtggactttcagaagaccatgaaagtaacaggtgtcactactcagggagttaagtccttggatactagcatgtatgtgaaggagttccttatttcctcatcacaagatggccaccagtggaccctcttctttcagaatggtaaggtcaaagtgtttcagggcaatcaagacagcttcacacccgtggtgaacagtcttgatcctccactcttgacacgataccttcgaatccatccacagtcttgggagcaccagattgcattgcgcatggaagtacttggatgcgaggctcaggacctctac

SEQ ID NO: 1538 - protein, 1457 aa, synthetic construct
  REGION 1..1457: note = Variant of human B-domain deleted Factor VIII
MQIELSTCFFLCLLRFCFSATRRYYLGAVELSWDYMQSDLGELPVDARFPPRVPKSFPFNTSQVYKKTLFVEFTDHLFNIAKPRPPWMGLLGPTIQAEVYDTVVITLKNMASHPVSLHAVGVSYWKASEGAEYDDQTSQREKEDDKVFPGGSHTYVWQVLKENGPMASDPPCLTYSYLSHVDLVKDLNSGLIGALLVCREGSLAKEKTQTLHKFILLFAVFDEGKSWHSETKNSLMQDRDAASARAWPKMHTVNGYVNRTLPGLIGCHRKSVYWHVIGMGTTPEVHSIFLEGHTFLVRNHRQASLGISPITFLTAQTLLMDLGQFLLFCHIPSHQHDGMEAYVKVDSCPEEPQLRMKNNEEAEDYDDDLTDSEMDVVRFDDDNSPSIIQARSGAKKHPKTWVHYIAAEEEDWDYAPLVLAPDDRSYKSQYLNNGPQRIGRKYKKVRFMAYTDETFKTREAIQHESGILGPLLYGEVGDTLLIIFKNQASRPYNIYPHGITDVRPLYSRRLPKGVKHLKDFPILPGEIFKYKWTVTVEDGPTKSDPRCLTRYYSSFVNMERDLASGLIGPLLICYKESVDQRGNQIMSDKRNVILFSVFDENRSWYLTENIQRFLPNPAGVQLEDPEFQASNIMHSINGYVFDSLQLSVCLHEVAYWYILSIGAQTDFLSVFFSGYTFKHKMVYEDTLTLFPFSGETVFMSMENPGLWILGCHNSDFRNRGMTALLKVSSCDWNTGDYYEDSYEDISAYFDSKNNAIEPRSFSQNPPVLKRHQREGTRTTLQSDQEEIDYDDTISVEMKKEDFDIYDEDENQSPRSFQKKTRHYFIAAVERLWDYGMSSSPHVLRNRAQSGSVPQFKKVVFQEFTDGSFTQPLYRGELNEHLGLLGPYIRAEVEDNIMVTFRNQASRPYSFYSSLISYEEDQRQQAEPRKNFVKPNETKTYFWKVQHHMAPTKDEFDCKAWAYFSDVDLEKDVHSGLIGPLLVCHTNTLNPAHGRQVTVQEFALFFTIFDETKSWYFTENMERNCRAPCNIQMEDPTFKENYRFHAINGYIMDTLPGLVMAQDQRIRWYLLSMGSNENIHSIHFSGHVFTVRKKEEYKMALYNLYPGVFETVEMLPSKAGIWRVECLIGEHLHAGMSTLFLVYSNKCQNPLGMASGHIRDFQITASGQYGQWAPKLARLHYSGSINAWSTKEPFSWIKVDLLAPMIIHGIKTQGARQKFSSLYISQFIIMYSLDGKKWQTYRGNSTGTDMVFFGNVDSSGIKHNIFNPPIIARYIRLHPTHYSIRSTLRMELMGCDLNSCSMPLGMESKAISDAQITASSYFTNMFATWSPSKARLHLQGRSNAWRPQVNNPKEWLQVDFQKTMKVTGVTTQGVKSLDTSMYVKEFLISSSQDGHQWTLFFQNGKVKVFQGNQDSFTPVVNSLDPPLLTRYLRIHPQSWEHQIALRMEVLGCEAQDLY

SEQ ID NO: 1539 - DNA, 4371 bp, synthetic construct
  misc_feature 1..4371: note = Variant of human B-domain deleted Factor VIII
  source 1..4371: mol_type = other DNA
atgcagattgaactgtctacctgcttcttcctctgtttgctgaggttctgctttagcgccactagacggtactaccttggcgctgtggagctgtcctgggactatatgcagagtgatttgggagagcttcccgtcgacgcacgatttcctcctcgcgttccaaagtcatttccctttaacacaagccaggtgtacaagaagacgctcttcgtcgaattcaccgatcacctgttcaatatcgccaaacccagaccaccatggatgggtcttttggggcctaccatacaagcggaggtgtatgacacagttgttatcactctcaagaacatggcttctcatccggtaagtcttcacgcagtgggcgtgtcctactggaaagcttcagaaggagccgagtatgatgatcagacatcccagagggagaaagaagacgacaaggtatttccaggtgggtctcatacctatgtgtggcaagtgctcaaagagaatggccctatggcaagcgatccgccgtgtttgacttacagctacctttcacacgttgacctcgtcaaggacctcaactccgggttgattggagccttgttggtatgcagggaaggatctcttgccaaagagaagacacagaccctccacaagtttatccttctctttgctgtgttcgatgagggcaaaagttggcatagcgaaacgaagaattccctcatgcaggatcgcgacgcagccagcgccagagcttggcccaagatgcacactgtgaacggatatgtcaataggacgcttcctggcttgattgggtgtcatcggaaaagtgtctactggcacgtgatcggaatggggacaacaccagaggtccactccatatttctcgaaggccataccttccttgttcgaaaccacagacaggcatccttggggatctctcccattacctttctcactgcccaaacgctccttatggacttgggtcagttccttctcttttgccatatcccgtcacaccagcatgatggtatggaagcttatgtgaaagtcgacagttgtcctgaggagccacagttgcgcatgaagaataatgaagaagccgaggattacgacgacgatctcaccgattctgagatggacgtggtgaggtttgatgacgacaactctccctccatcattcaagctcggagcggggcgaagaaacaccccaagacttgggtccactatatagcggcggaagaggaggattgggattacgctcctcttgtattggcaccagatgaccgctcatacaaaagccagtacctcaacaacggaccgcagagaattggccggaagtataagaaagtgcgatttatggcctatacagacgaaacctttaagacaagggaggccatccagcatgagagtgggattttgggacctcttctttacggcgaagttggtgataccctcctcatcatcttcaagaatcaagcttctcgcccctataacatttacccacacgggatcactgacgttaggcctttgtatagcagaagacttcccaaaggcgtgaagcatctcaaagacttccccattttgccaggcgagatctttaagtacaaatggaccgtcacagtggaagatggaccgactaaatcagaccctcgatgccttacgcggtactattcctccttcgtgaatatggagagagatttggcaagcggactcataggaccactcctcatctgttacaaggaatctgtagaccagaggggtaaccagattatgagtgataaacgcaatgtgatcctttttagcgtcttcgacgagaaccggtcctggtacttgaccgagaatatacaaaggttccttcccaaccccgcaggcgttcagttggaagaccctgagtttcaggccagcaatattatgcactcaatcaacggctatgtgtttgatagtctccagctttctgtttgcctccatgaagtagcctattggtacatcttgtcaattggtgctcaaacagacttcctctccgtcttcttctccggctacacctttaagcacaagatggtgtatgaggacactctcacactctttccattttctggagaaaccgtgttcatgagcatggagaatccaggcctttggatcttgggttgccacaacagtgattttcgcaatcggggaatgactgctctcctcaaagtcagcagctgtgattggaacacaggcgactattacgaagattcttacgaggacataagtgcctactttgactccaagaataacgccattgagcccagatcattctcccagaatcctcccgtgcttaaaaggcatcagcgcgaaggtaccagaactactcttcagtctgatcaagaggagattgactatgacgacaccattagcgtggaaatgaagaaggaggatttcgatatctatgacgaagatgagaaccagtctccgcggagctttcagaagaagacgcgacactacttcattgcagcagtcgaaaggctttgggactacggtatgtcatcatcccctcatgtgttgcgcaatagagctcagagtggaagtgttccacagttcaagaaagtcgtctttcaagagtttacagatggcagcttcacacagcctctctatcggggcgagcttaacgaacatttgggactccttggtccctatatccgagccgaagtggaggacaacattatggttacctttaggaatcaagcctctcgcccctacagcttctactcctccctcatcttgtatgaggaggatcagagacaaggcgctgaaccacggaagaactttgtgaaaccgaatgagacgaagacctacttctggaaagtacagcaccacatggcccccacaaaagacgaattcgattgcaaagcatgggcgtatttttcagacgttgacttggagaaagatgtacattcaggacttattggtcctttgttggtgtgtcacactaacactctcaatccagcccatggcaggcaggtgacagtccaggaattcgctcttttctttaccatctttgatgagaccaagtcctggtacttcacggaaaacatggagcgcaattgcagagccccctgtaacatacagatggaggaccctacctttaaggaaaattatcggttccacgcaatcaacggatacattatggatacactccctggccttgtgatggctcaggaccaacgaatcaggtggtacctcctcagcatgggttctaatgagaacatacactccattcacttttcaggacatgtgttcactgtccggaagaaagaagagtataagatggccctctacaatttgtatccaggcgtgtttgagaccgttgaaatgcttccctctaaagctggcatctggagagtagagtgcttgatcggagaacatcttcacgcaggtatgagcaccttgttcctcgtgtacagcaacaaatgtcagaatccacttggcatggccagtggacacattcgcgactttcagatcacagcatctggccagtatggacaatgggccccaaagttggctcgcctccattactccggtagcataaatgcgtggtccactaaagaacctttcagctggattaaggtcgatcttcttgcccccatgatcatccacggcattaagacacagggagcgaggcagaaattctcctccctctacatctcacagttcattattatgtatagtttggacggcaagaagtggcaaacttatagaggtaacagtactggaacagacatggtgttcttcggcaacgttgatagctctggcatcaaacacaacatctttaatcctcccataatagctcggtacatcagattgcatccgacccactacagcattaggagtacactccgaatggagcttatgggttgcgacttgaattcctgttcaatgccactcggaatggagtctaaagccatctctgatgcacagataaccgccagtagctactttacgaacatgtttgctacgtggtcaccctctaaggcaaggcttcatttgcaaggccggtctaatgcctggagacctcaggtgaacaacccgaaagaatggctccaggtggactttcagaagaccatgaaagtaacaggtgtcactactcagggagttaagtccttggatactagcatgtatgtgaaggagttccttatttcctcatcacaagatggccaccagtggaccctcttctttcagaatggtaaggtcaaagtgtttcagggcaatcaagacagcttcacacccgtggtgaacagtcttgatcctccactcttgacacgataccttcgaatccatccacagtcttgggagcaccagattgcattgcgcatggaagtacttggatgcgaggctcaggacctctac

SEQ ID NO: 1540 - protein, 1457 aa, synthetic construct
  REGION 1..1457: note = Variant of human B-domain deleted Factor VIII
MQIELSTCFFLCLLRFCFSATRRYYLGAVELSWDYMQSDLGELPVDARFPPRVPKSFPFNTSQVYKKTLFVEFTDHLFNIAKPRPPWMGLLGPTIQAEVYDTVVITLKNMASHPVSLHAVGVSYWKASEGAEYDDQTSQREKEDDKVFPGGSHTYVWQVLKENGPMASDPPCLTYSYLSHVDLVKDLNSGLIGALLVCREGSLAKEKTQTLHKFILLFAVFDEGKSWHSETKNSLMQDRDAASARAWPKMHTVNGYVNRTLPGLIGCHRKSVYWHVIGMGTTPEVHSIFLEGHTFLVRNHRQASLGISPITFLTAQTLLMDLGQFLLFCHIPSHQHDGMEAYVKVDSCPEEPQLRMKNNEEAEDYDDDLTDSEMDVVRFDDDNSPSIIQARSGAKKHPKTWVHYIAAEEEDWDYAPLVLAPDDRSYKSQYLNNGPQRIGRKYKKVRFMAYTDETFKTREAIQHESGILGPLLYGEVGDTLLIIFKNQASRPYNIYPHGITDVRPLYSRRLPKGVKHLKDFPILPGEIFKYKWTVTVEDGPTKSDPRCLTRYYSSFVNMERDLASGLIGPLLICYKESVDQRGNQIMSDKRNVILFSVFDENRSWYLTENIQRFLPNPAGVQLEDPEFQASNIMHSINGYVFDSLQLSVCLHEVAYWYILSIGAQTDFLSVFFSGYTFKHKMVYEDTLTLFPFSGETVFMSMENPGLWILGCHNSDFRNRGMTALLKVSSCDWNTGDYYEDSYEDISAYFDSKNNAIEPRSFSQNPPVLKRHQREGTRTTLQSDQEEIDYDDTISVEMKKEDFDIYDEDENQSPRSFQKKTRHYFIAAVERLWDYGMSSSPHVLRNRAQSGSVPQFKKVVFQEFTDGSFTQPLYRGELNEHLGLLGPYIRAEVEDNIMVTFRNQASRPYSFYSSLILYEEDQRQGAEPRKNFVKPNETKTYFWKVQHHMAPTKDEFDCKAWAYFSDVDLEKDVHSGLIGPLLVCHTNTLNPAHGRQVTVQEFALFFTIFDETKSWYFTENMERNCRAPCNIQMEDPTFKENYRFHAINGYIMDTLPGLVMAQDQRIRWYLLSMGSNENIHSIHFSGHVFTVRKKEEYKMALYNLYPGVFETVEMLPSKAGIWRVECLIGEHLHAGMSTLFLVYSNKCQNPLGMASGHIRDFQITASGQYGQWAPKLARLHYSGSINAWSTKEPFSWIKVDLLAPMIIHGIKTQGARQKFSSLYISQFIIMYSLDGKKWQTYRGNSTGTDMVFFGNVDSSGIKHNIFNPPIIARYIRLHPTHYSIRSTLRMELMGCDLNSCSMPLGMESKAISDAQITASSYFTNMFATWSPSKARLHLQGRSNAWRPQVNNPKEWLQVDFQKTMKVTGVTTQGVKSLDTSMYVKEFLISSSQDGHQWTLFFQNGKVKVFQGNQDSFTPVVNSLDPPLLTRYLRIHPQSWEHQIALRMEVLGCEAQDLY

SEQ ID NO: 1541 - DNA, 4371 bp, synthetic construct
  misc_feature 1..4371: note = Variant of human B-domain deleted Factor VIII
  source 1..4371: mol_type = other DNA
atgcagattgaactgtctacctgcttcttcctctgtttgctgaggttctgctttagcgccactagacggtactaccttggcgctgtggagctgtcctgggactatatgcagagtgatttgggagagcttcccgtcgacgcacgatttcctcctcgcgttccaaagtcatttccctttaacacaagccaggtgtacaagaagacgctcttcgtcgaattcaccgatcacctgttcaatatcgccaaacccagaccaccatggatgggtcttttggggcctaccatacaagcggaggtgtatgacacagttgttatcactctcaagaacatggcttctcatccggtaagtcttcacgcagtgggcgtgtcctactggaaagcttcagaaggagccgagtatgatgatcagacatcccagagggagaaagaagacgacaaggtatttccaggtgggtctcatacctatgtgtggcaagtgctcaaagagaatggccctatggcaagcgatccgccgtgtttgacttacagctacctttcacacgttgacctcgtcaaggacctcaactccgggttgattggagccttgttggtatgcagggaaggatctcttgccaaagagaagacacagaccctccacaagtttatccttctctttgctgtgttcgatgagggcaaaagttggcatagcgaaacgaagaattccctcatgcaggatcgcgacgcagccagcgccagagcttggcccaagatgcacactgtgaacggatatgtcaataggacgcttcctggcttgattgggtgtcatcggaaaagtgtctactggcacgtgatcggaatggggacaacaccagaggtccactccatatttctcgaaggccataccttccttgttcgaaaccacagacaggcatccttggggatctctcccattacctttctcactgcccaaacgctccttatggacttgggtcagttccttctcttttgccatatcccgtcacaccagcatgatggtatggaagcttatgtgaaagtcgacagttgtcctgaggagccacagttgcgcatgaagaataatgaagaagccgaggattacgacgacgatctcaccgattctgagatggacgtggtgaggtttgatgacgacaactctccctccatcattcaagctcggagcggggcgaagaaacaccccaagacttgggtccactatatagcggcggaagaggaggattgggattacgctcctcttgtattggcaccagatgaccgctcatacaaaagccagtacctcaacaacggaccgcagagaattggccggaagtataagaaagtgcgatttatggcctatacagacgaaacctttaagacaagggaggccatccagcatgagagtgggattttgggacctcttctttacggcgaagttggtgataccctcctcatcatcttcaagaatcaagcttctcgcccctataacatttacccacacgggatcactgacgttaggcctttgtatagcagaagacttcccaaaggcgtgaagcatctcaaagacttccccattttgccaggcgagatctttaagtacaaatggaccgtcacagtggaagatggaccgactaaatcagaccctcgatgccttacgcggtactattcctccttcgtgaatatggagagagatttggcaagcggactcataggaccactcctcatctgttacaaggaatctgtagaccagaggggtaaccagattatgagtgataaacgcaatgtgatcctttttagcgtcttcgacgagaaccggtcctggtacttgaccgagaatatacaaaggttccttcccaaccccgcaggcgttcagttggaagaccctgagtttcaggccagcaatattatgcactcaatcaacggctatgtgtttgatagtctccagctttctgtttgcctccatgaagtagcctattggtacatcttgtcaattggtgctcaaacagacttcctctccgtcttcttctccggctacacctttaagcacaagatggtgtatgaggacactctcacactctttccattttctggagaaaccgtgttcatgagcatggagaatccaggcctttggatcttgggttgccacaacagtgattttcgcaatcggggaatgactgctctcctcaaagtcagcagctgtgattggaacacaggcgactattacgaagattcttacgaggacataagtgcctactttgactccaagaataacgccattactcccagatcattctcccagaatcctcccgtgcttaaaaggcatcagcgcgaaggtaccagaactactcttcagtctgatcaagaggagattgactatgacgacaccattagcgtggaaatgaagaaggaggatttcgatatctatgacgaagatgagaaccagtctccgcggagctttcagaagaagacgcgacactacttcattgcagcagtcgaaaggctttgggactacggtatgtcatcatcccctcatgtgttgcgcaatagagctcagagtggaagtgttccacagttcaagaaagtcgtctttcaagagtttacagatggcagcttcacacagcctctctatcggggcgagcttaacgaacatttgggactccttggtccctatatccgagccgaagtggaggacaacattatggttacctttaggaatcaagcctctcgcccctacagcttctactcctccctcatcagttatgaggaggatcagagacaaggcgctgaaccacggaagaactttgtgaaaccgaatgagacgaagacctacttctggaaagtacagcaccacatggcccccacaaaagacgaattcgattgcaaagcatgggcgtatttttcagacgttgacttggagaaagatgtacattcaggacttattggtcctttgttggtgtgtcacactaacactctcaatccagcccatggcaggcaggtgacagtccaggaattcgctcttttctttaccatctttgatgagaccaagtcctggtacttcacggaaaacatggagcgcaattgcagagccccctgtaacatacagatggaggaccctacctttaaggaaaattatcggttccacgcaatcaacggatacattatggatacactccctggccttgtgatggctcaggaccaacgaatcaggtggtacctcctcagcatgggttctaatgagaacatacactccattcacttttcaggacatgtgttcactgtccggaagaaagaagagtataagatggccctctacaatttgtatccaggcgtgtttgagaccgttgaaatgcttccctctaaagctggcatctggagagtagagtgcttgatcggagaacatcttcacgcaggtatgagcaccttgttcctcgtgtacagcaacaaatgtcagaatccacttggcatggccagtggacacattcgcgactttcagatcacagcatctggccagtatggacaatgggccccaaagttggctcgcctccattactccggtagcataaatgcgtggtccactaaagaacctttcagctggattaaggtcgatcttcttgcccccatgatcatccacggcattaagacacagggagcgaggcagaaattctcctccctctacatctcacagttcattattatgtatagtttggacggcaagaagtggcaaacttatagaggtaacagtactggaacagacatggtgttcttcggcaacgttgatagctctggcatcaaacacaacatctttaatcctcccataatagctcggtacatcagattgcatccgacccactacagcattaggagtacactccgaatggagcttatgggttgcgacttgaattcctgttcaatgccactcggaatggagtctaaagccatctctgatgcacagataaccgccagtagctactttacgaacatgtttgctacgtggtcaccctctaaggcaaggcttcatttgcaaggccggtctaatgcctggagacctcaggtgaacaacccgaaagaatggctccaggtggactttcagaagaccatgaaagtaacaggtgtcactactcagggagttaagtccttggatactagcatgtatgtgaaggagttccttatttcctcatcacaagatggccaccagtggaccctcttctttcagaatggtaaggtcaaagtgtttcagggcaatcaagacagcttcacacccgtggtgaacagtcttgatcctccactcttgacacgataccttcgaatccatccacagtcttgggagcaccagattgcattgcgcatggaagtacttggatgcgaggctcaggacctctac

SEQ ID NO: 1542 - protein, 1457 aa, synthetic construct
  REGION 1..1457: note = Variant of human B-domain deleted Factor VIII
MQIELSTCFFLCLLRFCFSATRRYYLGAVELSWDYMQSDLGELPVDARFPPRVPKSFPFNTSQVYKKTLFVEFTDHLFNIAKPRPPWMGLLGPTIQAEVYDTVVITLKNMASHPVSLHAVGVSYWKASEGAEYDDQTSQREKEDDKVFPGGSHTYVWQVLKENGPMASDPPCLTYSYLSHVDLVKDLNSGLIGALLVCREGSLAKEKTQTLHKFILLFAVFDEGKSWHSETKNSLMQDRDAASARAWPKMHTVNGYVNRTLPGLIGCHRKSVYWHVIGMGTTPEVHSIFLEGHTFLVRNHRQASLGISPITFLTAQTLLMDLGQFLLFCHIPSHQHDGMEAYVKVDSCPEEPQLRMKNNEEAEDYDDDLTDSEMDVVRFDDDNSPSIIQARSGAKKHPKTWVHYIAAEEEDWDYAPLVLAPDDRSYKSQYLNNGPQRIGRKYKKVRFMAYTDETFKTREAIQHESGILGPLLYGEVGDTLLIIFKNQASRPYNIYPHGITDVRPLYSRRLPKGVKHLKDFPILPGEIFKYKWTVTVEDGPTKSDPRCLTRYYSSFVNMERDLASGLIGPLLICYKESVDQRGNQIMSDKRNVILFSVFDENRSWYLTENIQRFLPNPAGVQLEDPEFQASNIMHSINGYVFDSLQLSVCLHEVAYWYILSIGAQTDFLSVFFSGYTFKHKMVYEDTLTLFPFSGETVFMSMENPGLWILGCHNSDFRNRGMTALLKVSSCDWNTGDYYEDSYEDISAYFDSKNNAITPRSFSQNPPVLKRHQREGTRTTLQSDQEEIDYDDTISVEMKKEDFDIYDEDENQSPRSFQKKTRHYFIAAVERLWDYGMSSSPHVLRNRAQSGSVPQFKKVVFQEFTDGSFTQPLYRGELNEHLGLLGPYIRAEVEDNIMVTFRNQASRPYSFYSSLISYEEDQRQGAEPRKNFVKPNETKTYFWKVQHHMAPTKDEFDCKAWAYFSDVDLEKDVHSGLIGPLLVCHTNTLNPAHGRQVTVQEFALFFTIFDETKSWYFTENMERNCRAPCNIQMEDPTFKENYRFHAINGYIMDTLPGLVMAQDQRIRWYLLSMGSNENIHSIHFSGHVFTVRKKEEYKMALYNLYPGVFETVEMLPSKAGIWRVECLIGEHLHAGMSTLFLVYSNKCQNPLGMASGHIRDFQITASGQYGQWAPKLARLHYSGSINAWSTKEPFSWIKVDLLAPMIIHGIKTQGARQKFSSLYISQFIIMYSLDGKKWQTYRGNSTGTDMVFFGNVDSSGIKHNIFNPPIIARYIRLHPTHYSIRSTLRMELMGCDLNSCSMPLGMESKAISDAQITASSYFTNMFATWSPSKARLHLQGRSNAWRPQVNNPKEWLQVDFQKTMKVTGVTTQGVKSLDTSMYVKEFLISSSQDGHQWTLFFQNGKVKVFQGNQDSFTPVVNSLDPPLLTRYLRIHPQSWEHQIALRMEVLGCEAQDLY

SEQ ID NO: 1543 - DNA, 4371 bp, synthetic construct
  misc_feature 1..4371: note = Variant of human B-domain deleted Factor VIII
  source 1..4371: mol_type = other DNA
atgcagattgaactgtctacctgcttcttcctctgtttgctgaggttctgctttagcgccactagacggtactaccttggcgctgtggagctgtcctgggactatatgcagagtgatttgggagagcttcccgtcgacgcacgatttcctcctcgcgttccaaagtcatttccctttaacacaagccaggtgtacaagaagacgctcttcgtcgaattcaccgatcacctgttcaatatcgccaaacccagaccaccatggatgggtcttttggggcctaccatacaagcggaggtgtatgacacagttgttatcactctcaagaacatggcttctcatccggtaagtcttcacgcagtgggcgtgtcctactggaaagcttcagaaggagccgagtatgatgatcagacatcccagagggagaaagaagacgacaaggtatttccaggtgggtctcatacctatgtgtggcaagtgctcaaagagaatggccctatggcaagcgatccgccgtgtttgacttacagctacctttcacacgttgacctcgtcaaggacctcaactccgggttgattggagccttgttggtatgcagggaaggatctcttgccaaagagaagacacagaccctccacaagtttatccttctctttgctgtgttcgatgagggcaaaagttggcatagcgaaacgaagaattccctcatgcaggatcgcgacgcagccagcgccagagcttggcccaagatgcacactgtgaacggatatgtcaataggacgcttcctggcttgattgggtgtcatcggaaaagtgtctactggcacgtgatcggaatggggacaacaccagaggtccactccatatttctcgaaggccataccttccttgttcgaaaccacagacaggcatccttggggatctctcccattacctttctcactgcccaaacgctccttatggacttgggtcagttccttctcttttgccatatcccgtcacaccagcatgatggtatggaagcttatgtgaaagtcgacagttgtcctgaggagccacagttgcgcatgaagaataatgaagaagccgaggattacgacgacgatctcaccgattctgagatggacgtggtgaggtttgatgacgacaactctccctccatcattcaagctcggagcggggcgaagaaacaccccaagacttgggtccactatatagcggcggaagaggaggattgggattacgctcctcttgtattggcaccagatgaccgctcatacaaaagccagtacctcaacaacggaccgcagagaattggccggaagtataagaaagtgcgatttatggcctatacagacgaaacctttaagacaagggaggccatccagcatgagagtgggattttgggacctcttctttacggcgaagttggtgataccctcctcatcatcttcaagaatcaagcttctcgcccctataacatttacccacacgggatcactgacgttaggcctttgtatagcagaagacttcccaaaggcgtgaagcatctcaaagacttccccattttgccaggcgagatctttaagtacaaatggaccgtcacagtggaagatggaccgactaaatcagaccctcgatgccttacgcggtactattcctccttcgtgaatatggagagagatttggcaagcggactcataggaccactcctcatctgttacaaggaatctgtagaccagaggggtaaccagattatgagtgataaacgcaatgtgatcctttttagcgtcttcgacgagaaccggtcctggtacttgaccgagaatatacaaaggttccttcccaaccccgcaggcgttcagttggaagaccctgagtttcaggccagcaatattatgcactcaatcaacggctatgtgtttgatagtctccagctttctgtttgcctccatgaagtagcctattggtacatcttgtcaattggtgctcaaacagacttcctctccgtcttcttctccggctacacctttaagcacaagatggtgtatgaggacactctcacactctttccattttctggagaaaccgtgttcatgagcatggagaatccaggcctttggatcttgggttgccacaacagtgattttcgcaatcggggaatgactgctctcctcaaagtcagcagctgtgattggaacacaggcgacaagtacgaagattcttacgaggacataagtgcctactttgactccaagaataacgccattgagcccagatcattctcccagaatcctcccgtgcttaaaaggcatcagcgcgaaggtaccagaactactcttcagtctgatcaagaggagattgactatgacgacaccattagcgtggaaatgaagaaggaggatttcgatatctatgacgaagatgagaaccagtctccgcggagctttcagaagaagacgcgacactacttcattgcagcagtcgaaaggctttgggactacggtatgtcatcatcccctcatgtgttgcgcaatagagctcagagtggaagtgttccacagttcaagaaagtcgtctttcaagagtttacagatggcagcttcacacagcctctctatcggggcgagcttaacgaacatttgggactccttggtccctatatccgagccgaagtggaggacaacattatggttacctttaggaatcaagcctctcgcccctacagcttctactcctccctcatcagttatgaggaggatcagagacaaggcgctgaaccacggaagaactttgtgaaaccgaatgagacgaagacctacttctggaaagtacagcaccacatggcccccacaaaagacgaattcgattgcaaagcatgggcgtatttttcagacgttgacttggagaaagatgtacattcaggacttattggtcctttgttggtgtgtcacactaacactctcaatccagcccatggcaggcaggtgacagtccaggaattcgctcttttctttaccatctttgatgagaccaagtcctggtacttcacggaaaacatggagcgcaattgcagagccccctgtaacatacagatggaggaccctacctttaaggaaaattatcggttccacgcaatcaacggatacattatggatacactccctggccttgtgatggctcaggaccaacgaatcaggtggtacctcctcagcatgggttctaatgagaacatacactccattcacttttcaggacatgtgttcactgtccggaagaaagaagagtataagatggccctctacaatttgtatccaggcgtgtttgagaccgttgaaatgcttccctctaaagctggcatctggagagtagagtgcttgatcggagaacatcttcacgcaggtatgagcaccttgttcctcgtgtacagcaacaaatgtcagaatccacttggcatggccagtggacacattcgcgactttcagatcacagcatctggccagtatggacaatgggccccaaagttggctcgcctccattactccggtagcataaatgcgtggtccactaaagaacctttcagctggattaaggtcgatcttcttgcccccatgatcatccacggcattaagacacagggagcgaggcagaaattctcctccctctacatctcacagttcattattatgtatagtttggacggcaagaagtggcaaacttatagaggtaacagtactggaacagacatggtgttcttcggcaacgttgatagctctggcatcaaacacaacatctttaatcctcccataatagctcggtacatcagattgcatccgacccactacagcattaggagtacactccgaatggagcttatgggttgcgacttgaattcctgttcaatgccactcggaatggagtctaaagccatctctgatgcacagataaccgccagtagctactttacgaacatgtttgctacgtggtcaccctctaaggcaaggcttcatttgcaaggccggtctaatgcctggagacctcaggtgaacaacccgaaagaatggctccaggtggactttcagaagaccatgaaagtaacaggtgtcactactcagggagttaagtccttggatactagcatgtatgtgaaggagttccttatttcctcatcacaagatggccaccagtggaccctcttctttcagaatggtaaggtcaaagtgtttcagggcaatcaagacagcttcacacccgtggtgaacagtcttgatcctccactcttgacacgataccttcgaatccatccacagtcttgggagcaccagattgcattgcgcatggaagtacttggatgcgaggctcaggacctctac

SEQ ID NO: 1544 - protein, 1457 aa, synthetic construct
  REGION 1..1457: note = Variant of human B-domain deleted Factor VIII
MQIELSTCFFLCLLRFCFSATRRYYLGAVELSWDYMQSDLGELPVDARFPPRVPKSFPFNTSQVYKKTLFVEFTDHLFNIAKPRPPWMGLLGPTIQAEVYDTVVITLKNMASHPVSLHAVGVSYWKASEGAEYDDQTSQREKEDDKVFPGGSHTYVWQVLKENGPMASDPPCLTYSYLSHVDLVKDLNSGLIGALLVCREGSLAKEKTQTLHKFILLFAVFDEGKSWHSETKNSLMQDRDAASARAWPKMHTVNGYVNRTLPGLIGCHRKSVYWHVIGMGTTPEVHSIFLEGHTFLVRNHRQASLGISPITFLTAQTLLMDLGQFLLFCHIPSHQHDGMEAYVKVDSCPEEPQLRMKNNEEAEDYDDDLTDSEMDVVRFDDDNSPSIIQARSGAKKHPKTWVHYIAAEEEDWDYAPLVLAPDDRSYKSQYLNNGPQRIGRKYKKVRFMAYTDETFKTREAIQHESGILGPLLYGEVGDTLLIIFKNQASRPYNIYPHGITDVRPLYSRRLPKGVKHLKDFPILPGEIFKYKWTVTVEDGPTKSDPRCLTRYYSSFVNMERDLASGLIGPLLICYKESVDQRGNQIMSDKRNVILFSVFDENRSWYLTENIQRFLPNPAGVQLEDPEFQASNIMHSINGYVFDSLQLSVCLHEVAYWYILSIGAQTDFLSVFFSGYTFKHKMVYEDTLTLFPFSGETVFMSMENPGLWILGCHNSDFRNRGMTALLKVSSCDWNTGDKYEDSYEDISAYFDSKNNAIEPRSFSQNPPVLKRHQREGTRTTLQSDQEEIDYDDTISVEMKKEDFDIYDEDENQSPRSFQKKTRHYFIAAVERLWDYGMSSSPHVLRNRAQSGSVPQFKKVVFQEFTDGSFTQPLYRGELNEHLGLLGPYIRAEVEDNIMVTFRNQASRPYSFYSSLISYEEDQRQGAEPRKNFVKPNETKTYFWKVQHHMAPTKDEFDCKAWAYFSDVDLEKDVHSGLIGPLLVCHTNTLNPAHGRQVTVQEFALFFTIFDETKSWYFTENMERNCRAPCNIQMEDPTFKENYRFHAINGYIMDTLPGLVMAQDQRIRWYLLSMGSNENIHSIHFSGHVFTVRKKEEYKMALYNLYPGVFETVEMLPSKAGIWRVECLIGEHLHAGMSTLFLVYSNKCQNPLGMASGHIRDFQITASGQYGQWAPKLARLHYSGSINAWSTKEPFSWIKVDLLAPMIIHGIKTQGARQKFSSLYISQFIIMYSLDGKKWQTYRGNSTGTDMVFFGNVDSSGIKHNIFNPPIIARYIRLHPTHYSIRSTLRMELMGCDLNSCSMPLGMESKAISDAQITASSYFTNMFATWSPSKARLHLQGRSNAWRPQVNNPKEWLQVDFQKTMKVTGVTTQGVKSLDTSMYVKEFLISSSQDGHQWTLFFQNGKVKVFQGNQDSFTPVVNSLDPPLLTRYLRIHPQSWEHQIALRMEVLGCEAQDLY

SEQ ID NO: 1545 - DNA, 4371 bp, synthetic construct
  misc_feature 1..4371: note = Variant of human B-domain deleted Factor VIII
  source 1..4371: mol_type = other DNA
atgcagattgaactgtctacctgcttcttcctctgtttgctgaggttctgctttagcgccactagacggtactaccttggcgctgtggagctgtcctgggactatatgcagagtgatttgggagagcttcccgtcgacgcacgatttcctcctcgcgttccaaagtcatttccctttaacacaagccaggtgtacaagaagacgctcttcgtcgaattcaccgatcacctgttcaatatcgccaaacccagaccaccatggatgggtcttttggggcctaccatacaagcggaggtgtatgacacagttgttatcactctcaagaacatggcttctcatccggtaagtcttcacgcagtgggcgtgtcctactggaaagcttcagaaggagccgagtatgatgatcagacatcccagagggagaaagaagacgacaaggtatttccaggtgggtctcatacctatgtgtggcaagtgctcaaagagaatggccctatggcaagcgatccgccgtgtttgacttacagctacctttcacacgttgacctcgtcaaggacctcaactccgggttgattggagccttgttggtatgcagggaaggatctcttgccaaagagaagacacagaccctccacaagtttatccttctctttgctgtgttcgatgagggcaaaagttggcatagcgaaacgaagaattccctcatgcaggatcgcgacgcagccagcgccagagcttggcccaagatgcacactgtgaacggatatgtcaataggacgcttcctggcttgattgggtgtcatcggaaaagtgtctactggcacgtgatcggaatggggacaacaccagaggtccactccatatttctcgaaggccataccttccttgttcgaaaccacagacaggcatccttggggatctctcccattacctttctcactgcccaaacgctccttatggacttgggtcagttccttctcttttgccatatcccgtcacaccagcatgatggtatggaagcttatgtgaaagtcgacagttgtcctgaggagccacagttgcgcatgaagaataatgaagaagccgaggattacgacgacgatctcaccgattctgagatggacgtggtgaggtttgatgacgacaactctccctccatcattcaagctcggagcggggcgaagaaacaccccaagacttgggtccactatatagcggcggaagaggaggattgggattacgctcctcttgtattggcaccagatgaccgctcatacaaaagccagtacctcaacaacggaccgcagagaattggccggaagtataagaaagtgcgatttatggcctatacagacgaaacctttaagacaagggaggccatccagcatgagagtgggattttgggacctcttctttacggcgaagttggtgataccctcctcatcatcttcaagaatcaagcttctcgcccctataacatttacccacacgggatcactgacgttaggcctttgtatagcagaagacttcccaaaggcgtgaagcatctcaaagacttccccattttgccaggcgagatctttaagtacaaatggaccgtcacagtggaagatggaccgactaaatcagaccctcgatgccttacgcggtactattcctccttcgtgaatatggagagagatttggcaagcggactcataggaccactcctcatctgttacaaggaatctgtagaccagaggggtaaccagattatgagtgataaacgcaatgtgatcctttttagcgtcttcgacgagaaccggtcctggtacttgaccgagaatatacaaaggttccttcccaaccccgcaggcgttcagttggaagaccctgagtttcaggccagcaatattatgcactcaatcaacggctatgtgtttgatagtctccagctttctgtttgcctccatgaagtagcctattggtacatcttgtcaattggtgctcaaacagacttcctctccgtcttcttctccggctacacctttaagcacaagatggtgtatgaggacactctcacactctttccattttctggagaaaccgtgttcatgagcatggagaatccaggcctttggatcttgggttgccacaacagtgattttcgcaatcggggaatgactgctctcctcaaagtcagcagctgtgattggaacacaggcgactattacgaagattcttacgaggacataagtgcctactttgactccaagaataacgccattgagcccagatcattctcccagaatcctcccgtgcttaaaaggcatcagcgcgaaggtaccagaactactcttcagtctgatcaagaggagattgactatgacgacaccattagcgtggaaatgaagaaggaggatttcgatatctatgacgaagatgagaaccagtctccgcggagctttcaggtgaagacgcgacactacttcattgcagcagtcgaaaggctttgggactacggtatgtcatcatcccctcatgtgttgcgcaatagagctcagagtggaagtgttccacagttcaagaaagtcgtctttcaagagtttacagatggcagcttcacacagcctctctatcggggcgagcttaacgaacatttgggactccttggtccctatatccgagccgaagtggaggacaacattatggttacctttaggaatcaagcctctcgcccctacagcttctactcctccctcatcagttatgaggaggatcagagacaaggcgctgaaccacggaagaactttgtgaaaccgaatgagacgaagacctacttctggaaagtacagcaccacatggcccccacaaaagacgaattcgattgcaaagcatgggcgtatttttcagacgttgacttggagaaagatgtacattcaggacttattggtcctttgttggtgtgtcacactaacactctcaatccagcccatggcaggcaggtgacagtccaggaattcgctcttttctttaccatctttgatgagaccaagtcctggtacttcacggaaaacatggagcgcaattgcagagccccctgtaacatacagatggaggaccctacctttaaggaaaattatcggttccacgcaatcaacggatacattatggatacactccctggccttgtgatggctcaggaccaacgaatcaggtggtacctcctcagcatgggttctaatgagaacatacactccattcacttttcaggacatgtgttcactgtccggaagaaagaagagtataagatggccctctacaatttgtatccaggcgtgtttgagaccgttgaaatgcttccctctaaagctggcatctggagagtagagtgcttgatcggagaacatcttcacgcaggtatgagcaccttgttcctcgtgtacagcaacaaatgtcagaatccacttggcatggccagtggacacattcgcgactttcagatcacagcatctggccagtatggacaatgggccccaaagttggctcgcctccattactccggtagcataaatgcgtggtccactaaagaacctttcagctggattaaggtcgatcttcttgcccccatgatcatccacggcattaagacacagggagcgaggcagaaattctcctccctctacatctcacagttcattattatgtatagtttggacggcaagaagtggcaaacttatagaggtaacagtactggaacagacatggtgttcttcggcaacgttgatagctctggcatcaaacacaacatctttaatcctcccataatagctcggtacatcagattgcatccgacccactacagcattaggagtacactccgaatggagcttatgggttgcgacttgaattcctgttcaatgccactcggaatggagtctaaagccatctctgatgcacagataaccgccagtagctactttacgaacatgtttgctacgtggtcaccctctaaggcaaggcttcatttgcaaggccggtctaatgcctggagacctcaggtgaacaacccgaaagaatggctccaggtggactttcagaagaccatgaaagtaacaggtgtcactactcagggagttaagtccttggatactagcatgtatgtgaaggagttccttatttcctcatcacaagatggccaccagtggaccctcttctttcagaatggtaaggtcaaagtgtttcagggcaatcaagacagcttcacacccgtggtgaacagtcttgatcctccactcttgacacgataccttcgaatccatccacagtcttgggagcaccagattgcattgcgcatggaagtacttggatgcgaggctcaggacctctac

SEQ ID NO: 1546 - protein, 1457 aa, synthetic construct
  REGION 1..1457: note = Variant of human B-domain deleted Factor VIII
MQIELSTCFFLCLLRFCFSATRRYYLGAVELSWDYMQSDLGELPVDARFPPRVPKSFPFNTSQVYKKTLFVEFTDHLFNIAKPRPPWMGLLGPTIQAEVYDTVVITLKNMASHPVSLHAVGVSYWKASEGAEYDDQTSQREKEDDKVFPGGSHTYVWQVLKENGPMASDPPCLTYSYLSHVDLVKDLNSGLIGALLVCREGSLAKEKTQTLHKFILLFAVFDEGKSWHSETKNSLMQDRDAASARAWPKMHTVNGYVNRTLPGLIGCHRKSVYWHVIGMGTTPEVHSIFLEGHTFLVRNHRQASLGISPITFLTAQTLLMDLGQFLLFCHIPSHQHDGMEAYVKVDSCPEEPQLRMKNNEEAEDYDDDLTDSEMDVVRFDDDNSPSIIQARSGAKKHPKTWVHYIAAEEEDWDYAPLVLAPDDRSYKSQYLNNGPQRIGRKYKKVRFMAYTDETFKTREAIQHESGILGPLLYGEVGDTLLIIFKNQASRPYNIYPHGITDVRPLYSRRLPKGVKHLKDFPILPGEIFKYKWTVTVEDGPTKSDPRCLTRYYSSFVNMERDLASGLIGPLLICYKESVDQRGNQIMSDKRNVILFSVFDENRSWYLTENIQRFLPNPAGVQLEDPEFQASNIMHSINGYVFDSLQLSVCLHEVAYWYILSIGAQTDFLSVFFSGYTFKHKMVYEDTLTLFPFSGETVFMSMENPGLWILGCHNSDFRNRGMTALLKVSSCDWNTGDYYEDSYEDISAYFDSKNNAIEPRSFSQNPPVLKRHQREGTRTTLQSDQEEIDYDDTISVEMKKEDFDIYDEDENQSPRSFQVKTRHYFIAAVERLWDYGMSSSPHVLRNRAQSGSVPQFKKVVFQEFTDGSFTQPLYRGELNEHLGLLGPYIRAEVEDNIMVTFRNQASRPYSFYSSLISYEEDQRQGAEPRKNFVKPNETKTYFWKVQHHMAPTKDEFDCKAWAYFSDVDLEKDVHSGLIGPLLVCHTNTLNPAHGRQVTVQEFALFFTIFDETKSWYFTENMERNCRAPCNIQMEDPTFKENYRFHAINGYIMDTLPGLVMAQDQRIRWYLLSMGSNENIHSIHFSGHVFTVRKKEEYKMALYNLYPGVFETVEMLPSKAGIWRVECLIGEHLHAGMSTLFLVYSNKCQNPLGMASGHIRDFQITASGQYGQWAPKLARLHYSGSINAWSTKEPFSWIKVDLLAPMIIHGIKTQGARQKFSSLYISQFIIMYSLDGKKWQTYRGNSTGTDMVFFGNVDSSGIKHNIFNPPIIARYIRLHPTHYSIRSTLRMELMGCDLNSCSMPLGMESKAISDAQITASSYFTNMFATWSPSKARLHLQGRSNAWRPQVNNPKEWLQVDFQKTMKVTGVTTQGVKSLDTSMYVKEFLISSSQDGHQWTLFFQNGKVKVFQGNQDSFTPVVNSLDPPLLTRYLRIHPQSWEHQIALRMEVLGCEAQDLY

SEQ ID NO: 1547 - DNA, 4371 bp, synthetic construct
  misc_feature 1..4371: note = Variant of human B-domain deleted Factor VIII
  source 1..4371: mol_type = other DNA
atgcagattgaactgtctacctgcttcttcctctgtttgctgaggttctgctttagcgccactagacggtactaccttggcgctgtggagctgtcctgggactatatgcagagtgatttgggagagcttcccgtcgacgcacgatttcctcctcgcgttccaaagtcatttccctttaacacaagccaggtgtacaagaagacgctcttcgtcgaattcaccgatcacctgttcaatatcgccaaacccagaccaccatggatgggtcttttggggcctaccatacaagcggaggtgtatgacacagttgttatcactctcaagaacatggcttctcatccggtaagtcttcacgcagtgggcgtgtcctactggaaagcttcagaaggagccgagtatgatgatcagacatcccagagggagaaagaagacgacaaggtatttccaggtgggtctcatacctatgtgtggcaagtgctcaaagagaatggccctatggcaagcgatccgccgtgtttgacttacagctacctttcacacgttgacctcgtcaaggacctcaactccgggttgattggagccttgttggtatgcagggaaggatctcttgccaaagagaagacacagaccctccacaagtttatccttctctttgctgtgttcgatgagggcaaaagttggcatagcgaaacgaagaattccctcatgcaggatcgcgacgcagccagcgccagagcttggcccaagatgcacactgtgaacggatatgtcaataggacgcttcctggcttgattgggtgtcatcggaaaagtgtctactggcacgtgatcggaatggggacaacaccagaggtccactccatatttctcgaaggccataccttccttgttcgaaaccacagacaggcatccttggggatctctcccattacctttctcactgcccaaacgctccttatggacttgggtcagttccttctcttttgccatatcccgtcacaccagcatgatggtatggaagcttatgtgaaagtcgacagttgtcctgaggagccacagttgcgcatgaagaataatgaagaagccgaggattacgacgacgatctcaccgattctgagatggacgtggtgaggtttgatgacgacaactctccctccatcattcaagctcggagcggggcgaagaaacaccccaagacttgggtccactatatagcggcggaagaggaggattgggattacgctcctcttgtattggcaccagatgaccgctcatacaaaagccagtacctcaacaacggaccgcagagaattggccggaagtataagaaagtgcgatttatggcctatacagacgaaacctttaagacaagggaggccatccagcatgagagtgggattttgggacctcttctttacggcgaagttggtgataccctcctcatcatcttcaagaatcaagcttctcgcccctataacatttacccacacgggatcactgacgttaggcctttgtatagcagaagacttcccaaaggcgtgaagcatctcaaagacttccccattttgccaggcgagatctttaagtacaaatggaccgtcacagtggaagatggaccgactaaatcagaccctcgatgccttacgcggtactattcctccttcgtgaatatggagagagatttggcaagcggactcataggaccactcctcatctgttacaaggaatctgtagaccagaggggtaaccagattatgagtgataaacgcaatgtgatcctttttagcgtcttcgacgagaaccggtcctggtacttgaccgagaatatacaaaggttccttcccaaccccgcaggcgttcagttggaagaccctgagtttcaggccagcaatattatgcactcaatcaacggctatgtgtttgatagtctccagctttctgtttgcctccatgaagtagcctattggtacatcttgtcaattggtgctcaaacagacttcctctccgtcttcttctccggctacacctttaagcacaagatggtgtatgaggacactctcacactctttccattttctggagaaaccgtgttcatgagcatggagaatccaggcctttggatcttgggttgccacaacagtgattttcgcaatcggggaatgactgctctcctcaaagtcagcagctgtgattggaacacaggcgactattacgaagattcttacgaggacataagtgcctactttgactccaagaataacgccattgagcccagatcattctcccagaatcctcccgtgcttaaaaggcatcagcgcgaaggtaccagaactactcttcagtctgatcaagaggagattgactatgacgacaccattagcgtggaaatgaagaaggaggggttcgatatctatgacgaagatgagaaccagtctccgcggagctttcagaagaagacgcgacactacttcattgcagcagtcgaaaggctttgggactacggtatgtcatcatcccctcatgtgttgcgcaatagagctcagagtggaagtgttccacagttcaagaaagtcgtctttcaagagtttacagatggcagcttcacacagcctctctatcggggcgagcttaacgaacatttgggactccttggtccctatatccgagccgaagtggaggacaacattatggttacctttaggaatcaagcctctcgcccctacagcttctactcctccctcatcagttatgaggaggatcagagacaaggcgctgaaccacggaagaactttgtgaaaccgaatgagacgaagacctacttctggaaagtacagcaccacatggcccccacaaaagacgaattcgattgcaaagcatgggcgtatttttcagacgttgacttggagaaagatgtacattcaggacttattggtcctttgttggtgtgtcacactaacactctcaatccagcccatggcaggcaggtgacagtccaggaattcgctcttttctttaccatctttgatgagaccaagtcctggtacttcacggaaaacatggagcgcaattgcagagccccctgtaacatacagatggaggaccctacctttaaggaaaattatcggttccacgcaatcaacggatacattatggatacactccctggccttgtgatggctcaggaccaacgaatcaggtggtacctcctcagcatgggttctaatgagaacatacactccattcacttttcaggacatgtgttcactgtccggaagaaagaagagtataagatggccctctacaatttgtatccaggcgtgtttgagaccgttgaaatgcttccctctaaagctggcatctggagagtagagtgcttgatcggagaacatcttcacgcaggtatgagcaccttgttcctcgtgtacagcaacaaatgtcagaatccacttggcatggccagtggacacattcgcgactttcagatcacagcatctggccagtatggacaatgggccccaaagttggctcgcctccattactccggtagcataaatgcgtggtccactaaagaacctttcagctggattaaggtcgatcttcttgcccccatgatcatccacggcattaagacacagggagcgaggcagaaattctcctccctctacatctcacagttcattattatgtatagtttggacggcaagaagtggcaaacttatagaggtaacagtactggaacagacatggtgttcttcggcaacgttgatagctctggcatcaaacacaacatctttaatcctcccataatagctcggtacatcagattgcatccgacccactacagcattaggagtacactccgaatggagcttatgggttgcgacttgaattcctgttcaatgccactcggaatggagtctaaagccatctctgatgcacagataaccgccagtagctactttacgaacatgtttgctacgtggtcaccctctaaggcaaggcttcatttgcaaggccggtctaatgcctggagacctcaggtgaacaacccgaaagaatggctccaggtggactttcagaagaccatgaaagtaacaggtgtcactactcagggagttaagtccttggatactagcatgtatgtgaaggagttccttatttcctcatcacaagatggccaccagtggaccctcttctttcagaatggtaaggtcaaagtgtttcagggcaatcaagacagcttcacacccgtggtgaacagtcttgatcctccactcttgacacgataccttcgaatccatccacagtcttgggagcaccagattgcattgcgcatggaagtacttggatgcgaggctcaggacctctac

SEQ ID NO: 1548 - protein, 1457 aa, synthetic construct
  REGION 1..1457: note = Variant of human B-domain deleted Factor VIII
MQIELSTCFFLCLLRFCFSATRRYYLGAVELSWDYMQSDLGELPVDARFPPRVPKSFPFNTSQVYKKTLFVEFTDHLFNIAKPRPPWMGLLGPTIQAEVYDTVVITLKNMASHPVSLHAVGVSYWKASEGAEYDDQTSQREKEDDKVFPGGSHTYVWQVLKENGPMASDPPCLTYSYLSHVDLVKDLNSGLIGALLVCREGSLAKEKTQTLHKFILLFAVFDEGKSWHSETKNSLMQDRDAASARAWPKMHTVNGYVNRTLPGLIGCHRKSVYWHVIGMGTTPEVHSIFLEGHTFLVRNHRQASLGISPITFLTAQTLLMDLGQFLLFCHIPSHQHDGMEAYVKVDSCPEEPQLRMKNNEEAEDYDDDLTDSEMDVVRFDDDNSPSIIQARSGAKKHPKTWVHYIAAEEEDWDYAPLVLAPDDRSYKSQYLNNGPQRIGRKYKKVRFMAYTDETFKTREAIQHESGILGPLLYGEVGDTLLIIFKNQASRPYNIYPHGITDVRPLYSRRLPKGVKHLKDFPILPGEIFKYKWTVTVEDGPTKSDPRCLTRYYSSFVNMERDLASGLIGPLLICYKESVDQRGNQIMSDKRNVILFSVFDENRSWYLTENIQRFLPNPAGVQLEDPEFQASNIMHSINGYVFDSLQLSVCLHEVAYWYILSIGAQTDFLSVFFSGYTFKHKMVYEDTLTLFPFSGETVFMSMENPGLWILGCHNSDFRNRGMTALLKVSSCDWNTGDYYEDSYEDISAYFDSKNNAIEPRSFSQNPPVLKRHQREGTRTTLQSDQEEIDYDDTISVEMKKEGFDIYDEDENQSPRSFQKKTRHYFIAAVERLWDYGMSSSPHVLRNRAQSGSVPQFKKVVFQEFTDGSFTQPLYRGELNEHLGLLGPYIRAEVEDNIMVTFRNQASRPYSFYSSLISYEEDQRQGAEPRKNFVKPNETKTYFWKVQHHMAPTKDEFDCKAWAYFSDVDLEKDVHSGLIGPLLVCHTNTLNPAHGRQVTVQEFALFFTIFDETKSWYFTENMERNCRAPCNIQMEDPTFKENYRFHAINGYIMDTLPGLVMAQDQRIRWYLLSMGSNENIHSIHFSGHVFTVRKKEEYKMALYNLYPGVFETVEMLPSKAGIWRVECLIGEHLHAGMSTLFLVYSNKCQNPLGMASGHIRDFQITASGQYGQWAPKLARLHYSGSINAWSTKEPFSWIKVDLLAPMIIHGIKTQGARQKFSSLYISQFIIMYSLDGKKWQTYRGNSTGTDMVFFGNVDSSGIKHNIFNPPIIARYIRLHPTHYSIRSTLRMELMGCDLNSCSMPLGMESKAISDAQITASSYFTNMFATWSPSKARLHLQGRSNAWRPQVNNPKEWLQVDFQKTMKVTGVTTQGVKSLDTSMYVKEFLISSSQDGHQWTLFFQNGKVKVFQGNQDSFTPVVNSLDPPLLTRYLRIHPQSWEHQIALRMEVLGCEAQDLY

SEQ ID NO: 1549 - DNA, 4371 bp, synthetic construct
  misc_feature 1..4371: note = Variant of human B-domain deleted Factor VIII
  source 1..4371: mol_type = other DNA
atgcagattgaactgtctacctgcttcttcctctgtttgctgaggttctgctttagcgccactagacggtactaccttggcgctgtggagctgtcctgggactatatgcagagtgatttgggagagcttcccgtcgacgcacgatttcctcctcgcgttccaaagtcatttccctttaacacaagccaggtgtacaagaagacgctcttcgtcgaattcaccgatcacctgttcaatatcgccaaacccagaccaccatggatgggtcttttggggcctaccatacaagcggaggtgtatgacacagttgttatcactctcaagaacatggcttctcatccggtaagtcttcacgcagtgggcgtgtcctactggaaagcttcagaaggagccgagtatgatgatcagacatcccagagggagaaagaagacgacaaggtatttccaggtgggtctcatacctatgtgtggcaagtgctcaaagagaatggccctatggcaagcgatccgccgtgtttgacttacagctacctttcacacgttgacctcgtcaaggacctcaactccgggttgattggagccttgttggtatgcagggaaggatctcttgccaaagagaagacacagaccctccacaagtttatccttctctttgctgtgttcgatgagggcaaaagttggcatagcgaaacgaagaattccctcatgcaggatcgcgacgcagccagcgccagagcttggcccaagatgcacactgtgaacggatatgtcaataggacgcttcctggcttgattgggtgtcatcggaaaagtgtctactggcacgtgatcggaatggggacaacaccagaggtccactccatatttctcgaaggccatggtttccttgttcgaaaccacagacaggcatccttggggatctctcccattacctttctcactgcccaaacgctccttatggacttgggtcagttccttctcttttgccatatcccgtcacaccagcatgatggtatggaagcttatgtgaaagtcgacagttgtcctgaggagccacagttgcgcatgaagaataatgaagaagccgaggattacgacgacgatctcaccgattctgagatggacgtggtgaggtttgatgacgacaactctccctccatcattcaagctcggagcggggcgaagaaacaccccaagacttgggtccactatatagcggcggaagaggaggattgggattacgctcctcttgtattggcaccagatgaccgctcatacaaaagccagtacctcaacaacggaccgcagagaattggccggaagtataagaaagtgcgatttatggcctatacagacgaaacctttaagacaagggaggccatccagcatgagagtgggattttgggacctcttctttacggcgaagttggtgataccctcctcatcatcttcaagaatcaagcttctcgcccctataacatttacccacacgggatcactgacgttaggcctttgtatagcagaagacttcccaaaggcgtgaagcatctcaaagacttccccattttgccaggcgagatctttaagtacaaatggaccgtcacagtggaagatggaccgactaaatcagaccctcgatgccttacgcggtactattcctccttcgtgaatatggagagagatttggcaagcggactcataggaccactcctcatctgttacaaggaatctgtagaccagaggggtaaccagattatgagtgataaacgcaatgtgatcctttttagcgtcttcgacgagaaccggtcctggtacttgaccgagaatatacaaaggttccttcccaaccccgcaggcgttcagttggaagaccctgagtttcaggccagcaatattatgcactcaatcaacggctatgtgtttgatagtctccagctttctgtttgcctccatgaagtagcctattggtacatcttgtcaattggtgctcaaacagacttcctctccgtcttcttctccggctacacctttaagcacaagatggtgtatgaggacactctcacactctttccattttctggagaaaccgtgttcatgagcatggagaatccaggcctttggatcttgggttgccacaacagtgattttcgcaatcggggaatgactgctctcctcaaagtcagcagctgtgattggaacacaggcgactattacgaagattcttacgaggacataagtgcctactttgactccaagaataacgccattgagcccagatcattctcccagaatcctcccgtgcttaaaaggcatcagcgcgaaggtaccagaactactcttcagtctgatcaagaggagattgactatgacgacaccattagcgtggaaatgaagaaggaggatttcgatatctatgacgaagatgagaaccagtctccgcggagctttcagaagaagacgcgacactacttcattgcagcagtcgaaaggctttgggactacggtatgtcatcatcccctcatgtgttgcgcaatagagctcagagtggaagtgttccacagttcaagaaagtcgtctttcaagagtttacagatggcagcttcacacagcctctctatcggggcgagcttaacgaacatttgggactccttggtccctatatccgagccgaagtggaggacaacattatggttacctttaggaatcaagcctctcgcccctacagcttctactcctccctcatcagttatgaggaggatcagagacaaggcgctgaaccacggaagaactttgtgaaaccgaatgagacgaagacctacttctggaaagtacagcaccacatggcccccacaaaagacgaattcgattgcaaagcatgggcgtatttttcagacgttgacttggagaaagatgtacattcaggacttattggtcctttgttggtgtgtcacactaacactctcaatccagcccatggcaggcaggtgacagtccaggaattcgctcttttctttaccatctttgatgagaccaagtcctggtacttcacggaaaacatggagcgcaattgcagagccccctgtaacatacagatggaggaccctacctttaaggaaaattatcggttccacgcaatcaacggatacattatggatacactccctggccttgtgatggctcaggaccaacgaatcaggtggtacctcctcagcatgggttctaatgagaacatacactccattcacttttcaggacatgtgttcactgtccggaagaaagaagagtataagatggccctctacaatttgtatccaggcgtgtttgagaccgttgaaatgcttccctctaaagctggcatctggagagtagagtgcttgatcggagaacatcttcacgcaggtatgagcaccttgttcctcgtgtacagcaacaaatgtcagaatccacttggcatggccagtggacacattcgcgactttcagatcacagcatctggccagtatggacaatgggccccaaagttggctcgcctccattactccggtagcataaatgcgtggtccactaaagaacctttcagctggattaaggtcgatcttcttgcccccatgatcatccacggcattaagacacagggagcgaggcagaaattctcctccctctacatctcacagttcattattatgtatagtttggacggcaagaagtggcaaacttatagaggtaacagtactggaacagacatggtgttcttcggcaacgttgatagctctggcatcaaacacaacatctttaatcctcccataatagctcggtacatcagattgcatccgacccactacagcattaggagtacactccgaatggagcttatgggttgcgacttgaattcctgttcaatgccactcggaatggagtctaaagccatctctgatgcacagataaccgccagtagctactttacgaacatgtttgctacgtggtcaccctctaaggcaaggcttcatttgcaaggccggtctaatgcctggagacctcaggtgaacaacccgaaagaatggctccaggtggactttcagaagaccatgaaagtaacaggtgtcactactcagggagttaagtccttggatactagcatgtatgtgaaggagttccttatttcctcatcacaagatggccaccagtggaccctcttctttcagaatggtaaggtcaaagtgtttcagggcaatcaagacagcttcacacccgtggtgaacagtcttgatcctccactcttgacacgataccttcgaatccatccacagtcttgggagcaccagattgcattgcgcatggaagtacttggatgcgaggctcaggacctctac

SEQ ID NO: 1550 - protein, 1457 aa, synthetic construct
  REGION 1..1457: note = Variant of human B-domain deleted Factor VIII
MQIELSTCFFLCLLRFCFSATRRYYLGAVELSWDYMQSDLGELPVDARFPPRVPKSFPFNTSQVYKKTLFVEFTDHLFNIAKPRPPWMGLLGPTIQAEVYDTVVITLKNMASHPVSLHAVGVSYWKASEGAEYDDQTSQREKEDDKVFPGGSHTYVWQVLKENGPMASDPPCLTYSYLSHVDLVKDLNSGLIGALLVCREGSLAKEKTQTLHKFILLFAVFDEGKSWHSETKNSLMQDRDAASARAWPKMHTVNGYVNRTLPGLIGCHRKSVYWHVIGMGTTPEVHSIFLEGHGFLVRNHRQASLGISPITFLTAQTLLMDLGQFLLFCHIPSHQHDGMEAYVKVDSCPEEPQLRMKNNEEAEDYDDDLTDSEMDVVRFDDDNSPSIIQARSGAKKHPKTWVHYIAAEEEDWDYAPLVLAPDDRSYKSQYLNNGPQRIGRKYKKVRFMAYTDETFKTREAIQHESGILGPLLYGEVGDTLLIIFKNQASRPYNIYPHGITDVRPLYSRRLPKGVKHLKDFPILPGEIFKYKWTVTVEDGPTKSDPRCLTRYYSSFVNMERDLASGLIGPLLICYKESVDQRGNQIMSDKRNVILFSVFDENRSWYLTENIQRFLPNPAGVQLEDPEFQASNIMHSINGYVFDSLQLSVCLHEVAYWYILSIGAQTDFLSVFFSGYTFKHKMVYEDTLTLFPFSGETVFMSMENPGLWILGCHNSDFRNRGMTALLKVSSCDWNTGDYYEDSYEDISAYFDSKNNAIEPRSFSQNPPVLKRHQREGTRTTLQSDQEEIDYDDTISVEMKKEDFDIYDEDENQSPRSFQKKTRHYFIAAVERLWDYGMSSSPHVLRNRAQSGSVPQFKKVVFQEFTDGSFTQPLYRGELNEHLGLLGPYIRAEVEDNIMVTFRNQASRPYSFYSSLISYEEDQRQGAEPRKNFVKPNETKTYFWKVQHHMAPTKDEFDCKAWAYFSDVDLEKDVHSGLIGPLLVCHTNTLNPAHGRQVTVQEFALFFTIFDETKSWYFTENMERNCRAPCNIQMEDPTFKENYRFHAINGYIMDTLPGLVMAQDQRIRWYLLSMGSNENIHSIHFSGHVFTVRKKEEYKMALYNLYPGVFETVEMLPSKAGIWRVECLIGEHLHAGMSTLFLVYSNKCQNPLGMASGHIRDFQITASGQYGQWAPKLARLHYSGSINAWSTKEPFSWIKVDLLAPMIIHGIKTQGARQKFSSLYISQFIIMYSLDGKKWQTYRGNSTGTDMVFFGNVDSSGIKHNIFNPPIIARYIRLHPTHYSIRSTLRMELMGCDLNSCSMPLGMESKAISDAQITASSYFTNMFATWSPSKARLHLQGRSNAWRPQVNNPKEWLQVDFQKTMKVTGVTTQGVKSLDTSMYVKEFLISSSQDGHQWTLFFQNGKVKVFQGNQDSFTPVVNSLDPPLLTRYLRIHPQSWEHQIALRMEVLGCEAQDLY

SEQ ID NO: 1551 - DNA, 4371 bp, synthetic construct
  misc_feature 1..4371: note = Variant of human B-domain deleted Factor VIII
  source 1..4371: mol_type = other DNA
atgcagattgaactgtctacctgcttcttcctctgtttgctgaggttctgctttagcgccactagacggtactaccttggcgctgtggagctgtcctgggactatatgcagagtgatttgggagagcttcccgtcgacgcacgatttcctcctcgcgttccaaagtcatttccctttaacacaagccaggtgtacaagaagacgctcttcgtcgaattcaccgatcacctgttcaatatcgccaaacccagaccaccatggatgggtcttttggggcctaccatacaagcggaggtgtatgacacagttgttatcactctcaagaacatggcttctcatccggtaagtcttcacgcagtgggcgtgtcctactggaaagcttcagaaggagccgagtatgatgatcagacatcccagagggagaaagaagacgacaaggtatttccaggtgggtctcatacctatgtgtggcaagtgctcaaagagaatggccctatggcaagcgatccgccgtgtttgacttacagctacctttcacacgttgacctcgtcaaggacctcaactccgggttgattggagccttgttggtatgcagggaaggatctcttgccaaagagaagacacagaccctccacaagtttatccttctctttgctgtgttcgatgagggcaaaagttggcatagcgaaacgaagaattccctcatgcaggatcgcgacgcagccagcgccagagcttggcccaagatgcacactgtgaacggatatgtcaataggacgcttcctggcttgattgggtgtcatcggaaaagtgtctactggcacgtgatcggaatggggacaacaccagaggtccactccatatttctcgaaggccataccttccttgttcgaaaccacagacaggcatccttggggatctctcccattacctttctcactgcccaaacgctccttatggacttgggtcagttccttctcttttgccatatcccgtcacaccagcatgatggtatggaagcttatgtgaaagtcgacagttgtcctgaggagccacagttgcgcatgaagaataatgaagaagccgaggattacgacgacgatctcaccgattctgagatggacgtggtgaggtttgatgacgacaactctccctccatcattcaagctcggagcggggcgaagaaacaccccaagacttgggtccactatatagcggcggaagaggaggattgggattacgctcctcttgtattggcaccagatgaccgctcatacaaaagccagtacctcaacaacggaccgcagagaattggccggaagtataagaaagtgcgatttatggcctatacagacgaaacctttaagacaagggaggccatccagcatgagagtgggattttgggacctcttctttacggcgaagttggtgataccctcctcatcatcttcaagaatcaagcttctcgcccctataacatttacccacacgggatcactgacgttaggcctttgtatagcagaagacttcccaaaggcgtgaagcatctcaaagacttccccattttgccaggcgagatctttaagtacaaatggaccgtcacagtggaagatggaccgactaaatcagaccctcgatgccttacgcggtactattcctccttcgtgaatatggagagagatttggcaagcggactcataggaccactcctcatctgttacaaggaatctgtagaccagaggggtaaccagattatgagtgataaacgcaatgtgatcctttttagcgtcttcgacgagaaccggtcctggtacttgaccgagaatatacaaaggttccttcccaaccccgcaggcgttcagttggaagaccctgagtttcaggccagcaatattatgcactcaatcaacggctatgtgtttgatagtctccagctttctgtttgcctccatgaagtagcctattggtacatcttgtcaattggtgctcaaacagacttcctctccgtcttcttctccggctacacctttaagcacaagatggtgtatgaggacactctcacactctttccattttctggagaaaccgtgttcatgagcatggagaatccaggcctttggatcttgggttgccacaacagtgattttcgcaatcggggaatgactgctctcctcaaagtcagcagctgtgattggaacacaggcgactattacgaagattcttacgaggacataagtgcctactttgactccaagaataacgccattgagcccagatcattctcccagaatcctcccgtgcttaaaaggcatcagcgcgaaggtaccagaactactcttcagtctgatcaagaggagattgactatgacgacaccattagcgtggaaatgaagtcggaggatttcgatatctatgacgaagatgagaaccagtctccgcggagctttcagaagaagacgcgacactacttcattgcagcagtcgaaaggctttgggactacggtatgtcatcatcccctcatgtgttgcgcaatagagctcagagtggaagtgttccacagttcaagaaagtcgtctttcaagagtttacagatggcagcttcacacagcctctctatcggggcgagcttaacgaacatttgggactccttggtccctatatccgagccgaagtggaggacaacattatggttacctttaggaatcaagcctctcgcccctacagcttctactcctccctcatcagttatgaggaggatcagagacaaggcgctgaaccacggaagaactttgtgaaaccgaatgagacgaagacctacttctggaaagtacagcaccacatggcccccacaaaagacgaattcgattgcaaagcatgggcgtatttttcagacgttgacttggagaaagatgtacattcaggacttattggtcctttgttggtgtgtcacactaacactctcaatccagcccatggcaggcaggtgacagtccaggaattcgctcttttctttaccatctttgatgagaccaagtcctggtacttcacggaaaacatggagcgcaattgcagagccccctgtaacatacagatggaggaccctacctttaaggaaaattatcggttccacgcaatcaacggatacattatggatacactccctggccttgtgatggctcaggaccaacgaatcaggtggtacctcctcagcatgggttctaatgagaacatacactccattcacttttcaggacatgtgttcactgtccggaagaaagaagagtataagatggccctctacaatttgtatccaggcgtgtttgagaccgttgaaatgcttccctctaaagctggcatctggagagtagagtgcttgatcggagaacatcttcacgcaggtatgagcaccttgttcctcgtgtacagcaacaaatgtcagaatccacttggcatggccagtggacacattcgcgactttcagatcacagcatctggccagtatggacaatgggccccaaagttggctcgcctccattactccggtagcataaatgcgtggtccactaaagaacctttcagctggattaaggtcgatcttcttgcccccatgatcatccacggcattaagacacagggagcgaggcagaaattctcctccctctacatctcacagttcattattatgtatagtttggacggcaagaagtggcaaacttatagaggtaacagtactggaacagacatggtgttcttcggcaacgttgatagctctggcatcaaacacaacatctttaatcctcccataatagctcggtacatcagattgcatccgacccactacagcattaggagtacactccgaatggagcttatgggttgcgacttgaattcctgttcaatgccactcggaatggagtctaaagccatctctgatgcacagataaccgccagtagctactttacgaacatgtttgctacgtggtcaccctctaaggcaaggcttcatttgcaaggccggtctaatgcctggagacctcaggtgaacaacccgaaagaatggctccaggtggactttcagaagaccatgaaagtaacaggtgtcactactcagggagttaagtccttggatactagcatgtatgtgaaggagttccttatttcctcatcacaagatggccaccagtggaccctcttctttcagaatggtaaggtcaaagtgtttcagggcaatcaagacagcttcacacccgtggtgaacagtcttgatcctccactcttgacacgataccttcgaatccatccacagtcttgggagcaccagattgcattgcgcatggaagtacttggatgcgaggctcaggacctctac

SEQ ID NO: 1552 - protein, 1457 aa, synthetic construct
  REGION 1..1457: note = Variant of human B-domain deleted Factor VIII
MQIELSTCFFLCLLRFCFSATRRYYLGAVELSWDYMQSDLGELPVDARFPPRVPKSFPFNTSQVYKKTLFVEFTDHLFNIAKPRPPWMGLLGPTIQAEVYDTVVITLKNMASHPVSLHAVGVSYWKASEGAEYDDQTSQREKEDDKVFPGGSHTYVWQVLKENGPMASDPPCLTYSYLSHVDLVKDLNSGLIGALLVCREGSLAKEKTQTLHKFILLFAVFDEGKSWHSETKNSLMQDRDAASARAWPKMHTVNGYVNRTLPGLIGCHRKSVYWHVIGMGTTPEVHSIFLEGHTFLVRNHRQASLGISPITFLTAQTLLMDLGQFLLFCHIPSHQHDGMEAYVKVDSCPEEPQLRMKNNEEAEDYDDDLTDSEMDVVRFDDDNSPSIIQARSGAKKHPKTWVHYIAAEEEDWDYAPLVLAPDDRSYKSQYLNNGPQRIGRKYKKVRFMAYTDETFKTREAIQHESGILGPLLYGEVGDTLLIIFKNQASRPYNIYPHGITDVRPLYSRRLPKGVKHLKDFPILPGEIFKYKWTVTVEDGPTKSDPRCLTRYYSSFVNMERDLASGLIGPLLICYKESVDQRGNQIMSDKRNVILFSVFDENRSWYLTENIQRFLPNPAGVQLEDPEFQASNIMHSINGYVFDSLQLSVCLHEVAYWYILSIGAQTDFLSVFFSGYTFKHKMVYEDTLTLFPFSGETVFMSMENPGLWILGCHNSDFRNRGMTALLKVSSCDWNTGDYYEDSYEDISAYFDSKNNAIEPRSFSQNPPVLKRHQREGTRTTLQSDQEEIDYDDTISVEMKSEDFDIYDEDENQSPRSFQKKTRHYFIAAVERLWDYGMSSSPHVLRNRAQSGSVPQFKKVVFQEFTDGSFTQPLYRGELNEHLGLLGPYIRAEVEDNIMVTFRNQASRPYSFYSSLISYEEDQRQGAEPRKNFVKPNETKTYFWKVQHHMAPTKDEFDCKAWAYFSDVDLEKDVHSGLIGPLLVCHTNTLNPAHGRQVTVQEFALFFTIFDETKSWYFTENMERNCRAPCNIQMEDPTFKENYRFHAINGYIMDTLPGLVMAQDQRIRWYLLSMGSNENIHSIHFSGHVFTVRKKEEYKMALYNLYPGVFETVEMLPSKAGIWRVECLIGEHLHAGMSTLFLVYSNKCQNPLGMASGHIRDFQITASGQYGQWAPKLARLHYSGSINAWSTKEPFSWIKVDLLAPMIIHGIKTQGARQKFSSLYISQFIIMYSLDGKKWQTYRGNSTGTDMVFFGNVDSSGIKHNIFNPPIIARYIRLHPTHYSIRSTLRMELMGCDLNSCSMPLGMESKAISDAQITASSYFTNMFATWSPSKARLHLQGRSNAWRPQVNNPKEWLQVDFQKTMKVTGVTTQGVKSLDTSMYVKEFLISSSQDGHQWTLFFQNGKVKVFQGNQDSFTPVVNSLDPPLLTRYLRIHPQSWEHQIALRMEVLGCEAQDLY

SEQ ID NO: 1553 - DNA, 4371 bp, synthetic construct
  misc_feature 1..4371: note = Variant of human B-domain deleted Factor VIII
  source 1..4371: mol_type = other DNA
atgcagattgaactgtctacctgcttcttcctctgtttgctgaggttctgctttagcgccactagacggtactaccttggcgctgtggagctgtcctgggactatatgcagagtgatttgggagagcttcccgtcgacgcacgatttcctcctcgcgttccaaagtcatttccctttaacacaagccaggtgtacaagaagacgctcttcgtcgaattcaccgatcacctgttcaatatcgccaaacccagaccaccatggatgggtcttttggggcctaccatacaagcggaggtgtatgacacagttgttatcactctcaagaacatggcttctcatccggtaagtcttcacgcagtgggcgtgtcctactggaaagcttcagaaggagccgagtatgatgatcagacatcccagagggagaaagaagacgacaaggtatttccaggtgggtctcatacctatgtgtggcaagtgctcaaagagaatggccctatggcaagcgatccgccgtgtttgacttacagctacctttcacacgttgacctcgtcaaggacctcaactccgggttgattggagccttgttggtatgcagggaaggatctcttgccaaagagaagacacagaccctccacaagtttatccttctctttgctgtgttcgatgagggcaaaagttggcatagcgaaacgaagaattccctcatgcaggatcgcgacgcagccagcgccagagcttggcccaagatgcacactgtgaacggatatgtcaataggacgcttcctggcttgattgggtgtcatcggaaaagtgtctactggcacgtgatcggaatggggacaacaccagaggtccactccatatttctcgaaggccataccttccttgttcgaaaccacagacaggcatccttggggatctctcccattacctttctcactgcccaaacgctccttatggacttgggtcagttccttctcttttgccatatcccgtcacaccagcatgatggtatggaagcttatgtgaaagtcgacagttgtcctgaggagccacagttgcgcatgaagaataatgaagaagccgaggattacgacgacgatctcaccgattctgagatggacgtggtgaggtttgatgacgacaactctccctccatcattcaagctcggagcggggcgaagaaacaccccaagacttgggtccactatatagcggcggaagaggaggattgggattacgctcctcttgtattggcaccagatgaccgctcatacaaaagccagtacctcaacaacggaccgcagagaattggccggaagtataagaaagtgcgatttatggcctatacagacgaaacctttaagacaagggaggccatccagcatgagagtgggattttgggacctcttctttacggcgaagttggtgataccctcctcatcatcttcaagaatcaagcttctcgcccctataacatttacccacacgggatcactgacgttaggcctttgtatagcagaagacttcccaaaggcgtgaagcatctcaaagacttccccattttgccaggcgagatctttaagtacaaatggaccgtcacagtggaagatggaccgactaaatcagaccctcgatgccttacgcggtactattcctccttcgtgaatatggagagagatttggcaagcggactcataggaccactcctcatctgttacaaggaatctgtagaccagaggggtaaccagattatgagtgataaacgcaatgtgatcctttttagcgtcttcgacgagaaccggtcctggtacttgaccgagaatatacaaaggttccttcccaaccccgcaggcgttcagttggaagaccctgagtttcaggccagcaatattatgcactcaatcaacggctatgtgtttgatagtctccagctttctgtttgcctccatgaagtagcctattggtacatcttgtcaattggtgctcaaacagacttcctctccgtcttcttctccggctacacctttaagcacaagatggtgtatgaggacactctcacactctttccattttctggagaaaccgtgttcatgagcatggagaatccaggcctttggatcttgggttgccacaacagtgattttcgcaatcggggaatgactgctctcctcaaagtcagcagctgtgattggaacacaggcgactattacgaagattcttacgaggacataagtgcctactttgactccaagaataacgccattgagcccagatcattctcccagaatcctcccgtgcttaaaaggcatcagcgcgaaggtaccagaactactcttcagtctgatcaagaggagattgactatgacgacaccattagcgtggaaatgaaggaggaggatttcgatatctatgacgaagatgagaaccagtctccgcggagctttcagaagaagacgcgacactacttcattgcagcagtcgaaaggctttgggactacggtatgtcatcatcccctcatgtgttgcgcaatagagctcagagtggaagtgttccacagttcaagaaagtcgtctttcaagagtttacagatggcagcttcacacagcctctctatcggggcgagcttaacgaacatttgggactccttggtccctatatccgagccgaagtggaggacaacattatggttacctttaggaatcaagcctctcgcccctacagcttctactcctccctcatcagttatgaggaggatcagagacaaggcgctgaaccacggaagaactttgtgaaaccgaatgagacgaagacctacttctggaaagtacagcaccacatggcccccacaaaagacgaattcgattgcaaagcatgggcgtatttttcagacgttgacttggagaaagatgtacattcaggacttattggtcctttgttggtgtgtcacactaacactctcaatccagcccatggcaggcaggtgacagtccaggaattcgctcttttctttaccatctttgatgagaccaagtcctggtacttcacggaaaacatggagcgcaattgcagagccccctgtaacatacagatggaggaccctacctttaaggaaaattatcggttccacgcaatcaacggatacattatggatacactccctggccttgtgatggctcaggaccaacgaatcaggtggtacctcctcagcatgggttctaatgagaacatacactccattcacttttcaggacatgtgttcactgtccggaagaaagaagagtataagatggccctctacaatttgtatccaggcgtgtttgagaccgttgaaatgcttccctctaaagctggcatctggagagtagagtgcttgatcggagaacatcttcacgcaggtatgagcaccttgttcctcgtgtacagcaacaaatgtcagaatccacttggcatggccagtggacacattcgcgactttcagatcacagcatctggccagtatggacaatgggccccaaagttggctcgcctccattactccggtagcataaatgcgtggtccactaaagaacctttcagctggattaaggtcgatcttcttgcccccatgatcatccacggcattaagacacagggagcgaggcagaaattctcctccctctacatctcacagttcattattatgtatagtttggacggcaagaagtggcaaacttatagaggtaacagtactggaacagacatggtgttcttcggcaacgttgatagctctggcatcaaacacaacatctttaatcctcccataatagctcggtacatcagattgcatccgacccactacagcattaggagtacactccgaatggagcttatgggttgcgacttgaattcctgttcaatgccactcggaatggagtctaaagccatctctgatgcacagataaccgccagtagctactttacgaacatgtttgctacgtggtcaccctctaaggcaaggcttcatttgcaaggccggtctaatgcctggagacctcaggtgaacaacccgaaagaatggctccaggtggactttcagaagaccatgaaagtaacaggtgtcactactcagggagttaagtccttggatactagcatgtatgtgaaggagttccttatttcctcatcacaagatggccaccagtggaccctcttctttcagaatggtaaggtcaaagtgtttcagggcaatcaagacagcttcacacccgtggtgaacagtcttgatcctccactcttgacacgataccttcgaatccatccacagtcttgggagcaccagattgcattgcgcatggaagtacttggatgcgaggctcaggacctctac

SEQ ID NO: 1554 - protein, 1457 aa, synthetic construct
  REGION 1..1457: note = Variant of human B-domain deleted Factor VIII
MQIELSTCFFLCLLRFCFSATRRYYLGAVELSWDYMQSDLGELPVDARFPPRVPKSFPFNTSQVYKKTLFVEFTDHLFNIAKPRPPWMGLLGPTIQAEVYDTVVITLKNMASHPVSLHAVGVSYWKASEGAEYDDQTSQREKEDDKVFPGGSHTYVWQVLKENGPMASDPPCLTYSYLSHVDLVKDLNSGLIGALLVCREGSLAKEKTQTLHKFILLFAVFDEGKSWHSETKNSLMQDRDAASARAWPKMHTVNGYVNRTLPGLIGCHRKSVYWHVIGMGTTPEVHSIFLEGHTFLVRNHRQASLGISPITFLTAQTLLMDLGQFLLFCHIPSHQHDGMEAYVKVDSCPEEPQLRMKNNEEAEDYDDDLTDSEMDVVRFDDDNSPSIIQARSGAKKHPKTWVHYIAAEEEDWDYAPLVLAPDDRSYKSQYLNNGPQRIGRKYKKVRFMAYTDETFKTREAIQHESGILGPLLYGEVGDTLLIIFKNQASRPYNIYPHGITDVRPLYSRRLPKGVKHLKDFPILPGEIFKYKWTVTVEDGPTKSDPRCLTRYYSSFVNMERDLASGLIGPLLICYKESVDQRGNQIMSDKRNVILFSVFDENRSWYLTENIQRFLPNPAGVQLEDPEFQASNIMHSINGYVFDSLQLSVCLHEVAYWYILSIGAQTDFLSVFFSGYTFKHKMVYEDTLTLFPFSGETVFMSMENPGLWILGCHNSDFRNRGMTALLKVSSCDWNTGDYYEDSYEDISAYFDSKNNAIEPRSFSQNPPVLKRHQREGTRTTLQSDQEEIDYDDTISVEMKEEDFDIYDEDENQSPRSFQKKTRHYFIAAVERLWDYGMSSSPHVLRNRAQSGSVPQFKKVVFQEFTDGSFTQPLYRGELNEHLGLLGPYIRAEVEDNIMVTFRNQASRPYSFYSSLISYEEDQRQGAEPRKNFVKPNETKTYFWKVQHHMAPTKDEFDCKAWAYFSDVDLEKDVHSGLIGPLLVCHTNTLNPAHGRQVTVQEFALFFTIFDETKSWYFTENMERNCRAPCNIQMEDPTFKENYRFHAINGYIMDTLPGLVMAQDQRIRWYLLSMGSNENIHSIHFSGHVFTVRKKEEYKMALYNLYPGVFETVEMLPSKAGIWRVECLIGEHLHAGMSTLFLVYSNKCQNPLGMASGHIRDFQITASGQYGQWAPKLARLHYSGSINAWSTKEPFSWIKVDLLAPMIIHGIKTQGARQKFSSLYISQFIIMYSLDGKKWQTYRGNSTGTDMVFFGNVDSSGIKHNIFNPPIIARYIRLHPTHYSIRSTLRMELMGCDLNSCSMPLGMESKAISDAQITASSYFTNMFATWSPSKARLHLQGRSNAWRPQVNNPKEWLQVDFQKTMKVTGVTTQGVKSLDTSMYVKEFLISSSQDGHQWTLFFQNGKVKVFQGNQDSFTPVVNSLDPPLLTRYLRIHPQSWEHQIALRMEVLGCEAQDLY

SEQ ID NO: 1555 - DNA, 4371 bp, synthetic construct
  misc_feature 1..4371: note = Variant of human B-domain deleted Factor VIII
  source 1..4371: mol_type = other DNA
atgcagattgaactgtctacctgcttcttcctctgtttgctgaggttctgctttagcgccactagacggtactaccttggcgctgtggagctgtcctgggactatatgcagagtgatttgggagagcttcccgtcgacgcacgatttcctcctcgcgttccaaagtcatttccctttaacacaagccaggtgtacaagaagacgctcttcgtcgaattcaccgatcacctgttcaatatcgccaaacccagaccaccatggatgggtcttttggggcctaccatacaagcggaggtgtatgacacagttgttatcactctcaagaacatggcttctcatccggtaagtcttcacgcagtgggcgtgtcctactggaaagcttcagaaggagccgagtatgatgatcagacatcccagagggagaaagaagacgacaaggtatttccaggtgggtctcatacctatgtgtggcaagtgctcaaagagaatggccctatggcaagcgatccgccgtgtttgacttacagctacctttcacacgttgacctcgtcaaggacctcaactccgggttgattggagccttgttggtatgcagggaaggatctcttgccaaagagaagacacagaccctccacaagtttatccttctctttgctgtgttcgatgagggcaaaagttggcatagcgaaacgaagaattccctcatgcaggatcgcgacgcagccagcgccagagcttggcccaagatgcacactgtgaacggatatgtcaataggacgcttcctggcttgattgggtgtcatcggaaaagtgtctactggcacgtgatcggaatggggacaacaccagaggtccactccatatttctcgaaggccataccttccttgttcgaaaccacagacaggcatccttggggatctctcccattacctttctcactgcccaaacgctccttatggacttgggtcagttccttctcttttgccatatcccgtcacaccagcatgatggtatggaagcttatgtgaaagtcgacagttgtcctgaggagccacagttgcgcatgaagaataatgaagaagccgaggattacgacgacgatctcaccgattctgagatggacgtggtgaggtttgatgacgacaactctccctccatcattcaagctcggagcggggcgaagaaacaccccaagacttgggtccactatatagcggcggaagaggaggattgggattacgctcctcttgtattggcaccagatgaccgctcatacaaaagccagtacctcaacaacggaccgcagagaattggccggaagtataagaaagtgcgatttatggcctatacagacgaaacctttaagacaagggaggccatccagcatgagagtgggattttgggacctcttctttacggcgaagttggtgataccctcctcatcatcttcaagaatcaagcttctcgcccctataacatttacccacacgggatcactgacgttaggcctttgtatagcagaagacttcccaaaggcgtgaagcatctcaaagacttccccattttgccaggcgagatctttaagtacaaatggaccgtcacagtggaagatggaccgactaaatcagaccctcgatgccttacgcggtactattcctccttcgtgaatatggagagagatttggcaagcggactcataggaccactcctcatctgttacaaggaatctgtagaccagaggggtaaccagattatgagtgataaacgcaatgtgatcctttttagcgtcttcgacgagaaccggtcctggtacttgaccgagaatatacaaaggttccttcccaaccccgcaggcgttcagttggaagaccctgagtttcaggccagcaatattatgcactcaatcaacggctatgtgtttgatagtctccagctttctgtttgcctccatgaagtagcctattggtacatcttgtcaattggtgctcaaacagacttcctctccgtcttcttctccggctacacctttaagcacaagatggtgtatgaggacactctcacactctttccattttctggagaaaccgtgttcatgagcatggagaatccaggcctttggatcttgggttgccacaacagtgattttcgcaatcggggaatgactgctctcctcaaagtcagcagctgtgattggaacacaggcgactattacgaagattcttacgaggacataagtgcctactttgactccaagaataacgccattgagcccagatcattctcccagaatcctcccgtgcttaaaaggcatcagcgcgaaggtaccagaactactcttcagtctgatcaagaggagattgactatgacgacaccattagcgtggaaatgaagaaggaggatttcgatatctatgacgaagatgggaaccagtctccgcggagctttcagaagaagacgcgacactacttcattgcagcagtcgaaaggctttgggactacggtatgtcatcatcccctcatgtgttgcgcaatagagctcagagtggaagtgttccacagttcaagaaagtcgtctttcaagagtttacagatggcagcttcacacagcctctctatcggggcgagcttaacgaacatttgggactccttggtccctatatccgagccgaagtggaggacaacattatggttacctttaggaatcaagcctctcgcccctacagcttctactcctccctcatcagttatgaggaggatcagagacaaggcgctgaaccacggaagaactttgtgaaaccgaatgagacgaagacctacttctggaaagtacagcaccacatggcccccacaaaagacgaattcgattgcaaagcatgggcgtatttttcagacgttgacttggagaaagatgtacattcaggacttattggtcctttgttggtgtgtcacactaacactctcaatccagcccatggcaggcaggtgacagtccaggaattcgctcttttctttaccatctttgatgagaccaagtcctggtacttcacggaaaacatggagcgcaattgcagagccccctgtaacatacagatggaggaccctacctttaaggaaaattatcggttccacgcaatcaacggatacattatggatacactccctggccttgtgatggctcaggaccaacgaatcaggtggtacctcctcagcatgggttctaatgagaacatacactccattcacttttcaggacatgtgttcactgtccggaagaaagaagagtataagatggccctctacaatttgtatccaggcgtgtttgagaccgttgaaatgcttccctctaaagctggcatctggagagtagagtgcttgatcggagaacatcttcacgcaggtatgagcaccttgttcctcgtgtacagcaacaaatgtcagaatccacttggcatggccagtggacacattcgcgactttcagatcacagcatctggccagtatggacaatgggccccaaagttggctcgcctccattactccggtagcataaatgcgtggtccactaaagaacctttcagctggattaaggtcgatcttcttgcccccatgatcatccacggcattaagacacagggagcgaggcagaaattctcctccctctacatctcacagttcattattatgtatagtttggacggcaagaagtggcaaacttatagaggtaacagtactggaacagacatggtgttcttcggcaacgttgatagctctggcatcaaacacaacatctttaatcctcccataatagctcggtacatcagattgcatccgacccactacagcattaggagtacactccgaatggagcttatgggttgcgacttgaattcctgttcaatgccactcggaatggagtctaaagccatctctgatgcacagataaccgccagtagctactttacgaacatgtttgctacgtggtcaccctctaaggcaaggcttcatttgcaaggccggtctaatgcctggagacctcaggtgaacaacccgaaagaatggctccaggtggactttcagaagaccatgaaagtaacaggtgtcactactcagggagttaagtccttggatactagcatgtatgtgaaggagttccttatttcctcatcacaagatggccaccagtggaccctcttctttcagaatggtaaggtcaaagtgtttcagggcaatcaagacagcttcacacccgtggtgaacagtcttgatcctccactcttgacacgataccttcgaatccatccacagtcttgggagcaccagattgcattgcgcatggaagtacttggatgcgaggctcaggacctctac

SEQ ID NO: 1556 - protein, 1457 aa, synthetic construct
  REGION 1..1457: note = Variant of human B-domain deleted Factor VIII
MQIELSTCFFLCLLRFCFSATRRYYLGAVELSWDYMQSDLGELPVDARFPPRVPKSFPFNTSQVYKKTLFVEFTDHLFNIAKPRPPWMGLLGPTIQAEVYDTVVITLKNMASHPVSLHAVGVSYWKASEGAEYDDQTSQREKEDDKVFPGGSHTYVWQVLKENGPMASDPPCLTYSYLSHVDLVKDLNSGLIGALLVCREGSLAKEKTQTLHKFILLFAVFDEGKSWHSETKNSLMQDRDAASARAWPKMHTVNGYVNRTLPGLIGCHRKSVYWHVIGMGTTPEVHSIFLEGHTFLVRNHRQASLGISPITFLTAQTLLMDLGQFLLFCHIPSHQHDGMEAYVKVDSCPEEPQLRMKNNEEAEDYDDDLTDSEMDVVRFDDDNSPSIIQARSGAKKHPKTWVHYIAAEEEDWDYAPLVLAPDDRSYKSQYLNNGPQRIGRKYKKVRFMAYTDETFKTREAIQHESGILGPLLYGEVGDTLLIIFKNQASRPYNIYPHGITDVRPLYSRRLPKGVKHLKDFPILPGEIFKYKWTVTVEDGPTKSDPRCLTRYYSSFVNMERDLASGLIGPLLICYKESVDQRGNQIMSDKRNVILFSVFDENRSWYLTENIQRFLPNPAGVQLEDPEFQASNIMHSINGYVFDSLQLSVCLHEVAYWYILSIGAQTDFLSVFFSGYTFKHKMVYEDTLTLFPFSGETVFMSMENPGLWILGCHNSDFRNRGMTALLKVSSCDWNTGDYYEDSYEDISAYFDSKNNAIEPRSFSQNPPVLKRHQREGTRTTLQSDQEEIDYDDTISVEMKKEDFDIYDEDGNQSPRSFQKKTRHYFIAAVERLWDYGMSSSPHVLRNRAQSGSVPQFKKVVFQEFTDGSFTQPLYRGELNEHLGLLGPYIRAEVEDNIMVTFRNQASRPYSFYSSLISYEEDQRQGAEPRKNFVKPNETKTYFWKVQHHMAPTKDEFDCKAWAYFSDVDLEKDVHSGLIGPLLVCHTNTLNPAHGRQVTVQEFALFFTIFDETKSWYFTENMERNCRAPCNIQMEDPTFKENYRFHAINGYIMDTLPGLVMAQDQRIRWYLLSMGSNENIHSIHFSGHVFTVRKKEEYKMALYNLYPGVFETVEMLPSKAGIWRVECLIGEHLHAGMSTLFLVYSNKCQNPLGMASGHIRDFQITASGQYGQWAPKLARLHYSGSINAWSTKEPFSWIKVDLLAPMIIHGIKTQGARQKFSSLYISQFIIMYSLDGKKWQTYRGNSTGTDMVFFGNVDSSGIKHNIFNPPIIARYIRLHPTHYSIRSTLRMELMGCDLNSCSMPLGMESKAISDAQITASSYFTNMFATWSPSKARLHLQGRSNAWRPQVNNPKEWLQVDFQKTMKVTGVTTQGVKSLDTSMYVKEFLISSSQDGHQWTLFFQNGKVKVFQGNQDSFTPVVNSLDPPLLTRYLRIHPQSWEHQIALRMEVLGCEAQDLY

SEQ ID NO: 1557 - DNA, 4371 bp, synthetic construct
  misc_feature 1..4371: note = Variant of human B-domain deleted Factor VIII
  source 1..4371: mol_type = other DNA
atgcagattgaactgtctacctgcttcttcctctgtttgctgaggttctgctttagcgccactagacggtactaccttggcgctgtggagctgtcctgggactatatgcagagtgatttgggagagcttcccgtcgacgcacgatttcctcctcgcgttccaaagtcatttccctttaacacaagccaggtgtacaagaagacgctcttcgtcgaattcaccgatcacctgttcaatatcgccaaacccagaccaccatggatgggtcttttggggcctaccatacaagcggaggtgtatgacacagttgttatcactctcaagaacatggcttctcatccggtaagtcttcacgcagtgggcgtgtcctactggaaagcttcagaaggagccgagtatgatgatcagacatcccagagggagaaagaagacgacaaggtatttccaggtgggtctcatacctatgtgtggcaagtgctcaaagagaatggccctatggcaagcgatccgccgtgtttgacttacagctacctttcacacgttgacctcgtcaaggacctcaactccgggttgattggagccttgttggtatgcagggaaggatctcttgccaaagagaagacacagaccctccacaagtttatccttctctttgctgtgttcgatgagggcaaaagttggcatagcgaaacgaagaattccctcatgcaggatcgcgacgcagccagcgccagagcttggcccaagatgcacactgtgaacggatatgtcaataggacgcttcctggcttgattgggtgtcatcggaaaagtgtctactggcacgtgatcggaatggggacaacaccagaggtccactccatatttctcgaaggccataccttccttgttcgaaaccacagacaggcatccttggggatctctcccattacctttctcactgcccaaacgctccttatggacttgggtcagttccttctcttttgccatatcccgtcacaccagcatgatggtatggaagcttatgtgaaagtcgacagttgtcctgaggagccacagttgcgcatgaagaataatgaagaagccgaggattacgacgacgatctcaccgattctgagatggacgtggtgaggtttgatgacgacaactctccctccatcattcaagctcggagcggggcgaagaaacaccccaagacttgggtccactatatagcggcggaagaggaggattgggattacgctcctcttgtattggcaccagatgaccgctcatacaaaagccagtacctcaacaacggaccgcagagaattggccggaagtataagaaagtgcgatttatggcctatacagacgaaacctttaagacaagggaggccatccagcatgagagtgggattttgggacctcttctttacggcgaagttggtgataccctcctcatcatcttcaagaatcaagcttctcgcccctataacatttacccacacgggatcactgacgttaggcctttgtatagcagaagacttcccaaaggcgtgaagcatctcaaagacttccccattttgccaggcgagatctttaagtacaaatggaccgtcacagtggaagatggaccgactaaatcagaccctcgatgccttacgcggtactattcctccttcgtgaatatggagagagatttggcaagcggactcataggaccactcctcatctgttacaaggaatctgtagaccagaggggtaaccagattatgagtgataaacgcaatgtgatcctttttagcgtcttcgacgagaaccggtcctggtacttgaccgagaatatacaaaggttccttcccaaccccgcaggcgttcagttggaagaccctgagtttcaggccagcaatattatgcactcaatcaacggctatgtgtttgatagtctccagctttctgtttgcctccatgaagtagcctattggtacatcttgtcaattggtgctcaaacagacttcctctccgtcttcttctccggctacacctttaagcacaagatggtgtatgaggacactctcacactctttccattttctggagaaaccgtgttcatgagcatggagaatccaggcctttggatcttgggttgccacaacagtgattttcgcaatcggggaatgactgctctcctcaaagtcagcagctgtgattggaacacaggcgactattacgaagattcttacgaggacataagtgcctactttgactccaagaataacgccattgagcccagatcattctcccagaatcctcccgtgcttaaaaggcatcagcgcgaaggtaccagaactactcttcagtctgatcaagaggagattgactatgacatgaccattagcgtggaaatgaagaaggaggatttcgatatctatgacgaagatgagaaccagtctccgcggagctttcagaagaagacgcgacactacttcattgcagcagtcgaaaggctttgggactacggtatgtcatcatcccctcatgtgttgcgcaatagagctcagagtggaagtgttccacagttcaagaaagtcgtctttcaagagtttacagatggcagcttcacacagcctctctatcggggcgagcttaacgaacatttgggactccttggtccctatatccgagccgaagtggaggacaacattatggttacctttaggaatcaagcctctcgcccctacagcttctactcctccctcatcagttatgaggaggatcagagacaaggcgctgaaccacggaagaactttgtgaaaccgaatgagacgaagacctacttctggaaagtacagcaccacatggcccccacaaaagacgaattcgattgcaaagcatgggcgtatttttcagacgttgacttggagaaagatgtacattcaggacttattggtcctttgttggtgtgtcacactaacactctcaatccagcccatggcaggcaggtgacagtccaggaattcgctcttttctttaccatctttgatgagaccaagtcctggtacttcacggaaaacatggagcgcaattgcagagccccctgtaacatacagatggaggaccctacctttaaggaaaattatcggttccacgcaatcaacggatacattatggatacactccctggccttgtgatggctcaggaccaacgaatcaggtggtacctcctcagcatgggttctaatgagaacatacactccattcacttttcaggacatgtgttcactgtccggaagaaagaagagtataagatggccctctacaatttgtatccaggcgtgtttgagaccgttgaaatgcttccctctaaagctggcatctggagagtagagtgcttgatcggagaacatcttcacgcaggtatgagcaccttgttcctcgtgtacagcaacaaatgtcagaatccacttggcatggccagtggacacattcgcgactttcagatcacagcatctggccagtatggacaatgggccccaaagttggctcgcctccattactccggtagcataaatgcgtggtccactaaagaacctttcagctggattaaggtcgatcttcttgcccccatgatcatccacggcattaagacacagggagcgaggcagaaattctcctccctctacatctcacagttcattattatgtatagtttggacggcaagaagtggcaaacttatagaggtaacagtactggaacagacatggtgttcttcggcaacgttgatagctctggcatcaaacacaacatctttaatcctcccataatagctcggtacatcagattgcatccgacccactacagcattaggagtacactccgaatggagcttatgggttgcgacttgaattcctgttcaatgccactcggaatggagtctaaagccatctctgatgcacagataaccgccagtagctactttacgaacatgtttgctacgtggtcaccctctaaggcaaggcttcatttgcaaggccggtctaatgcctggagacctcaggtgaacaacccgaaagaatggctccaggtggactttcagaagaccatgaaagtaacaggtgtcactactcagggagttaagtccttggatactagcatgtatgtgaaggagttccttatttcctcatcacaagatggccaccagtggaccctcttctttcagaatggtaaggtcaaagtgtttcagggcaatcaagacagcttcacacccgtggtgaacagtcttgatcctccactcttgacacgataccttcgaatccatccacagtcttgggagcaccagattgcattgcgcatggaagtacttggatgcgaggctcaggacctctac

SEQ ID NO: 1558 - protein, 1457 aa, synthetic construct
  REGION 1..1457: note = Variant of human B-domain deleted Factor VIII
MQIELSTCFFLCLLRFCFSATRRYYLGAVELSWDYMQSDLGELPVDARFPPRVPKSFPFNTSQVYKKTLFVEFTDHLFNIAKPRPPWMGLLGPTIQAEVYDTVVITLKNMASHPVSLHAVGVSYWKASEGAEYDDQTSQREKEDDKVFPGGSHTYVWQVLKENGPMASDPPCLTYSYLSHVDLVKDLNSGLIGALLVCREGSLAKEKTQTLHKFILLFAVFDEGKSWHSETKNSLMQDRDAASARAWPKMHTVNGYVNRTLPGLIGCHRKSVYWHVIGMGTTPEVHSIFLEGHTFLVRNHRQASLGISPITFLTAQTLLMDLGQFLLFCHIPSHQHDGMEAYVKVDSCPEEPQLRMKNNEEAEDYDDDLTDSEMDVVRFDDDNSPSIIQARSGAKKHPKTWVHYIAAEEEDWDYAPLVLAPDDRSYKSQYLNNGPQRIGRKYKKVRFMAYTDETFKTREAIQHESGILGPLLYGEVGDTLLIIFKNQASRPYNIYPHGITDVRPLYSRRLPKGVKHLKDFPILPGEIFKYKWTVTVEDGPTKSDPRCLTRYYSSFVNMERDLASGLIGPLLICYKESVDQRGNQIMSDKRNVILFSVFDENRSWYLTENIQRFLPNPAGVQLEDPEFQASNIMHSINGYVFDSLQLSVCLHEVAYWYILSIGAQTDFLSVFFSGYTFKHKMVYEDTLTLFPFSGETVFMSMENPGLWILGCHNSDFRNRGMTALLKVSSCDWNTGDYYEDSYEDISAYFDSKNNAIEPRSFSQNPPVLKRHQREGTRTTLQSDQEEIDYDMTISVEMKKEDFDIYDEDENQSPRSFQKKTRHYFIAAVERLWDYGMSSSPHVLRNRAQSGSVPQFKKVVFQEFTDGSFTQPLYRGELNEHLGLLGPYIRAEVEDNIMVTFRNQASRPYSFYSSLISYEEDQRQGAEPRKNFVKPNETKTYFWKVQHHMAPTKDEFDCKAWAYFSDVDLEKDVHSGLIGPLLVCHTNTLNPAHGRQVTVQEFALFFTIFDETKSWYFTENMERNCRAPCNIQMEDPTFKENYRFHAINGYIMDTLPGLVMAQDQRIRWYLLSMGSNENIHSIHFSGHVFTVRKKEEYKMALYNLYPGVFETVEMLPSKAGIWRVECLIGEHLHAGMSTLFLVYSNKCQNPLGMASGHIRDFQITASGQYGQWAPKLARLHYSGSINAWSTKEPFSWIKVDLLAPMIIHGIKTQGARQKFSSLYISQFIIMYSLDGKKWQTYRGNSTGTDMVFFGNVDSSGIKHNIFNPPIIARYIRLHPTHYSIRSTLRMELMGCDLNSCSMPLGMESKAISDAQITASSYFTNMFATWSPSKARLHLQGRSNAWRPQVNNPKEWLQVDFQKTMKVTGVTTQGVKSLDTSMYVKEFLISSSQDGHQWTLFFQNGKVKVFQGNQDSFTPVVNSLDPPLLTRYLRIHPQSWEHQIALRMEVLGCEAQDLY

SEQ ID NO: 1559 - DNA, 4371 bp, synthetic construct
  misc_feature 1..4371: note = Variant of human B-domain deleted Factor VIII
  source 1..4371: mol_type = other DNA
atgcagattgaactgtctacctgcttcttcctctgtttgctgaggttctgctttagcgccactagacggtactaccttggcgctgtggagctgtcctgggactatatgcagagtgatttgggagagcttcccgtcgacgcacgatttcctcctcgcgttccaaagtcatttccctttaacacaagccaggtgtacaagaagacgctcttcgtcgaattcaccgatcacctgttcaatatcgccaaacccagaccaccatggatgggtcttttggggcctaccatacaagcggaggtgtatgacacagttgttatcactctcaagaacatggcttctcatccggtaagtcttcacgcagtgggcgtgtcctactggaaagcttcagaaggagccgagtatgatgatcagacatcccagagggagaaagaagacgacaaggtatttccaggtgggtctcatacctatgtgtggcaagtgctcaaagagaatggccctatggcaagcgatccgccgtgtttgacttacagctacctttcacacgttgacctcgtcaaggacctcaactccgggttgattggagccttgttggtatgcagggaaggatctcttgccaaagagaagacacagaccctccacaagtttatccttctctttgctgtgttcgatgagggcaaaagttggcatagcgaaacgaagaattccctcatgcaggatcgcgacgcagccagcgccagagcttggcccaagatgcacactgtgaacggatatgtcaataggacgcttcctggcttgattgggtgtcatcggaaaagtgtctactggcacgtgatcggaatggggacaacaccagaggtccactccatatttctcgaaggccataccttccttgttcgaaaccacagacaggcatccttggggatctctcccattacctttctcactgcccaaacgctccttatggacttgggtcagttccttctcttttgccatatcccgtcacaccagcatgatggtatggaagcttatgtgaaagtcgacagttgtcctgaggagccacagttgcgcatgaagaataatgaagaagccgaggattacgacgacgatctcaccgattctgagatggacgtggtgaggtttgatgacgacaactctccctccatcattcaagctcggagcggggcgaagaaacaccccaagacttgggtccactatatagcggcggaagaggaggattgggattacgctcctcttgtattggcaccagatgaccgctcatacaaaagccagtacctcaacaacggaccgcagagaattggccggaagtataagaaagtgcgatttatggcctatacagacgaaacctttaagacaagggaggccatccagcatgagagtgggattttgggacctcttctttacggcgaagttggtgataccctcctcatcatcttcaagaatcaagcttctcgcccctataacatttacccacacgggatcactgacgttaggcctttgtatagcagaagacttcccaaaggcgtgaagcatctcaaagacttccccattttgccaggcgagatctttaagtacaaatggaccgtcacagtggaagatggaccgactaaatcagaccctcgatgccttacgcggtactattcctccttcgtgaatatggagagagatttggcaagcggactcataggaccactcctcatctgttacaaggaatctgtagaccagaggggtaaccagattatgagtgataaacgcaatgtgatcctttttagcgtcttcgacgagaaccggtcctggtacttgaccgagaatatacaaaggttccttcccaaccccgcaggcgttcagttggaagaccctgagtttcaggccagcaatattatgcactcaatcaacggctatgtgtttgatagtctccagctttctgtttgcctccatgaagtagcctattggtacatcttgtcaattggtgctcaaacagacttcctctccgtcttcttctccggctacacctttaagcacaagatggtgtatgaggacactctcacactctttccattttctggagaaaccgtgttcatgagcatggagaatccaggcctttggatcttgggttgccacaacagtgattttcgcaatcggggaatgactgctctcctcaaagtcagcagctgtgattggaacacaggcgacgtgtacgaagattcttacgaggacataagtgcctactttgactccaagaataacgccattgagcccagatcattctcccagaatcctcccgtgcttaaaaggcatcagcgcgaaggtaccagaactactcttcagtctgatcaagaggagattgactatgacgacaccattagcgtggaaatgaagaaggaggatttcgatatctatgacgaagatgagaaccagtctccgcggagctttcagaagaagacgcgacactacttcattgcagcagtcgaaaggctttgggactacggtatgtcatcatcccctcatgtgttgcgcaatagagctcagagtggaagtgttccacagttcaagaaagtcgtctttcaagagtttacagatggcagcttcacacagcctctctatcggggcgagcttaacgaacatttgggactccttggtccctatatccgagccgaagtggaggacaacattatggttacctttaggaatcaagcctctcgcccctacagcttctactcctccctcatcagttatgaggaggatcagagacaaggcgctgaaccacggaagaactttgtgaaaccgaatgagacgaagacctacttctggaaagtacagcaccacatggcccccacaaaagacgaattcgattgcaaagcatgggcgtatttttcagacgttgacttggagaaagatgtacattcaggacttattggtcctttgttggtgtgtcacactaacactctcaatccagcccatggcaggcaggtgacagtccaggaattcgctcttttctttaccatctttgatgagaccaagtcctggtacttcacggaaaacatggagcgcaattgcagagccccctgtaacatacagatggaggaccctacctttaaggaaaattatcggttccacgcaatcaacggatacattatggatacactccctggccttgtgatggctcaggaccaacgaatcaggtggtacctcctcagcatgggttctaatgagaacatacactccattcacttttcaggacatgtgttcactgtccggaagaaagaagagtataagatggccctctacaatttgtatccaggcgtgtttgagaccgttgaaatgcttccctctaaagctggcatctggagagtagagtgcttgatcggagaacatcttcacgcaggtatgagcaccttgttcctcgtgtacagcaacaaatgtcagaatccacttggcatggccagtggacacattcgcgactttcagatcacagcatctggccagtatggacaatgggccccaaagttggctcgcctccattactccggtagcataaatgcgtggtccactaaagaacctttcagctggattaaggtcgatcttcttgcccccatgatcatccacggcattaagacacagggagcgaggcagaaattctcctccctctacatctcacagttcattattatgtatagtttggacggcaagaagtggcaaacttatagaggtaacagtactggaacagacatggtgttcttcggcaacgttgatagctctggcatcaaacacaacatctttaatcctcccataatagctcggtacatcagattgcatccgacccactacagcattaggagtacactccgaatggagcttatgggttgcgacttgaattcctgttcaatgccactcggaatggagtctaaagccatctctgatgcacagataaccgccagtagctactttacgaacatgtttgctacgtggtcaccctctaaggcaaggcttcatttgcaaggccggtctaatgcctggagacctcaggtgaacaacccgaaagaatggctccaggtggactttcagaagaccatgaaagtaacaggtgtcactactcagggagttaagtccttggatactagcatgtatgtgaaggagttccttatttcctcatcacaagatggccaccagtggaccctcttctttcagaatggtaaggtcaaagtgtttcagggcaatcaagacagcttcacacccgtggtgaacagtcttgatcctccactcttgacacgataccttcgaatccatccacagtcttgggagcaccagattgcattgcgcatggaagtacttggatgcgaggctcaggacctctac

SEQ ID NO: 1560 - protein, 1457 aa, synthetic construct
  REGION 1..1457: note = Variant of human B-domain deleted Factor VIII
MQIELSTCFFLCLLRFCFSATRRYYLGAVELSWDYMQSDLGELPVDARFPPRVPKSFPFNTSQVYKKTLFVEFTDHLFNIAKPRPPWMGLLGPTIQAEVYDTVVITLKNMASHPVSLHAVGVSYWKASEGAEYDDQTSQREKEDDKVFPGGSHTYVWQVLKENGPMASDPPCLTYSYLSHVDLVKDLNSGLIGALLVCREGSLAKEKTQTLHKFILLFAVFDEGKSWHSETKNSLMQDRDAASARAWPKMHTVNGYVNRTLPGLIGCHRKSVYWHVIGMGTTPEVHSIFLEGHTFLVRNHRQASLGISPITFLTAQTLLMDLGQFLLFCHIPSHQHDGMEAYVKVDSCPEEPQLRMKNNEEAEDYDDDLTDSEMDVVRFDDDNSPSIIQARSGAKKHPKTWVHYIAAEEEDWDYAPLVLAPDDRSYKSQYLNNGPQRIGRKYKKVRFMAYTDETFKTREAIQHESGILGPLLYGEVGDTLLIIFKNQASRPYNIYPHGITDVRPLYSRRLPKGVKHLKDFPILPGEIFKYKWTVTVEDGPTKSDPRCLTRYYSSFVNMERDLASGLIGPLLICYKESVDQRGNQIMSDKRNVILFSVFDENRSWYLTENIQRFLPNPAGVQLEDPEFQASNIMHSINGYVFDSLQLSVCLHEVAYWYILSIGAQTDFLSVFFSGYTFKHKMVYEDTLTLFPFSGETVFMSMENPGLWILGCHNSDFRNRGMTALLKVSSCDWNTGDVYEDSYEDISAYFDSKNNAIEPRSFSQNPPVLKRHQREGTRTTLQSDQEEIDYDDTISVEMKKEDFDIYDEDENQSPRSFQKKTRHYFIAAVERLWDYGMSSSPHVLRNRAQSGSVPQFKKVVFQEFTDGSFTQPLYRGELNEHLGLLGPYIRAEVEDNIMVTFRNQASRPYSFYSSLISYEEDQRQGAEPRKNFVKPNETKTYFWKVQHHMAPTKDEFDCKAWAYFSDVDLEKDVHSGLIGPLLVCHTNTLNPAHGRQVTVQEFALFFTIFDETKSWYFTENMERNCRAPCNIQMEDPTFKENYRFHAINGYIMDTLPGLVMAQDQRIRWYLLSMGSNENIHSIHFSGHVFTVRKKEEYKMALYNLYPGVFETVEMLPSKAGIWRVECLIGEHLHAGMSTLFLVYSNKCQNPLGMASGHIRDFQITASGQYGQWAPKLARLHYSGSINAWSTKEPFSWIKVDLLAPMIIHGIKTQGARQKFSSLYISQFIIMYSLDGKKWQTYRGNSTGTDMVFFGNVDSSGIKHNIFNPPIIARYIRLHPTHYSIRSTLRMELMGCDLNSCSMPLGMESKAISDAQITASSYFTNMFATWSPSKARLHLQGRSNAWRPQVNNPKEWLQVDFQKTMKVTGVTTQGVKSLDTSMYVKEFLISSSQDGHQWTLFFQNGKVKVFQGNQDSFTPVVNSLDPPLLTRYLRIHPQSWEHQIALRMEVLGCEAQDLY

SEQ ID NO: 1561 - DNA, 4371 bp, synthetic construct
  misc_feature 1..4371: note = Variant of human B-domain deleted Factor VIII
  source 1..4371: mol_type = other DNA
atgcagattgaactgtctacctgcttcttcctctgtttgctgaggttctgctttagcgccactagacggtactaccttggcgctgtggagctgtcctgggactatatgcagagtgatttgggagagcttcccgtcgacgcacgatttcctcctcgcgttccaaagtcatttccctttaacacaagccaggtgtacaagaagacgctcttcgtcgaattcaccgatcacctgttcaatatcgccaaacccagaccaccatggatgggtcttttggggcctaccatacaagcggaggtgtatgacacagttgttatcactctcaagaacatggcttctcatccggtaagtcttcacgcagtgggcgtgtcctactggaaagcttcagaaggagccgagtatgatgatcagacatcccagagggagaaagaagacgacaaggtatttccaggtgggtctcatacctatgtgtggcaagtgctcaaagagaatggccctatggcaagcgatccgccgtgtttgacttacagctacctttcacacgttgacctcgtcaaggacctcaactccgggttgattggagccttgttggtatgcagggaaggatctcttgccaaagagaagacacagaccctccacaagtttatccttctctttgctgtgttcgatgagggcaaaagttggcatagcgaaacgaagaattccctcatgcaggatcgcgacgcagccagcgccagagcttggcccaagatgcacactgtgaacggatatgtcaataggacgcttcctggcttgattgggtgtcatcggaaaagtgtctactggcacgtgatcggaatggggacaacaccagaggtccactccatatttctcgaaggccataccttccttgttcgaaaccacagacaggcatccttggggatctctcccattacctttctcactgcccaaacgctccttatggacttgggtcagttccttctcttttgccatatcccgtcacaccagcatgatggtatggaagcttatgtgaaagtcgacagttgtcctgaggagccacagttgcgcatgaagaataatgaagaagccgaggattacgacgacgatctcaccgattctgagatggacgtggtgaggtttgatgacgacaactctccctccatcattcaagctcggagcggggcgaagaaacaccccaagacttgggtccactatatagcggcggaagaggaggattgggattacgctcctcttgtattggcaccagatgaccgctcatacaaaagccagtacctcaacaacggaccgcagagaattggccggaagtataagaaagtgcgatttatggcctatacagacgaaacctttaagacaagggaggccatccagcatgagagtgggattttgggacctcttctttacggcgaagttggtgataccctcctcatcatcttcaagaatcaagcttctcgcccctataacatttacccacacgggatcactgacgttaggcctttgtatagcagaagacttcccaaaggcgtgaagcatctcaaagacttccccattttgccaggcgagatctttaagtacaaatggaccgtcacagtggaagatggaccgactaaatcagaccctcgatgccttacgcggtactattcctccttcgtgaatatggagagagatttggcaagcggactcataggaccactcctcatctgttacaaggaatctgtagaccagaggggtaaccagattatgagtgataaacgcaatgtgatcctttttagcgtcttcgacgagaaccggtcctggtacttgaccgagaatatacaaaggttccttcccaaccccgcaggcgttcagttggaagaccctgagtttcaggccagcaatattatgcactcaatcaacggctatgtgtttgatagtctccagctttctgtttgcctccatgaagtagcctattggtacatcttgtcaattggtgctcaaacagacttcctctccgtcttcttctccggctacacctttaagcacaagatggtgtatgaggacactctcacactctttccattttctggagaaaccgtgttcatgagcatggagaatccaggcctttggatcttgggttgccacaacagtgattttcgcaatcggggaatgactgctctcctcaaagtcagcagctgtgattggaacacaggcgactattacgaagattcttacgaggacataagtgcctactttgactccaagaataacgccattgagcccagatcattctcccagaatcctcccgtgcttaaaaggcatcagcgcgaaggtaccagaactactcttcagtctgatcaagaggagattgactatgacgacaccattagcgtggaaatgaagaaggaggatttcgatatccaggacgaagatgagaaccagtctccgcggagctttcagaagaagacgcgacactacttcattgcagcagtcgaaaggctttgggactacggtatgtcatcatcccctcatgtgttgcgcaatagagctcagagtggaagtgttccacagttcaagaaagtcgtctttcaagagtttacagatggcagcttcacacagcctctctatcggggcgagcttaacgaacatttgggactccttggtccctatatccgagccgaagtggaggacaacattatggttacctttaggaatcaagcctctcgcccctacagcttctactcctccctcatcagttatgaggaggatcagagacaaggcgctgaaccacggaagaactttgtgaaaccgaatgagacgaagacctacttctggaaagtacagcaccacatggcccccacaaaagacgaattcgattgcaaagcatgggcgtatttttcagacgttgacttggagaaagatgtacattcaggacttattggtcctttgttggtgtgtcacactaacactctcaatccagcccatggcaggcaggtgacagtccaggaattcgctcttttctttaccatctttgatgagaccaagtcctggtacttcacggaaaacatggagcgcaattgcagagccccctgtaacatacagatggaggaccctacctttaaggaaaattatcggttccacgcaatcaacggatacattatggatacactccctggccttgtgatggctcaggaccaacgaatcaggtggtacctcctcagcatgggttctaatgagaacatacactccattcacttttcaggacatgtgttcactgtccggaagaaagaagagtataagatggccctctacaatttgtatccaggcgtgtttgagaccgttgaaatgcttccctctaaagctggcatctggagagtagagtgcttgatcggagaacatcttcacgcaggtatgagcaccttgttcctcgtgtacagcaacaaatgtcagaatccacttggcatggccagtggacacattcgcgactttcagatcacagcatctggccagtatggacaatgggccccaaagttggctcgcctccattactccggtagcataaatgcgtggtccactaaagaacctttcagctggattaaggtcgatcttcttgcccccatgatcatccacggcattaagacacagggagcgaggcagaaattctcctccctctacatctcacagttcattattatgtatagtttggacggcaagaagtggcaaacttatagaggtaacagtactggaacagacatggtgttcttcggcaacgttgatagctctggcatcaaacacaacatctttaatcctcccataatagctcggtacatcagattgcatccgacccactacagcattaggagtacactccgaatggagcttatgggttgcgacttgaattcctgttcaatgccactcggaatggagtctaaagccatctctgatgcacagataaccgccagtagctactttacgaacatgtttgctacgtggtcaccctctaaggcaaggcttcatttgcaaggccggtctaatgcctggagacctcaggtgaacaacccgaaagaatggctccaggtggactttcagaagaccatgaaagtaacaggtgtcactactcagggagttaagtccttggatactagcatgtatgtgaaggagttccttatttcctcatcacaagatggccaccagtggaccctcttctttcagaatggtaaggtcaaagtgtttcagggcaatcaagacagcttcacacccgtggtgaacagtcttgatcctccactcttgacacgataccttcgaatccatccacagtcttgggagcaccagattgcattgcgcatggaagtacttggatgcgaggctcaggacctctac

SEQ ID NO: 1562 - protein, 1457 aa, synthetic construct
  REGION 1..1457: note = Variant of human B-domain deleted Factor VIII
MQIELSTCFFLCLLRFCFSATRRYYLGAVELSWDYMQSDLGELPVDARFPPRVPKSFPFNTSQVYKKTLFVEFTDHLFNIAKPRPPWMGLLGPTIQAEVYDTVVITLKNMASHPVSLHAVGVSYWKASEGAEYDDQTSQREKEDDKVFPGGSHTYVWQVLKENGPMASDPPCLTYSYLSHVDLVKDLNSGLIGALLVCREGSLAKEKTQTLHKFILLFAVFDEGKSWHSETKNSLMQDRDAASARAWPKMHTVNGYVNRTLPGLIGCHRKSVYWHVIGMGTTPEVHSIFLEGHTFLVRNHRQASLGISPITFLTAQTLLMDLGQFLLFCHIPSHQHDGMEAYVKVDSCPEEPQLRMKNNEEAEDYDDDLTDSEMDVVRFDDDNSPSIIQARSGAKKHPKTWVHYIAAEEEDWDYAPLVLAPDDRSYKSQYLNNGPQRIGRKYKKVRFMAYTDETFKTREAIQHESGILGPLLYGEVGDTLLIIFKNQASRPYNIYPHGITDVRPLYSRRLPKGVKHLKDFPILPGEIFKYKWTVTVEDGPTKSDPRCLTRYYSSFVNMERDLASGLIGPLLICYKESVDQRGNQIMSDKRNVILFSVFDENRSWYLTENIQRFLPNPAGVQLEDPEFQASNIMHSINGYVFDSLQLSVCLHEVAYWYILSIGAQTDFLSVFFSGYTFKHKMVYEDTLTLFPFSGETVFMSMENPGLWILGCHNSDFRNRGMTALLKVSSCDWNTGDYYEDSYEDISAYFDSKNNAIEPRSFSQNPPVLKRHQREGTRTTLQSDQEEIDYDDTISVEMKKEDFDIQDEDENQSPRSFQKKTRHYFIAAVERLWDYGMSSSPHVLRNRAQSGSVPQFKKVVFQEFTDGSFTQPLYRGELNEHLGLLGPYIRAEVEDNIMVTFRNQASRPYSFYSSLISYEEDQRQGAEPRKNFVKPNETKTYFWKVQHHMAPTKDEFDCKAWAYFSDVDLEKDVHSGLIGPLLVCHTNTLNPAHGRQVTVQEFALFFTIFDETKSWYFTENMERNCRAPCNIQMEDPTFKENYRFHAINGYIMDTLPGLVMAQDQRIRWYLLSMGSNENIHSIHFSGHVFTVRKKEEYKMALYNLYPGVFETVEMLPSKAGIWRVECLIGEHLHAGMSTLFLVYSNKCQNPLGMASGHIRDFQITASGQYGQWAPKLARLHYSGSINAWSTKEPFSWIKVDLLAPMIIHGIKTQGARQKFSSLYISQFIIMYSLDGKKWQTYRGNSTGTDMVFFGNVDSSGIKHNIFNPPIIARYIRLHPTHYSIRSTLRMELMGCDLNSCSMPLGMESKAISDAQITASSYFTNMFATWSPSKARLHLQGRSNAWRPQVNNPKEWLQVDFQKTMKVTGVTTQGVKSLDTSMYVKEFLISSSQDGHQWTLFFQNGKVKVFQGNQDSFTPVVNSLDPPLLTRYLRIHPQSWEHQIALRMEVLGCEAQDLY

SEQ ID NO: 1563 - DNA, 4371 bp, synthetic construct
  misc_feature 1..4371: note = Variant of human B-domain deleted Factor VIII
  source 1..4371: mol_type = other DNA
atgcagattgaactgtctacctgcttcttcctctgtttgctgaggttctgctttagcgccactagacggtactaccttggcgctgtggagctgtcctgggactatatgcagagtgatttgggagagcttcccgtcgacgcacgatttcctcctcgcgttccaaagtcatttccctttaacacaagccaggtgtacaagaagacgctcttcgtcgaattcaccgatcacctgttcaatatcgccaaacccagaccaccatggatgggtcttttggggcctaccatacaagcggaggtgtatgacacagttgttatcactctcaagaacatggcttctcatccggtaagtcttcacgcagtgggcgtgtcctactggaaagcttcagaaggagccgagtatgatgatcagacatcccagagggagaaagaagacgacaaggtatttccaggtgggtctcatacctatgtgtggcaagtgctcaaagagaatggccctatggcaagcgatccgccgtgtttgacttacagctacctttcacacgttgacctcgtcaaggacctcaactccgggttgattggagccttgttggtatgcagggaaggatctcttgccaaagagaagacacagaccctccacaagtttatccttctctttgctgtgttcgatgagggcaaaagttggcatagcgaaacgaagaattccctcatgcaggatcgcgacgcagccagcgccagagcttggcccaagatgcacactgtgaacggatatgtcaataggacgcttcctggcttgattgggtgtcatcggaaaagtgtctactggcacgtgatcggaatggggacaacaccagaggtccactccatatttctcgaaggccataccttccttgttcgaaaccacagacaggcatccttggggatctctcccattacctttctcactgcccaaacgctccttatggacttgggtcagttccttctcttttgccatatcccgtcacaccagcatgatggtatggaagcttatgtgaaagtcgacagttgtcctgaggagccacagttgcgcatgaagaataatgaagaagccgaggattacgacgacgatctcaccgattctgagatggacgtggtgaggtttgatgacgacaactctccctccatcattcaagctcggagcggggcgaagaaacaccccaagacttgggtccactatatagcggcggaagaggaggattgggattacgctcctcttgtattggcaccagatgaccgctcatacaaaagccagtacctcaacaacggaccgcagagaattggccggaagtataagaaagtgcgatttatggcctatacagacgaaacctttaagacaagggaggccatccagcatgagagtgggattttgggacctcttctttacggcgaagttggtgataccctcctcatcatcttcaagaatcaagcttctcgcccctataacatttacccacacgggatcactgacgttaggcctttgtatagcagaagacttcccaaaggcgtgaagcatctcaaagacttccccattttgccaggcgagatctttaagtacaaatggaccgtcacagtggaagatggaccgactaaatcagaccctcgatgccttacgcggtactattcctccttcgtgaatatggagagagatttggcaagcggactcataggaccactcctcatctgttacaaggaatctgtagaccagaggggtaaccagattatgagtgataaacgcaatgtgatcctttttagcgtcttcgacgagaaccggtcctggtacttgaccgagaatatacaaaggttccttcccaaccccgcaggcgttcagttggaagaccctgagtttcaggccagcaatattatgcactcaatcaacggctatgtgtttgatagtctccagctttctgtttgcctccatgaagtagcctattggtacatcttgtcaattggtgctcaaacagacttcctctccgtcttcttctccggctacacctttaagcacaagatggtgtatgaggacactctcacactctttccattttctggagaaaccgtgttcatgagcatggagaatccaggcctttggatcttgggttgccacaacagtgattttcgcaatcggggaatgactgctctcctcaaagtcagcagctgtgattggaacacaggcgactattacgaagattcttacgaggacataagtgcctactttgactccaagaataacgccattgagcccagatcattctcccagaatcctcccgtgcttaaaaggcatcagcgcgaaggtaccagaactactcttcagtctgatcaagaggagattgactatgacgacaccattagcgtggaaatgaagcaggaggatttcgatatctatgacgaagatgagaaccagtctccgcggagctttcagaagaagacgcgacactacttcattgcagcagtcgaaaggctttgggactacggtatgtcatcatcccctcatgtgttgcgcaatagagctcagagtggaagtgttccacagttcaagaaagtcgtctttcaagagtttacagatggcagcttcacacagcctctctatcggggcgagcttaacgaacatttgggactccttggtccctatatccgagccgaagtggaggacaacattatggttacctttaggaatcaagcctctcgcccctacagcttctactcctccctcatcagttatgaggaggatcagagacaaggcgctgaaccacggaagaactttgtgaaaccgaatgagacgaagacctacttctggaaagtacagcaccacatggcccccacaaaagacgaattcgattgcaaagcatgggcgtatttttcagacgttgacttggagaaagatgtacattcaggacttattggtcctttgttggtgtgtcacactaacactctcaatccagcccatggcaggcaggtgacagtccaggaattcgctcttttctttaccatctttgatgagaccaagtcctggtacttcacggaaaacatggagcgcaattgcagagccccctgtaacatacagatggaggaccctacctttaaggaaaattatcggttccacgcaatcaacggatacattatggatacactccctggccttgtgatggctcaggaccaacgaatcaggtggtacctcctcagcatgggttctaatgagaacatacactccattcacttttcaggacatgtgttcactgtccggaagaaagaagagtataagatggccctctacaatttgtatccaggcgtgtttgagaccgttgaaatgcttccctctaaagctggcatctggagagtagagtgcttgatcggagaacatcttcacgcaggtatgagcaccttgttcctcgtgtacagcaacaaatgtcagaatccacttggcatggccagtggacacattcgcgactttcagatcacagcatctggccagtatggacaatgggccccaaagttggctcgcctccattactccggtagcataaatgcgtggtccactaaagaacctttcagctggattaaggtcgatcttcttgcccccatgatcatccacggcattaagacacagggagcgaggcagaaattctcctccctctacatctcacagttcattattatgtatagtttggacggcaagaagtggcaaacttatagaggtaacagtactggaacagacatggtgttcttcggcaacgttgatagctctggcatcaaacacaacatctttaatcctcccataatagctcggtacatcagattgcatccgacccactacagcattaggagtacactccgaatggagcttatgggttgcgacttgaattcctgttcaatgccactcggaatggagtctaaagccatctctgatgcacagataaccgccagtagctactttacgaacatgtttgctacgtggtcaccctctaaggcaaggcttcatttgcaaggccggtctaatgcctggagacctcaggtgaacaacccgaaagaatggctccaggtggactttcagaagaccatgaaagtaacaggtgtcactactcagggagttaagtccttggatactagcatgtatgtgaaggagttccttatttcctcatcacaagatggccaccagtggaccctcttctttcagaatggtaaggtcaaagtgtttcagggcaatcaagacagcttcacacccgtggtgaacagtcttgatcctccactcttgacacgataccttcgaatccatccacagtcttgggagcaccagattgcattgcgcatggaagtacttggatgcgaggctcaggacctctac

SEQ ID NO: 1564 - protein, 1457 aa, synthetic construct
  REGION 1..1457: note = Variant of human B-domain deleted Factor VIII
MQIELSTCFFLCLLRFCFSATRRYYLGAVELSWDYMQSDLGELPVDARFPPRVPKSFPFNTSQVYKKTLFVEFTDHLFNIAKPRPPWMGLLGPTIQAEVYDTVVITLKNMASHPVSLHAVGVSYWKASEGAEYDDQTSQREKEDDKVFPGGSHTYVWQVLKENGPMASDPPCLTYSYLSHVDLVKDLNSGLIGALLVCREGSLAKEKTQTLHKFILLFAVFDEGKSWHSETKNSLMQDRDAASARAWPKMHTVNGYVNRTLPGLIGCHRKSVYWHVIGMGTTPEVHSIFLEGHTFLVRNHRQASLGISPITFLTAQTLLMDLGQFLLFCHIPSHQHDGMEAYVKVDSCPEEPQLRMKNNEEAEDYDDDLTDSEMDVVRFDDDNSPSIIQARSGAKKHPKTWVHYIAAEEEDWDYAPLVLAPDDRSYKSQYLNNGPQRIGRKYKKVRFMAYTDETFKTREAIQHESGILGPLLYGEVGDTLLIIFKNQASRPYNIYPHGITDVRPLYSRRLPKGVKHLKDFPILPGEIFKYKWTVTVEDGPTKSDPRCLTRYYSSFVNMERDLASGLIGPLLICYKESVDQRGNQIMSDKRNVILFSVFDENRSWYLTENIQRFLPNPAGVQLEDPEFQASNIMHSINGYVFDSLQLSVCLHEVAYWYILSIGAQTDFLSVFFSGYTFKHKMVYEDTLTLFPFSGETVFMSMENPGLWILGCHNSDFRNRGMTALLKVSSCDWNTGDYYEDSYEDISAYFDSKNNAIEPRSFSQNPPVLKRHQREGTRTTLQSDQEEIDYDDTISVEMKQEDFDIYDEDENQSPRSFQKKTRHYFIAAVERLWDYGMSSSPHVLRNRAQSGSVPQFKKVVFQEFTDGSFTQPLYRGELNEHLGLLGPYIRAEVEDNIMVTFRNQASRPYSFYSSLISYEEDQRQGAEPRKNFVKPNETKTYFWKVQHHMAPTKDEFDCKAWAYFSDVDLEKDVHSGLIGPLLVCHTNTLNPAHGRQVTVQEFALFFTIFDETKSWYFTENMERNCRAPCNIQMEDPTFKENYRFHAINGYIMDTLPGLVMAQDQRIRWYLLSMGSNENIHSIHFSGHVFTVRKKEEYKMALYNLYPGVFETVEMLPSKAGIWRVECLIGEHLHAGMSTLFLVYSNKCQNPLGMASGHIRDFQITASGQYGQWAPKLARLHYSGSINAWSTKEPFSWIKVDLLAPMIIHGIKTQGARQKFSSLYISQFIIMYSLDGKKWQTYRGNSTGTDMVFFGNVDSSGIKHNIFNPPIIARYIRLHPTHYSIRSTLRMELMGCDLNSCSMPLGMESKAISDAQITASSYFTNMFATWSPSKARLHLQGRSNAWRPQVNNPKEWLQVDFQKTMKVTGVTTQGVKSLDTSMYVKEFLISSSQDGHQWTLFFQNGKVKVFQGNQDSFTPVVNSLDPPLLTRYLRIHPQSWEHQIALRMEVLGCEAQDLY

SEQ ID NO: 1565 - DNA, 4371 bp, synthetic construct
  misc_feature 1..4371: note = Variant of human B-domain deleted Factor VIII
  source 1..4371: mol_type = other DNA
atgcagattgaactgtctacctgcttcttcctctgtttgctgaggttctgctttagcgccactagacggtactaccttggcgctgtggagctgtcctgggactatatgcagagtgatttgggagagcttcccgtcgacgcacgatttcctcctcgcgttccaaagtcatttccctttaacacaagccaggtgtacaagaagacgctcttcgtcgaattcaccgatcacctgttcaatatcgccaaacccagaccaccatggatgggtcttttggggcctaccatacaagcggaggtgtatgacacagttgttatcactctcaagaacatggcttctcatccggtaagtcttcacgcagtgggcgtgtcctactggaaagcttcagaaggagccgagtatgatgatcagacatcccagagggagaaagaagacgacaaggtatttccaggtgggtctcatacctatgtgtggcaagtgctcaaagagaatggccctatggcaagcgatccgccgtgtttgacttacagctacctttcacacgttgacctcgtcaaggacctcaactccgggttgattggagccttgttggtatgcagggaaggatctcttgccaaagagaagacacagaccctccacaagtttatccttctctttgctgtgttcgatgagggcaaaagttggcatagcgaaacgaagaattccctcatgcaggatcgcgacgcagccagcgccagagcttggcccaagatgcacactgtgaacggatatgtcaataggacgcttcctggcttgattgggtgtcatcggaaaagtgtctactggcacgtgatcggaatggggacaacaccagaggtccactccatatttctcgaaggccataccttccttgttcgaaaccacagacaggcatccttggggatctctcccattacctttctcactgcccaaacgctccttatggacttgggtcagttccttctcttttgccatatcccgtcacaccagcatgatggtatggaagcttatgtgaaagtcgacagttgtcctgaggagccacagttgcgcatgaagaataatgaagaagccgaggattacgacgacgatctcaccgattctgagatggacgtggtgaggtttgatgacgacaactctccctccatcattcaagctcggagcggggcgaagaaacaccccaagacttgggtccactatatagcggcggaagaggaggattgggattacgctcctcttgtattggcaccagatgaccgctcatacaaaagccagtacctcaacaacggaccgcagagaattggccggaagtataagaaagtgcgatttatggcctatacagacgaaacctttaagacaagggaggccatccagcatgagagtgggattttgggacctcttctttacggcgaagttggtgataccctcctcatcatcttcaagaatcaagcttctcgcccctataacatttacccacacgggatcactgacgttaggcctttgtatagcagaagacttcccaaaggcgtgaagcatctcaaagacttccccattttgccaggcgagatctttaagtacaaatggaccgtcacagtggaagatggaccgactaaatcagaccctcgatgccttacgcggtactattcctccttcgtgaatatggagagagatttggcaagcggactcataggaccactcctcatctgttacaaggaatctgtagaccagaggggtaaccagattatgagtgataaacgcaatgtgatcctttttagcgtcttcgacgagaaccggtcctggtacttgaccgagaatatacaaaggttccttcccaaccccgcaggcgttcagttggaagaccctgagtttcaggccagcaatattatgcactcaatcaacggctatgtgtttgatagtctccagctttctgtttgcctccatgaagtagcctattggtacatcttgtcaattggtgctcaaacagacttcctctccgtcttcttctccggctacacctttaagcacaagatggtgtatgaggacactctcacactctttccattttctggagaaaccgtgttcatgagcatggagaatccaggcctttggatcttgggttgccacaacagtgattttcgcaatcggggaatgactgctctcctcaaagtcagcagctgtgattggaacacaggcgactcttacgaagattcttacgaggacataagtgcctactttgactccaagaataacgccattgagcccagatcattctcccagaatcctcccgtgcttaaaaggcatcagcgcgaaggtaccagaactactcttcagtctgatcaagaggagattgactatgacgacaccattagcgtggaaatgaagaaggaggatttcgatatctatgacgaagatgagaaccagtctccgcggagctttcagaagaagacgcgacactacttcattgcagcagtcgaaaggctttgggactacggtatgtcatcatcccctcatgtgttgcgcaatagagctcagagtggaagtgttccacagttcaagaaagtcgtctttcaagagtttacagatggcagcttcacacagcctctctatcggggcgagcttaacgaacatttgggactccttggtccctatatccgagccgaagtggaggacaacattatggttacctttaggaatcaagcctctcgcccctacagcttctactcctccctcatcagttatgaggaggatcagagacaaggcgctgaaccacggaagaactttgtgaaaccgaatgagacgaagacctacttctggaaagtacagcaccacatggcccccacaaaagacgaattcgattgcaaagcatgggcgtatttttcagacgttgacttggagaaagatgtacattcaggacttattggtcctttgttggtgtgtcacactaacactctcaatccagcccatggcaggcaggtgacagtccaggaattcgctcttttctttaccatctttgatgagaccaagtcctggtacttcacggaaaacatggagcgcaattgcagagccccctgtaacatacagatggaggaccctacctttaaggaaaattatcggttccacgcaatcaacggatacattatggatacactccctggccttgtgatggctcaggaccaacgaatcaggtggtacctcctcagcatgggttctaatgagaacatacactccattcacttttcaggacatgtgttcactgtccggaagaaagaagagtataagatggccctctacaatttgtatccaggcgtgtttgagaccgttgaaatgcttccctctaaagctggcatctggagagtagagtgcttgatcggagaacatcttcacgcaggtatgagcaccttgttcctcgtgtacagcaacaaatgtcagaatccacttggcatggccagtggacacattcgcgactttcagatcacagcatctggccagtatggacaatgggccccaaagttggctcgcctccattactccggtagcataaatgcgtggtccactaaagaacctttcagctggattaaggtcgatcttcttgcccccatgatcatccacggcattaagacacagggagcgaggcagaaattctcctccctctacatctcacagttcattattatgtatagtttggacggcaagaagtggcaaacttatagaggtaacagtactggaacagacatggtgttcttcggcaacgttgatagctctggcatcaaacacaacatctttaatcctcccataatagctcggtacatcagattgcatccgacccactacagcattaggagtacactccgaatggagcttatgggttgcgacttgaattcctgttcaatgccactcggaatggagtctaaagccatctctgatgcacagataaccgccagtagctactttacgaacatgtttgctacgtggtcaccctctaaggcaaggcttcatttgcaaggccggtctaatgcctggagacctcaggtgaacaacccgaaagaatggctccaggtggactttcagaagaccatgaaagtaacaggtgtcactactcagggagttaagtccttggatactagcatgtatgtgaaggagttccttatttcctcatcacaagatggccaccagtggaccctcttctttcagaatggtaaggtcaaagtgtttcagggcaatcaagacagcttcacacccgtggtgaacagtcttgatcctccactcttgacacgataccttcgaatccatccacagtcttgggagcaccagattgcattgcgcatggaagtacttggatgcgaggctcaggacctctac

SEQ ID NO: 1566 - protein, 1457 aa, synthetic construct
  REGION 1..1457: note = Variant of human B-domain deleted Factor VIII
MQIELSTCFFLCLLRFCFSATRRYYLGAVELSWDYMQSDLGELPVDARFPPRVPKSFPFNTSQVYKKTLFVEFTDHLFNIAKPRPPWMGLLGPTIQAEVYDTVVITLKNMASHPVSLHAVGVSYWKASEGAEYDDQTSQREKEDDKVFPGGSHTYVWQVLKENGPMASDPPCLTYSYLSHVDLVKDLNSGLIGALLVCREGSLAKEKTQTLHKFILLFAVFDEGKSWHSETKNSLMQDRDAASARAWPKMHTVNGYVNRTLPGLIGCHRKSVYWHVIGMGTTPEVHSIFLEGHTFLVRNHRQASLGISPITFLTAQTLLMDLGQFLLFCHIPSHQHDGMEAYVKVDSCPEEPQLRMKNNEEAEDYDDDLTDSEMDVVRFDDDNSPSIIQARSGAKKHPKTWVHYIAAEEEDWDYAPLVLAPDDRSYKSQYLNNGPQRIGRKYKKVRFMAYTDETFKTREAIQHESGILGPLLYGEVGDTLLIIFKNQASRPYNIYPHGITDVRPLYSRRLPKGVKHLKDFPILPGEIFKYKWTVTVEDGPTKSDPRCLTRYYSSFVNMERDLASGLIGPLLICYKESVDQRGNQIMSDKRNVILFSVFDENRSWYLTENIQRFLPNPAGVQLEDPEFQASNIMHSINGYVFDSLQLSVCLHEVAYWYILSIGAQTDFLSVFFSGYTFKHKMVYEDTLTLFPFSGETVFMSMENPGLWILGCHNSDFRNRGMTALLKVSSCDWNTGDSYEDSYEDISAYFDSKNNAIEPRSFSQNPPVLKRHQREGTRTTLQSDQEEIDYDDTISVEMKKEDFDIYDEDENQSPRSFQKKTRHYFIAAVERLWDYGMSSSPHVLRNRAQSGSVPQFKKVVFQEFTDGSFTQPLYRGELNEHLGLLGPYIRAEVEDNIMVTFRNQASRPYSFYSSLISYEEDQRQGAEPRKNFVKPNETKTYFWKVQHHMAPTKDEFDCKAWAYFSDVDLEKDVHSGLIGPLLVCHTNTLNPAHGRQVTVQEFALFFTIFDETKSWYFTENMERNCRAPCNIQMEDPTFKENYRFHAINGYIMDTLPGLVMAQDQRIRWYLLSMGSNENIHSIHFSGHVFTVRKKEEYKMALYNLYPGVFETVEMLPSKAGIWRVECLIGEHLHAGMSTLFLVYSNKCQNPLGMASGHIRDFQITASGQYGQWAPKLARLHYSGSINAWSTKEPFSWIKVDLLAPMIIHGIKTQGARQKFSSLYISQFIIMYSLDGKKWQTYRGNSTGTDMVFFGNVDSSGIKHNIFNPPIIARYIRLHPTHYSIRSTLRMELMGCDLNSCSMPLGMESKAISDAQITASSYFTNMFATWSPSKARLHLQGRSNAWRPQVNNPKEWLQVDFQKTMKVTGVTTQGVKSLDTSMYVKEFLISSSQDGHQWTLFFQNGKVKVFQGNQDSFTPVVNSLDPPLLTRYLRIHPQSWEHQIALRMEVLGCEAQDLY

SEQ ID NO: 1567 - DNA, 4371 bp, synthetic construct
  misc_feature 1..4371: note = Variant of human B-domain deleted Factor VIII
  source 1..4371: mol_type = other DNA
atgcagattgaactgtctacctgcttcttcctctgtttgctgaggttctgctttagcgccactagacggtactaccttggcgctgtggagctgtcctgggactatatgcagagtgatttgggagagcttcccgtcgacgcacgatttcctcctcgcgttccaaagtcatttccctttaacacaagccaggtgtacaagaagacgctcttcgtcgaattcaccgatcacctgttcaatatcgccaaacccagaccaccatggatgggtcttttggggcctaccatacaagcggaggtgtatgacacagttgttatcactctcaagaacatggcttctcatccggtaagtcttcacgcagtgggcgtgtcctactggaaagcttcagaaggagccgagtatgatgatcagacatcccagagggagaaagaagacgacaaggtatttccaggtgggtctcatacctatgtgtggcaagtgctcaaagagaatggccctatggcaagcgatccgccgtgtttgacttacagctacctttcacacgttgacctcgtcaaggacctcaactccgggttgattggagccttgttggtatgcagggaaggatctcttgccaaagagaagacacagaccctccacaagtttatccttctctttgctgtgttcgatgagggcaaaagttggcatagcgaaacgaagaattccctcatgcaggatcgcgacgcagccagcgccagagcttggcccaagatgcacactgtgaacggatatgtcaataggacgcttcctggcttgattgggtgtcatcggaaaagtgtctactggcacgtgatcggaatggggacaacaccagaggtccactccatatttctcgaaggccataccttccttgttcgaaaccacagacaggcatccttggggatctctcccattacctttctcactgcccaaacgctccttatggacttgggtcagttccttctcttttgccatatcccgtcacaccagcatgatggtatggaagcttatgtgaaagtcgacagttgtcctgaggagccacagttgcgcatgaagaataatgaagaagccgaggattacgacgacgatctcaccgattctgagatggacgtggtgaggtttgatgacgacaactctccctccatcattcaagctcggagcggggcgaagaaacaccccaagacttgggtccactatatagcggcggaagaggaggattgggattacgctcctcttgtattggcaccagatgaccgctcatacaaaagccagtacctcaacaacggaccgcagagaattggccggaagtataagaaagtgcgatttatggcctatacagacgaaacctttaagacaagggaggccatccagcatgagagtgggattttgggacctcttctttacggcgaagttggtgataccctcctcatcatcttcaagaatcaagcttctcgcccctataacatttacccacacgggatcactgacgttaggcctttgtatagcagaagacttcccaaaggcgtgaagcatctcaaagacttccccattttgccaggcgagatctttaagtacaaatggaccgtcacagtggaagatggaccgactaaatcagaccctcgatgccttacgcggtactattcctccttcgtgaatatggagagagatttggcaagcggactcataggaccactcctcatctgttacaaggaatctgtagaccagaggggtaaccagattatgagtgataaacgcaatgtgatcctttttagcgtcttcgacgagaaccggtcctggtacttgaccgagaatatacaaaggttccttcccaaccccgcaggcgttcagttggaagaccctgagtttcaggccagcaatattatgcactcaatcaacggctatgtgtttgatagtctccagctttctgtttgcctccatgaagtagcctattggtacatcttgtcaattggtgctcaaacagacttcctctccgtcttcttctccggctacacctttaagcacaagatggtgtatgaggacactctcacactctttccattttctggagaaaccgtgttcatgagcatggagaatccaggcctttggatcttgggttgccacaacagtgattttcgcaatcggggaatgactgctctcctcaaagtcagcagctgtgattggaacacaggcgactattacgaagattcttacgaggacataagtgcctactttgactccaagaataacgccattgagcccagatcattctcccagaatcctcccgtgcttaaaaggcatcagcgcgaaggtaccagaactactcttcagtctgatcaagaggagattgactatgacgacaccattagcgtggaaatgaagaaggaggatttcgatatctatgacgaagatgagaaccagtctccgcggagctttcagaagaagacgcgacactacttcattgcagcagtcgaaaggctttgggactacggtatgtcatcatcccctcatgtgttgcgcaatagagctcagagtggaagtgttccacagttcaagaaagtcgtctttcaagagtttacagatggcagcttcacacagcctctctatcggggcgagcttaacgaacatttgggactccttggtccctatatccgagccgaagtggaggacaacattatggttacctttaggaatcaagcctctcgcccctacagcttctactcctccctcatcatgtatgaggaggatcagagacaaggcgctgaaccacggaagaactttgtgaaaccgaatgagacgaagacctacttctggaaagtacagcaccacatggcccccacaaaagacgaattcgattgcaaagcatgggcgtatttttcagacgttgacttggagaaagatgtacattcaggacttattggtcctttgttggtgtgtcacactaacactctcaatccagcccatggcaggcaggtgacagtccaggaattcgctcttttctttaccatctttgatgagaccaagtcctggtacttcacggaaaacatggagcgcaattgcagagccccctgtaacatacagatggaggaccctacctttaaggaaaattatcggttccacgcaatcaacggatacattatggatacactccctggccttgtgatggctcaggaccaacgaatcaggtggtacctcctcagcatgggttctaatgagaacatacactccattcacttttcaggacatgtgttcactgtccggaagaaagaagagtataagatggccctctacaatttgtatccaggcgtgtttgagaccgttgaaatgcttccctctaaagctggcatctggagagtagagtgcttgatcggagaacatcttcacgcaggtatgagcaccttgttcctcgtgtacagcaacaaatgtcagaatccacttggcatggccagtggacacattcgcgactttcagatcacagcatctggccagtatggacaatgggccccaaagttggctcgcctccattactccggtagcataaatgcgtggtccactaaagaacctttcagctggattaaggtcgatcttcttgcccccatgatcatccacggcattaagacacagggagcgaggcagaaattctcctccctctacatctcacagttcattattatgtatagtttggacggcaagaagtggcaaacttatagaggtaacagtactggaacagacatggtgttcttcggcaacgttgatagctctggcatcaaacacaacatctttaatcctcccataatagctcggtacatcagattgcatccgacccactacagcattaggagtacactccgaatggagcttatgggttgcgacttgaattcctgttcaatgccactcggaatggagtctaaagccatctctgatgcacagataaccgccagtagctactttacgaacatgtttgctacgtggtcaccctctaaggcaaggcttcatttgcaaggccggtctaatgcctggagacctcaggtgaacaacccgaaagaatggctccaggtggactttcagaagaccatgaaagtaacaggtgtcactactcagggagttaagtccttggatactagcatgtatgtgaaggagttccttatttcctcatcacaagatggccaccagtggaccctcttctttcagaatggtaaggtcaaagtgtttcagggcaatcaagacagcttcacacccgtggtgaacagtcttgatcctccactcttgacacgataccttcgaatccatccacagtcttgggagcaccagattgcattgcgcatggaagtacttggatgcgaggctcaggacctctac

SEQ ID NO: 1568 - protein, 1457 aa, synthetic construct
  REGION 1..1457: note = Variant of human B-domain deleted Factor VIII
MQIELSTCFFLCLLRFCFSATRRYYLGAVELSWDYMQSDLGELPVDARFPPRVPKSFPFNTSQVYKKTLFVEFTDHLFNIAKPRPPWMGLLGPTIQAEVYDTVVITLKNMASHPVSLHAVGVSYWKASEGAEYDDQTSQREKEDDKVFPGGSHTYVWQVLKENGPMASDPPCLTYSYLSHVDLVKDLNSGLIGALLVCREGSLAKEKTQTLHKFILLFAVFDEGKSWHSETKNSLMQDRDAASARAWPKMHTVNGYVNRTLPGLIGCHRKSVYWHVIGMGTTPEVHSIFLEGHTFLVRNHRQASLGISPITFLTAQTLLMDLGQFLLFCHIPSHQHDGMEAYVKVDSCPEEPQLRMKNNEEAEDYDDDLTDSEMDVVRFDDDNSPSIIQARSGAKKHPKTWVHYIAAEEEDWDYAPLVLAPDDRSYKSQYLNNGPQRIGRKYKKVRFMAYTDETFKTREAIQHESGILGPLLYGEVGDTLLIIFKNQASRPYNIYPHGITDVRPLYSRRLPKGVKHLKDFPILPGEIFKYKWTVTVEDGPTKSDPRCLTRYYSSFVNMERDLASGLIGPLLICYKESVDQRGNQIMSDKRNVILFSVFDENRSWYLTENIQRFLPNPAGVQLEDPEFQASNIMHSINGYVFDSLQLSVCLHEVAYWYILSIGAQTDFLSVFFSGYTFKHKMVYEDTLTLFPFSGETVFMSMENPGLWILGCHNSDFRNRGMTALLKVSSCDWNTGDYYEDSYEDISAYFDSKNNAIEPRSFSQNPPVLKRHQREGTRTTLQSDQEEIDYDDTISVEMKKEDFDIYDEDENQSPRSFQKKTRHYFIAAVERLWDYGMSSSPHVLRNRAQSGSVPQFKKVVFQEFTDGSFTQPLYRGELNEHLGLLGPYIRAEVEDNIMVTFRNQASRPYSFYSSLIMYEEDQRQGAEPRKNFVKPNETKTYFWKVQHHMAPTKDEFDCKAWAYFSDVDLEKDVHSGLIGPLLVCHTNTLNPAHGRQVTVQEFALFFTIFDETKSWYFTENMERNCRAPCNIQMEDPTFKENYRFHAINGYIMDTLPGLVMAQDQRIRWYLLSMGSNENIHSIHFSGHVFTVRKKEEYKMALYNLYPGVFETVEMLPSKAGIWRVECLIGEHLHAGMSTLFLVYSNKCQNPLGMASGHIRDFQITASGQYGQWAPKLARLHYSGSINAWSTKEPFSWIKVDLLAPMIIHGIKTQGARQKFSSLYISQFIIMYSLDGKKWQTYRGNSTGTDMVFFGNVDSSGIKHNIFNPPIIARYIRLHPTHYSIRSTLRMELMGCDLNSCSMPLGMESKAISDAQITASSYFTNMFATWSPSKARLHLQGRSNAWRPQVNNPKEWLQVDFQKTMKVTGVTTQGVKSLDTSMYVKEFLISSSQDGHQWTLFFQNGKVKVFQGNQDSFTPVVNSLDPPLLTRYLRIHPQSWEHQIALRMEVLGCEAQDLY

SEQ ID NO: 1569 - DNA, 4371 bp, synthetic construct
  misc_feature 1..4371: note = Variant of human B-domain deleted Factor VIII
  source 1..4371: mol_type = other DNA
atgcagattgaactgtctacctgcttcttcctctgtttgctgaggttctgctttagcgccactagacggtactaccttggcgctgtggagctgtcctgggactatatgcagagtgatttgggagagcttcccgtcgacgcacgatttcctcctcgcgttccaaagtcatttccctttaacacaagccaggtgtacaagaagacgctcttcgtcgaattcaccgatcacctgttcaatatcgccaaacccagaccaccatggatgggtcttttggggcctaccatacaagcggaggtgtatgacacagttgttatcactctcaagaacatggcttctcatccggtaagtcttcacgcagtgggcgtgtcctactggaaagcttcagaaggagccgagtatgatgatcagacatcccagagggagaaagaagacgacaaggtatttccaggtgggtctcatacctatgtgtggcaagtgctcaaagagaatggccctatggcaagcgatccgccgtgtttgacttacagctacctttcacacgttgacctcgtcaaggacctcaactccgggttgattggagccttgttggtatgcagggaaggatctcttgccaaagagaagacacagaccctccacaagtttatccttctctttgctgtgttcgatgagggcaaaagttggcatagcgaaacgaagaattccctcatgcaggatcgcgacgcagccagcgccagagcttggcccaagatgcacactgtgaacggatatgtcaataggacgcttcctggcttgattgggtgtcatcggaaaagtgtctactggcacgtgatcggaatggggacaacaccagaggtccactccatatttctcgaaggccataccttccttgttcgaaaccacagacaggcatccttggggatctctcccattacctttctcactgcccaaacgctccttatggacttgggtcagttccttctcttttgccatatcccgtcacaccagcatgatggtatggaagcttatgtgaaagtcgacagttgtcctgaggagccacagttgcgcatgaagaataatgaagaagccgaggattacgacgacgatctcaccgattctgagatggacgtggtgaggtttgatgacgacaactctccctccatcattcaagctcggagcggggcgaagaaacaccccaagacttgggtccactatatagcggcggaagaggaggattgggattacgctcctcttgtattggcaccagatgaccgctcatacaaaagccagtacctcaacaacggaccgcagagaattggccggaagtataagaaagtgcgatttatggcctatacagacgaaacctttaagacaagggaggccatccagcatgagagtgggattttgggacctcttctttacggcgaagttggtgataccctcctcatcatcttcaagaatcaagcttctcgcccctataacatttacccacacgggatcactgacgttaggcctttgtatagcagaagacttcccaaaggcgtgaagcatctcaaagacttccccattttgccaggcgagatctttaagtacaaatggaccgtcacagtggaagatggaccgactaaatcagaccctcgatgccttacgcggtactattcctccttcgtgaatatggagagagatttggcaagcggactcataggaccactcctcatctgttacaaggaatctgtagaccagaggggtaaccagattatgagtgataaacgcaatgtgatcctttttagcgtcttcgacgagaaccggtcctggtacttgaccgagaatatacaaaggttccttcccaaccccgcaggcgttcagttggaagaccctgagtttcaggccagcaatattatgcactcaatcaacggctatgtgtttgatagtctccagctttctgtttgcctccatgaagtagcctattggtacatcttgtcaattggtgctcaaacagacttcctctccgtcttcttctccggctacacctttaagcacaagatggtgtatgaggacactctcacactctttccattttctggagaaaccgtgttcatgagcatggagaatccaggcctttggatcttgggttgccacaacagtgattttcgcaatcggggaatgactgctctcctcaaagtcagcagctgtgattggaacacaggcgactattacgaagattcttacgaggacataagtgcctactttgactccaagaataacgccattgagccctcttcattctcccagaatcctcccgtgcttaaaaggcatcagcgcgaaggtaccagaactactcttcagtctgatcaagaggagattgactatgacgacaccattagcgtggaaatgaagaaggaggatttcgatatctatgacgaagatgagaaccagtctccgcggagctttcagaagaagacgcgacactacttcattgcagcagtcgaaaggctttgggactacggtatgtcatcatcccctcatgtgttgcgcaatagagctcagagtggaagtgttccacagttcaagaaagtcgtctttcaagagtttacagatggcagcttcacacagcctctctatcggggcgagcttaacgaacatttgggactccttggtccctatatccgagccgaagtggaggacaacattatggttacctttaggaatcaagcctctcgcccctacagcttctactcctccctcatcagttatgaggaggatcagagacaaggcgctgaaccacggaagaactttgtgaaaccgaatgagacgaagacctacttctggaaagtacagcaccacatggcccccacaaaagacgaattcgattgcaaagcatgggcgtatttttcagacgttgacttggagaaagatgtacattcaggacttattggtcctttgttggtgtgtcacactaacactctcaatccagcccatggcaggcaggtgacagtccaggaattcgctcttttctttaccatctttgatgagaccaagtcctggtacttcacggaaaacatggagcgcaattgcagagccccctgtaacatacagatggaggaccctacctttaaggaaaattatcggttccacgcaatcaacggatacattatggatacactccctggccttgtgatggctcaggaccaacgaatcaggtggtacctcctcagcatgggttctaatgagaacatacactccattcacttttcaggacatgtgttcactgtccggaagaaagaagagtataagatggccctctacaatttgtatccaggcgtgtttgagaccgttgaaatgcttccctctaaagctggcatctggagagtagagtgcttgatcggagaacatcttcacgcaggtatgagcaccttgttcctcgtgtacagcaacaaatgtcagaatccacttggcatggccagtggacacattcgcgactttcagatcacagcatctggccagtatggacaatgggccccaaagttggctcgcctccattactccggtagcataaatgcgtggtccactaaagaacctttcagctggattaaggtcgatcttcttgcccccatgatcatccacggcattaagacacagggagcgaggcagaaattctcctccctctacatctcacagttcattattatgtatagtttggacggcaagaagtggcaaacttatagaggtaacagtactggaacagacatggtgttcttcggcaacgttgatagctctggcatcaaacacaacatctttaatcctcccataatagctcggtacatcagattgcatccgacccactacagcattaggagtacactccgaatggagcttatgggttgcgacttgaattcctgttcaatgccactcggaatggagtctaaagccatctctgatgcacagataaccgccagtagctactttacgaacatgtttgctacgtggtcaccctctaaggcaaggcttcatttgcaaggccggtctaatgcctggagacctcaggtgaacaacccgaaagaatggctccaggtggactttcagaagaccatgaaagtaacaggtgtcactactcagggagttaagtccttggatactagcatgtatgtgaaggagttccttatttcctcatcacaagatggccaccagtggaccctcttctttcagaatggtaaggtcaaagtgtttcagggcaatcaagacagcttcacacccgtggtgaacagtcttgatcctccactcttgacacgataccttcgaatccatccacagtcttgggagcaccagattgcattgcgcatggaagtacttggatgcgaggctcaggacctctac

SEQ ID NO: 1570 - protein, 1457 aa, synthetic construct
  REGION 1..1457: note = Variant of human B-domain deleted Factor VIII
MQIELSTCFFLCLLRFCFSATRRYYLGAVELSWDYMQSDLGELPVDARFPPRVPKSFPFNTSQVYKKTLFVEFTDHLFNIAKPRPPWMGLLGPTIQAEVYDTVVITLKNMASHPVSLHAVGVSYWKASEGAEYDDQTSQREKEDDKVFPGGSHTYVWQVLKENGPMASDPPCLTYSYLSHVDLVKDLNSGLIGALLVCREGSLAKEKTQTLHKFILLFAVFDEGKSWHSETKNSLMQDRDAASARAWPKMHTVNGYVNRTLPGLIGCHRKSVYWHVIGMGTTPEVHSIFLEGHTFLVRNHRQASLGISPITFLTAQTLLMDLGQFLLFCHIPSHQHDGMEAYVKVDSCPEEPQLRMKNNEEAEDYDDDLTDSEMDVVRFDDDNSPSIIQARSGAKKHPKTWVHYIAAEEEDWDYAPLVLAPDDRSYKSQYLNNGPQRIGRKYKKVRFMAYTDETFKTREAIQHESGILGPLLYGEVGDTLLIIFKNQASRPYNIYPHGITDVRPLYSRRLPKGVKHLKDFPILPGEIFKYKWTVTVEDGPTKSDPRCLTRYYSSFVNMERDLASGLIGPLLICYKESVDQRGNQIMSDKRNVILFSVFDENRSWYLTENIQRFLPNPAGVQLEDPEFQASNIMHSINGYVFDSLQLSVCLHEVAYWYILSIGAQTDFLSVFFSGYTFKHKMVYEDTLTLFPFSGETVFMSMENPGLWILGCHNSDFRNRGMTALLKVSSCDWNTGDYYEDSYEDISAYFDSKNNAIEPSSFSQNPPVLKRHQREGTRTTLQSDQEEIDYDDTISVEMKKEDFDIYDEDENQSPRSFQKKTRHYFIAAVERLWDYGMSSSPHVLRNRAQSGSVPQFKKVVFQEFTDGSFTQPLYRGELNEHLGLLGPYIRAEVEDNIMVTFRNQASRPYSFYSSLISYEEDQRQGAEPRKNFVKPNETKTYFWKVQHHMAPTKDEFDCKAWAYFSDVDLEKDVHSGLIGPLLVCHTNTLNPAHGRQVTVQEFALFFTIFDETKSWYFTENMERNCRAPCNIQMEDPTFKENYRFHAINGYIMDTLPGLVMAQDQRIRWYLLSMGSNENIHSIHFSGHVFTVRKKEEYKMALYNLYPGVFETVEMLPSKAGIWRVECLIGEHLHAGMSTLFLVYSNKCQNPLGMASGHIRDFQITASGQYGQWAPKLARLHYSGSINAWSTKEPFSWIKVDLLAPMIIHGIKTQGARQKFSSLYISQFIIMYSLDGKKWQTYRGNSTGTDMVFFGNVDSSGIKHNIFNPPIIARYIRLHPTHYSIRSTLRMELMGCDLNSCSMPLGMESKAISDAQITASSYFTNMFATWSPSKARLHLQGRSNAWRPQVNNPKEWLQVDFQKTMKVTGVTTQGVKSLDTSMYVKEFLISSSQDGHQWTLFFQNGKVKVFQGNQDSFTPVVNSLDPPLLTRYLRIHPQSWEHQIALRMEVLGCEAQDLY

SEQ ID NO: 1571 - DNA, 4371 bp, synthetic construct
  misc_feature 1..4371: note = Variant of human B-domain deleted Factor VIII
  source 1..4371: mol_type = other DNA
atgcagattgaactgtctacctgcttcttcctctgtttgctgaggttctgctttagcgccactagacggtactaccttggcgctgtggagctgtcctgggactatatgcagagtgatttgggagagcttcccgtcgacgcacgatttcctcctcgcgttccaaagtcatttccctttaacacaagccaggtgtacaagaagacgctcttcgtcgaattcaccgatcacctgttcaatatcgccaaacccagaccaccatggatgggtcttttggggcctaccatacaagcggaggtgtatgacacagttgttatcactctcaagaacatggcttctcatccggtaagtcttcacgcagtgggcgtgtcctactggaaagcttcagaaggagccgagtatgatgatcagacatcccagagggagaaagaagacgacaaggtatttccaggtgggtctcatacctatgtgtggcaagtgctcaaagagaatggccctatggcaagcgatccgccgtgtttgacttacagctacctttcacacgttgacctcgtcaaggacctcaactccgggttgattggagccttgttggtatgcagggaaggatctcttgccaaagagaagacacagaccctccacaagtttatccttctctttgctgtgttcgatgagggcaaaagttggcatagcgaaacgaagaattccctcatgcaggatcgcgacgcagccagcgccagagcttggcccaagatgcacactgtgaacggatatgtcaataggacgcttcctggcttgattgggtgtcatcggaaaagtgtctactggcacgtgatcggaatggggacaacaccagaggtccactccatatttctcgaaggccataccttccttgttcgaaaccacagacaggcatccttggggatctctcccattacctttctcactgcccaaacgctccttatggacttgggtcagttccttctcttttgccatatcccgtcacaccagcatgatggtatggaagcttatgtgaaagtcgacagttgtcctgaggagccacagttgcgcatgaagaataatgaagaagccgaggattacgacgacgatctcaccgattctgagatggacgtggtgaggtttgatgacgacaactctccctccatcattcaagctcggagcggggcgaagaaacaccccaagacttgggtccactatatagcggcggaagaggaggattgggattacgctcctcttgtattggcaccagatgaccgctcatacaaaagccagtacctcaacaacggaccgcagagaattggccggaagtataagaaagtgcgatttatggcctatacagacgaaacctttaagacaagggaggccatccagcatgagagtgggattttgggacctcttctttacggcgaagttggtgataccctcctcatcatcttcaagaatcaagcttctcgcccctataacatttacccacacgggatcactgacgttaggcctttgtatagcagaagacttcccaaaggcgtgaagcatctcaaagacttccccattttgccaggcgagatctttaagtacaaatggaccgtcacagtggaagatggaccgactaaatcagaccctcgatgccttacgcggtactattcctccttcgtgaatatggagagagatttggcaagcggactcataggaccactcctcatctgttacaaggaatctgtagaccagaggggtaaccagattatgagtgataaacgcaatgtgatcctttttagcgtcttcgacgagaaccggtcctggtacttgaccgagaatatacaaaggttccttcccaaccccgcaggcgttcagttggaagaccctgagtttcaggccagcaatattatgcactcaatcaacggctatgtgtttgatagtctccagctttctgtttgcctccatgaagtagcctattggtacatcttgtcaattggtgctcaaacagacttcctctccgtcttcttctccggctacacctttaagcacaagatggtgtatgaggacactctcacactctttccattttctggagaaaccgtgttcatgagcatggagaatccaggcctttggatcttgggttgccacaacagtgattttcgcaatcggggaatgactgctctcctcaaagtcagcagctgtgattggaacacaggcgactattacgaagattcttacgaggacataagtgcctactttgactccaagaataacgccattgagcccagatcattctcccagaatcctcccgtgcttaaaaggcatcagcgcgaaggtaccagaactactcttcagtctgatcaagaggagattgactatgacgacaccattagcgtggaaatgaaggtggaggatttcgatatctatgacgaagatgagaaccagtctccgcggagctttcagaagaagacgcgacactacttcattgcagcagtcgaaaggctttgggactacggtatgtcatcatcccctcatgtgttgcgcaatagagctcagagtggaagtgttccacagttcaagaaagtcgtctttcaagagtttacagatggcagcttcacacagcctctctatcggggcgagcttaacgaacatttgggactccttggtccctatatccgagccgaagtggaggacaacattatggttacctttaggaatcaagcctctcgcccctacagcttctactcctccctcatcagttatgaggaggatcagagacaaggcgctgaaccacggaagaactttgtgaaaccgaatgagacgaagacctacttctggaaagtacagcaccacatggcccccacaaaagacgaattcgattgcaaagcatgggcgtatttttcagacgttgacttggagaaagatgtacattcaggacttattggtcctttgttggtgtgtcacactaacactctcaatccagcccatggcaggcaggtgacagtccaggaattcgctcttttctttaccatctttgatgagaccaagtcctggtacttcacggaaaacatggagcgcaattgcagagccccctgtaacatacagatggaggaccctacctttaaggaaaattatcggttccacgcaatcaacggatacattatggatacactccctggccttgtgatggctcaggaccaacgaatcaggtggtacctcctcagcatgggttctaatgagaacatacactccattcacttttcaggacatgtgttcactgtccggaagaaagaagagtataagatggccctctacaatttgtatccaggcgtgtttgagaccgttgaaatgcttccctctaaagctggcatctggagagtagagtgcttgatcggagaacatcttcacgcaggtatgagcaccttgttcctcgtgtacagcaacaaatgtcagaatccacttggcatggccagtggacacattcgcgactttcagatcacagcatctggccagtatggacaatgggccccaaagttggctcgcctccattactccggtagcataaatgcgtggtccactaaagaacctttcagctggattaaggtcgatcttcttgcccccatgatcatccacggcattaagacacagggagcgaggcagaaattctcctccctctacatctcacagttcattattatgtatagtttggacggcaagaagtggcaaacttatagaggtaacagtactggaacagacatggtgttcttcggcaacgttgatagctctggcatcaaacacaacatctttaatcctcccataatagctcggtacatcagattgcatccgacccactacagcattaggagtacactccgaatggagcttatgggttgcgacttgaattcctgttcaatgccactcggaatggagtctaaagccatctctgatgcacagataaccgccagtagctactttacgaacatgtttgctacgtggtcaccctctaaggcaaggcttcatttgcaaggccggtctaatgcctggagacctcaggtgaacaacccgaaagaatggctccaggtggactttcagaagaccatgaaagtaacaggtgtcactactcagggagttaagtccttggatactagcatgtatgtgaaggagttccttatttcctcatcacaagatggccaccagtggaccctcttctttcagaatggtaaggtcaaagtgtttcagggcaatcaagacagcttcacacccgtggtgaacagtcttgatcctccactcttgacacgataccttcgaatccatccacagtcttgggagcaccagattgcattgcgcatggaagtacttggatgcgaggctcaggacctctac

SEQ ID NO: 1572 - protein, 1457 aa, synthetic construct
  REGION 1..1457: note = Variant of human B-domain deleted Factor VIII
MQIELSTCFFLCLLRFCFSATRRYYLGAVELSWDYMQSDLGELPVDARFPPRVPKSFPFNTSQVYKKTLFVEFTDHLFNIAKPRPPWMGLLGPTIQAEVYDTVVITLKNMASHPVSLHAVGVSYWKASEGAEYDDQTSQREKEDDKVFPGGSHTYVWQVLKENGPMASDPPCLTYSYLSHVDLVKDLNSGLIGALLVCREGSLAKEKTQTLHKFILLFAVFDEGKSWHSETKNSLMQDRDAASARAWPKMHTVNGYVNRTLPGLIGCHRKSVYWHVIGMGTTPEVHSIFLEGHTFLVRNHRQASLGISPITFLTAQTLLMDLGQFLLFCHIPSHQHDGMEAYVKVDSCPEEPQLRMKNNEEAEDYDDDLTDSEMDVVRFDDDNSPSIIQARSGAKKHPKTWVHYIAAEEEDWDYAPLVLAPDDRSYKSQYLNNGPQRIGRKYKKVRFMAYTDETFKTREAIQHESGILGPLLYGEVGDTLLIIFKNQASRPYNIYPHGITDVRPLYSRRLPKGVKHLKDFPILPGEIFKYKWTVTVEDGPTKSDPRCLTRYYSSFVNMERDLASGLIGPLLICYKESVDQRGNQIMSDKRNVILFSVFDENRSWYLTENIQRFLPNPAGVQLEDPEFQASNIMHSINGYVFDSLQLSVCLHEVAYWYILSIGAQTDFLSVFFSGYTFKHKMVYEDTLTLFPFSGETVFMSMENPGLWILGCHNSDFRNRGMTALLKVSSCDWNTGDYYEDSYEDISAYFDSKNNAIEPRSFSQNPPVLKRHQREGTRTTLQSDQEEIDYDDTISVEMKVEDFDIYDEDENQSPRSFQKKTRHYFIAAVERLWDYGMSSSPHVLRNRAQSGSVPQFKKVVFQEFTDGSFTQPLYRGELNEHLGLLGPYIRAEVEDNIMVTFRNQASRPYSFYSSLISYEEDQRQGAEPRKNFVKPNETKTYFWKVQHHMAPTKDEFDCKAWAYFSDVDLEKDVHSGLIGPLLVCHTNTLNPAHGRQVTVQEFALFFTIFDETKSWYFTENMERNCRAPCNIQMEDPTFKENYRFHAINGYIMDTLPGLVMAQDQRIRWYLLSMGSNENIHSIHFSGHVFTVRKKEEYKMALYNLYPGVFETVEMLPSKAGIWRVECLIGEHLHAGMSTLFLVYSNKCQNPLGMASGHIRDFQITASGQYGQWAPKLARLHYSGSINAWSTKEPFSWIKVDLLAPMIIHGIKTQGARQKFSSLYISQFIIMYSLDGKKWQTYRGNSTGTDMVFFGNVDSSGIKHNIFNPPIIARYIRLHPTHYSIRSTLRMELMGCDLNSCSMPLGMESKAISDAQITASSYFTNMFATWSPSKARLHLQGRSNAWRPQVNNPKEWLQVDFQKTMKVTGVTTQGVKSLDTSMYVKEFLISSSQDGHQWTLFFQNGKVKVFQGNQDSFTPVVNSLDPPLLTRYLRIHPQSWEHQIALRMEVLGCEAQDLY

SEQ ID NO: 1573 - DNA, 4371 bp, synthetic construct
  misc_feature 1..4371: note = Variant of human B-domain deleted Factor VIII
  source 1..4371: mol_type = other DNA
atgcagattgaactgtctacctgcttcttcctctgtttgctgaggttctgctttagcgccactagacggtactaccttggcgctgtggagctgtcctgggactatatgcagagtgatttgggagagcttcccgtcgacgcacgatttcctcctcgcgttccaaagtcatttccctttaacacaagccaggtgtacaagaagacgctcttcgtcgaattcaccgatcacctgttcaatatcgccaaacccagaccaccatggatgggtcttttggggcctaccatacaagcggaggtgtatgacacagttgttatcactctcaagaacatggcttctcatccggtaagtcttcacgcagtgggcgtgtcctactggaaagcttcagaaggagccgagtatgatgatcagacatcccagagggagaaagaagacgacaaggtatttccaggtgggtctcatacctatgtgtggcaagtgctcaaagagaatggccctatggcaagcgatccgccgtgtttgacttacagctacctttcacacgttgacctcgtcaaggacctcaactccgggttgattggagccttgttggtatgcagggaaggatctcttgccaaagagaagacacagaccctccacaagtttatccttctctttgctgtgttcgatgagggcaaaagttggcatagcgaaacgaagaattccctcatgcaggatcgcgacgcagccagcgccagagcttggcccaagatgcacactgtgaacggatatgtcaataggacgcttcctggcttgattgggtgtcatcggaaaagtgtctactggcacgtgatcggaatggggacaacaccagaggtccactccatatttctcgaaggccataccttccttgttcgaaaccacagacaggcatccttggggatctctcccattacctttctcactgcccaaacgctccttatggacttgggtcagttccttctcttttgccatatcccgtcacaccagcatgatggtatggaagcttatgtgaaagtcgacagttgtcctgaggagccacagttgcgcatgaagaataatgaagaagccgaggattacgacgacgatctcaccgattctgagatggacgtggtgaggtttgatgacgacaactctccctccatcattcaagctcggagcggggcgaagaaacaccccaagacttgggtccactatatagcggcggaagaggaggattgggattacgctcctcttgtattggcaccagatgaccgctcatacaaaagccagtacctcaacaacggaccgcagagaattggccggaagtataagaaagtgcgatttatggcctatacagacgaaacctttaagacaagggaggccatccagcatgagagtgggattttgggacctcttctttacggcgaagttggtgataccctcctcatcatcttcaagaatcaagcttctcgcccctataacatttacccacacgggatcactgacgttaggcctttgtatagcagaagacttcccaaaggcgtgaagcatctcaaagacttccccattttgccaggcgagatctttaagtacaaatggaccgtcacagtggaagtgggaccgactaaatcagaccctcgatgccttacgcggtactattcctccttcgtgaatatggagagagatttggcaagcggactcataggaccactcctcatctgttacaaggaatctgtagaccagaggggtaaccagattatgagtgataaacgcaatgtgatcctttttagcgtcttcgacgagaaccggtcctggtacttgaccgagaatatacaaaggttccttcccaaccccgcaggcgttcagttggaagaccctgagtttcaggccagcaatattatgcactcaatcaacggctatgtgtttgatagtctccagctttctgtttgcctccatgaagtagcctattggtacatcttgtcaattggtgctcaaacagacttcctctccgtcttcttctccggctacacctttaagcacaagatggtgtatgaggacactctcacactctttccattttctggagaaaccgtgttcatgagcatggagaatccaggcctttggatcttgggttgccacaacagtgattttcgcaatcggggaatgactgctctcctcaaagtcagcagctgtgattggaacacaggcgactattacgaagattcttacgaggacataagtgcctactttgactccaagaataacgccattgagcccagatcattctcccagaatcctcccgtgcttaaaaggcatcagcgcgaaggtaccagaactactcttcagtctgatcaagaggagattgactatgacgacaccattagcgtggaaatgaagaaggaggatttcgatatctatgacgaagatgagaaccagtctccgcggagctttcagaagaagacgcgacactacttcattgcagcagtcgaaaggctttgggactacggtatgtcatcatcccctcatgtgttgcgcaatagagctcagagtggaagtgttccacagttcaagaaagtcgtctttcaagagtttacagatggcagcttcacacagcctctctatcggggcgagcttaacgaacatttgggactccttggtccctatatccgagccgaagtggaggacaacattatggttacctttaggaatcaagcctctcgcccctacagcttctactcctccctcatcagttatgaggaggatcagagacaaggcgctgaaccacggaagaactttgtgaaaccgaatgagacgaagacctacttctggaaagtacagcaccacatggcccccacaaaagacgaattcgattgcaaagcatgggcgtatttttcagacgttgacttggagaaagatgtacattcaggacttattggtcctttgttggtgtgtcacactaacactctcaatccagcccatggcaggcaggtgacagtccaggaattcgctcttttctttaccatctttgatgagaccaagtcctggtacttcacggaaaacatggagcgcaattgcagagccccctgtaacatacagatggaggaccctacctttaaggaaaattatcggttccacgcaatcaacggatacattatggatacactccctggccttgtgatggctcaggaccaacgaatcaggtggtacctcctcagcatgggttctaatgagaacatacactccattcacttttcaggacatgtgttcactgtccggaagaaagaagagtataagatggccctctacaatttgtatccaggcgtgtttgagaccgttgaaatgcttccctctaaagctggcatctggagagtagagtgcttgatcggagaacatcttcacgcaggtatgagcaccttgttcctcgtgtacagcaacaaatgtcagaatccacttggcatggccagtggacacattcgcgactttcagatcacagcatctggccagtatggacaatgggccccaaagttggctcgcctccattactccggtagcataaatgcgtggtccactaaagaacctttcagctggattaaggtcgatcttcttgcccccatgatcatccacggcattaagacacagggagcgaggcagaaattctcctccctctacatctcacagttcattattatgtatagtttggacggcaagaagtggcaaacttatagaggtaacagtactggaacagacatggtgttcttcggcaacgttgatagctctggcatcaaacacaacatctttaatcctcccataatagctcggtacatcagattgcatccgacccactacagcattaggagtacactccgaatggagcttatgggttgcgacttgaattcctgttcaatgccactcggaatggagtctaaagccatctctgatgcacagataaccgccagtagctactttacgaacatgtttgctacgtggtcaccctctaaggcaaggcttcatttgcaaggccggtctaatgcctggagacctcaggtgaacaacccgaaagaatggctccaggtggactttcagaagaccatgaaagtaacaggtgtcactactcagggagttaagtccttggatactagcatgtatgtgaaggagttccttatttcctcatcacaagatggccaccagtggaccctcttctttcagaatggtaaggtcaaagtgtttcagggcaatcaagacagcttcacacccgtggtgaacagtcttgatcctccactcttgacacgataccttcgaatccatccacagtcttgggagcaccagattgcattgcgcatggaagtacttggatgcgaggctcaggacctctac

SEQ ID NO: 1574 - protein, 1457 aa, synthetic construct
  REGION 1..1457: note = Variant of human B-domain deleted Factor VIII
MQIELSTCFFLCLLRFCFSATRRYYLGAVELSWDYMQSDLGELPVDARFPPRVPKSFPFNTSQVYKKTLFVEFTDHLFNIAKPRPPWMGLLGPTIQAEVYDTVVITLKNMASHPVSLHAVGVSYWKASEGAEYDDQTSQREKEDDKVFPGGSHTYVWQVLKENGPMASDPPCLTYSYLSHVDLVKDLNSGLIGALLVCREGSLAKEKTQTLHKFILLFAVFDEGKSWHSETKNSLMQDRDAASARAWPKMHTVNGYVNRTLPGLIGCHRKSVYWHVIGMGTTPEVHSIFLEGHTFLVRNHRQASLGISPITFLTAQTLLMDLGQFLLFCHIPSHQHDGMEAYVKVDSCPEEPQLRMKNNEEAEDYDDDLTDSEMDVVRFDDDNSPSIIQARSGAKKHPKTWVHYIAAEEEDWDYAPLVLAPDDRSYKSQYLNNGPQRIGRKYKKVRFMAYTDETFKTREAIQHESGILGPLLYGEVGDTLLIIFKNQASRPYNIYPHGITDVRPLYSRRLPKGVKHLKDFPILPGEIFKYKWTVTVEVGPTKSDPRCLTRYYSSFVNMERDLASGLIGPLLICYKESVDQRGNQIMSDKRNVILFSVFDENRSWYLTENIQRFLPNPAGVQLEDPEFQASNIMHSINGYVFDSLQLSVCLHEVAYWYILSIGAQTDFLSVFFSGYTFKHKMVYEDTLTLFPFSGETVFMSMENPGLWILGCHNSDFRNRGMTALLKVSSCDWNTGDYYEDSYEDISAYFDSKNNAIEPRSFSQNPPVLKRHQREGTRTTLQSDQEEIDYDDTISVEMKKEDFDIYDEDENQSPRSFQKKTRHYFIAAVERLWDYGMSSSPHVLRNRAQSGSVPQFKKVVFQEFTDGSFTQPLYRGELNEHLGLLGPYIRAEVEDNIMVTFRNQASRPYSFYSSLISYEEDQRQGAEPRKNFVKPNETKTYFWKVQHHMAPTKDEFDCKAWAYFSDVDLEKDVHSGLIGPLLVCHTNTLNPAHGRQVTVQEFALFFTIFDETKSWYFTENMERNCRAPCNIQMEDPTFKENYRFHAINGYIMDTLPGLVMAQDQRIRWYLLSMGSNENIHSIHFSGHVFTVRKKEEYKMALYNLYPGVFETVEMLPSKAGIWRVECLIGEHLHAGMSTLFLVYSNKCQNPLGMASGHIRDFQITASGQYGQWAPKLARLHYSGSINAWSTKEPFSWIKVDLLAPMIIHGIKTQGARQKFSSLYISQFIIMYSLDGKKWQTYRGNSTGTDMVFFGNVDSSGIKHNIFNPPIIARYIRLHPTHYSIRSTLRMELMGCDLNSCSMPLGMESKAISDAQITASSYFTNMFATWSPSKARLHLQGRSNAWRPQVNNPKEWLQVDFQKTMKVTGVTTQGVKSLDTSMYVKEFLISSSQDGHQWTLFFQNGKVKVFQGNQDSFTPVVNSLDPPLLTRYLRIHPQSWEHQIALRMEVLGCEAQDLY

SEQ ID NO: 1575 - DNA, 4371 bp, synthetic construct
  misc_feature 1..4371: note = Variant of human B-domain deleted Factor VIII
  source 1..4371: mol_type = other DNA
atgcagattgaactgtctacctgcttcttcctctgtttgctgaggttctgctttagcgccactagacggtactaccttggcgctgtggagctgtcctgggactatatgcagagtgatttgggagagcttcccgtcgacgcacgatttcctcctcgcgttccaaagtcatttccctttaacacaagccaggtgtacaagaagacgctcttcgtcgaattcaccgatcacctgttcaatatcgccaaacccagaccaccatggatgggtcttttggggcctaccatacaagcggaggtgtatgacacagttgttatcactctcaagaacatggcttctcatccggtaagtcttcacgcagtgggcgtgtcctactggaaagcttcagaaggagccgagtatgatgatcagacatcccagagggagaaagaagacgacaaggtatttccaggtgggtctcatacctatgtgtggcaagtgctcaaagagaatggccctatggcaagcgatccgccgtgtttgacttacagctacctttcacacgttgacctcgtcaaggacctcaactccgggttgattggagccttgttggtatgcagggaaggatctcttgccaaagagaagacacagaccctccacaagtttatccttctctttgctgtgttcgatgagggcaaaagttggcatagcgaaacgaagaattccctcatgcaggatcgcgacgcagccagcgccagagcttggcccaagatgcacactgtgaacggatatgtcaataggacgcttcctggcttgattgggtgtcatcggaaaagtgtctactggcacgtgatcggaatggggacaacaccagaggtccactccatatttctcgaaggccataccttccttgttcgaaaccacagacaggcatccttggggatctctcccattacctttctcactgcccaaacgctccttatggacttgggtcagttccttctcttttgccatatcccgtcacaccagcatgatggtatggaagcttatgtgaaagtcgacagttgtcctgaggagccacagttgcgcatgaagaataatgaagaagccgaggattacgacgacgatctcaccgattctgagatggacgtggtgaggtttgatgacgacaactctccctccatcattcaagctcggagcggggcgaagaaacaccccaagacttgggtccactatatagcggcggaagaggaggattgggattacgctcctcttgtattggcaccagatgaccgctcatacaaaagccagtacctcaacaacggaccgcagagaattggccggaagtataagaaagtgcgatttatggcctatacagacgaaacctttaagacaagggaggccatccagcatgagagtgggattttgggacctcttctttacggcgaagttggtgataccctcctcatcatcttcaagaatcaagcttctcgcccctataacatttacccacacgggatcactgacgttaggcctttgtatagcagaagacttcccaaaggcgtgaagcatctcaaagacttccccattttgccaggcgagatctttaagtacaaatggaccgtcacagtggaagatggaccgactaaatcagaccctcgatgccttacgcggtactattcctccttcgtgaatatggagagagatttggcaagcggactcataggaccactcctcatctgttacaaggaatctgtagaccagaggggtaaccagattatgagtgataaacgcaatgtgatcctttttagcgtcttcgacgagaaccggtcctggtacttgaccgagaatatacaaaggttccttcccaaccccgcaggcgttcagttggaagaccctgagtttcaggccagcaatattatgcactcaatcaacggctatgtgtttgatagtctccagctttctgtttgcctccatgaagtagcctattggtacatcttgtcaattggtgctcaaacagacttcctctccgtcttcttctccggctacacctttaagcacaagatggtgtatgaggacactctcacactctttccattttctggagaaaccgtgttcatgagcatggagaatccaggcctttggatcttgggttgccacaacagtgattttcgcaatcggggaatgactgctctcctcaaagtcagcagctgtgattggaacacaggcgactattacgaagattcttacgaggacataagtgcctactttgactccaagaataacgccattgagcccagatcattctcccagaatcctcccgtgcttaaaaggcatcagcgcgaaggtaccagaactactcttcagtctgatcaagaggagattgactatgacgacaccattagcgtggaaatgaagaaggaggatttcgatatctatgacgaagatgagaaccagtctccgcggagctttcagaagaagacgcgacactacttcattgcagcagtcgaaaggctttgggactacggtatgtcatcatcccctcatgtgttgcgcaatagagctcagagtggaagtgttccacagttcaagaaagtcgtctttcaagagtttacagatggcagcttcacacagcctctctatcggggcgagcttaacgaacatttgggactccttggtccctatatccgagccgaagtggaggacaacattatggttacctttaggaatcaagcctctcgcccctacagcttctactcctccctcatcagttatgaggaggatcagagacaaggcgctgaaccacggaagaactttgtgaaaccgaatgagacgaagacctacttctggaaagtacagcaccacatggcccccacaaaagacgaattcgattgcaaagcatgggcgtatttttcagacgttgacttggagaaagatgtacattcaggacttattggtcctttgttggtgtgtcacactaacactctcaatccagcccatggcaggcaggtgacagtccaggaattcgctcttttctttaccatctttgatgagaccaagtcctggtacttcacggaaaacatggagcgcaattgcagagccccctgtaacatacagatggaggaccctacctttaaggaaaattatcggttccacgcaatcaacggatacattatggatacactccctggccttgtgatggctcaggaccaacgaatcaggtggtacctcctcagcatgggttctaatgagaacatacactccattcacttttcaggacatgtgttcactgtccggaagaaagaagagtataagatggccctctacaatttgtatccaggcgtgtttggtaccgttgaaatgcttccctctaaagctggcatctggagagtagagtgcttgatcggagaacatcttcacgcaggtatgagcaccttgttcctcgtgtacagcaacaaatgtcagaatccacttggcatggccagtggacacattcgcgactttcagatcacagcatctggccagtatggacaatgggccccaaagttggctcgcctccattactccggtagcataaatgcgtggtccactaaagaacctttcagctggattaaggtcgatcttcttgcccccatgatcatccacggcattaagacacagggagcgaggcagaaattctcctccctctacatctcacagttcattattatgtatagtttggacggcaagaagtggcaaacttatagaggtaacagtactggaacagacatggtgttcttcggcaacgttgatagctctggcatcaaacacaacatctttaatcctcccataatagctcggtacatcagattgcatccgacccactacagcattaggagtacactccgaatggagcttatgggttgcgacttgaattcctgttcaatgccactcggaatggagtctaaagccatctctgatgcacagataaccgccagtagctactttacgaacatgtttgctacgtggtcaccctctaaggcaaggcttcatttgcaaggccggtctaatgcctggagacctcaggtgaacaacccgaaagaatggctccaggtggactttcagaagaccatgaaagtaacaggtgtcactactcagggagttaagtccttggatactagcatgtatgtgaaggagttccttatttcctcatcacaagatggccaccagtggaccctcttctttcagaatggtaaggtcaaagtgtttcagggcaatcaagacagcttcacacccgtggtgaacagtcttgatcctccactcttgacacgataccttcgaatccatccacagtcttgggagcaccagattgcattgcgcatggaagtacttggatgcgaggctcaggacctctac

SEQ ID NO: 1576 - protein, 1457 aa, synthetic construct
  REGION 1..1457: note = Variant of human B-domain deleted Factor VIII
MQIELSTCFFLCLLRFCFSATRRYYLGAVELSWDYMQSDLGELPVDARFPPRVPKSFPFNTSQVYKKTLFVEFTDHLFNIAKPRPPWMGLLGPTIQAEVYDTVVITLKNMASHPVSLHAVGVSYWKASEGAEYDDQTSQREKEDDKVFPGGSHTYVWQVLKENGPMASDPPCLTYSYLSHVDLVKDLNSGLIGALLVCREGSLAKEKTQTLHKFILLFAVFDEGKSWHSETKNSLMQDRDAASARAWPKMHTVNGYVNRTLPGLIGCHRKSVYWHVIGMGTTPEVHSIFLEGHTFLVRNHRQASLGISPITFLTAQTLLMDLGQFLLFCHIPSHQHDGMEAYVKVDSCPEEPQLRMKNNEEAEDYDDDLTDSEMDVVRFDDDNSPSIIQARSGAKKHPKTWVHYIAAEEEDWDYAPLVLAPDDRSYKSQYLNNGPQRIGRKYKKVRFMAYTDETFKTREAIQHESGILGPLLYGEVGDTLLIIFKNQASRPYNIYPHGITDVRPLYSRRLPKGVKHLKDFPILPGEIFKYKWTVTVEDGPTKSDPRCLTRYYSSFVNMERDLASGLIGPLLICYKESVDQRGNQIMSDKRNVILFSVFDENRSWYLTENIQRFLPNPAGVQLEDPEFQASNIMHSINGYVFDSLQLSVCLHEVAYWYILSIGAQTDFLSVFFSGYTFKHKMVYEDTLTLFPFSGETVFMSMENPGLWILGCHNSDFRNRGMTALLKVSSCDWNTGDYYEDSYEDISAYFDSKNNAIEPRSFSQNPPVLKRHQREGTRTTLQSDQEEIDYDDTISVEMKKEDFDIYDEDENQSPRSFQKKTRHYFIAAVERLWDYGMSSSPHVLRNRAQSGSVPQFKKVVFQEFTDGSFTQPLYRGELNEHLGLLGPYIRAEVEDNIMVTFRNQASRPYSFYSSLISYEEDQRQGAEPRKNFVKPNETKTYFWKVQHHMAPTKDEFDCKAWAYFSDVDLEKDVHSGLIGPLLVCHTNTLNPAHGRQVTVQEFALFFTIFDETKSWYFTENMERNCRAPCNIQMEDPTFKENYRFHAINGYIMDTLPGLVMAQDQRIRWYLLSMGSNENIHSIHFSGHVFTVRKKEEYKMALYNLYPGVFGTVEMLPSKAGIWRVECLIGEHLHAGMSTLFLVYSNKCQNPLGMASGHIRDFQITASGQYGQWAPKLARLHYSGSINAWSTKEPFSWIKVDLLAPMIIHGIKTQGARQKFSSLYISQFIIMYSLDGKKWQTYRGNSTGTDMVFFGNVDSSGIKHNIFNPPIIARYIRLHPTHYSIRSTLRMELMGCDLNSCSMPLGMESKAISDAQITASSYFTNMFATWSPSKARLHLQGRSNAWRPQVNNPKEWLQVDFQKTMKVTGVTTQGVKSLDTSMYVKEFLISSSQDGHQWTLFFQNGKVKVFQGNQDSFTPVVNSLDPPLLTRYLRIHPQSWEHQIALRMEVLGCEAQDLY

SEQ ID NO: 1577 - DNA, 4371 bp, synthetic construct
  misc_feature 1..4371: note = Variant of human B-domain deleted Factor VIII
  source 1..4371: mol_type = other DNA
atgcagattgaactgtctacctgcttcttcctctgtttgctgaggttctgctttagcgccactagacggtactaccttggcgctgtggagctgtcctgggactatatgcagagtgatttgggagagcttcccgtcgacgcacgatttcctcctcgcgttccaaagtcatttccctttaacacaagccaggtgtacaagaagacgctcttcgtcgaattcaccgatcacctgttcaatatcgccaaacccagaccaccatggatgggtcttttggggcctaccatacaagcggaggtgtatgacacagttgttatcactctcaagaacatggcttctcatccggtaagtcttcacgcagtgggcgtgtcctactggaaagcttcagaaggagccgagtatgatgatcagacatcccagagggagaaagaagacgacaaggtatttccaggtgggtctcatacctatgtgtggcaagtgctcaaagagaatggccctatggcacgggatccgccgtgtttgacttacagctacctttcacacgttgacctcgtcaaggacctcaactccgggttgattggagccttgttggtatgcagggaaggatctcttgccaaagagaagacacagaccctccacaagtttatccttctctttgctgtgttcgatgagggcaaaagttggcatagcgaaacgaagaattccctcatgcaggatcgcgacgcagccagcgccagagcttggcccaagatgcacactgtgaacggatatgtcaataggacgcttcctggcttgattgggtgtcatcggaaaagtgtctactggcacgtgatcggaatggggacaacaccagaggtccactccatatttctcgaaggccataccttccttgttcgaaaccacagacaggcatccttggggatctctcccattacctttctcactgcccaaacgctccttatggacttgggtcagttccttctcttttgccatatcccgtcacaccagcatgatggtatggaagcttatgtgaaagtcgacagttgtcctgaggagccacagttgcgcatgaagaataatgaagaagccgaggattacgacgacgatctcaccgattctgagatggacgtggtgaggtttgatgacgacaactctccctccatcattcaagctcggagcggggcgaagaaacaccccaagacttgggtccactatatagcggcggaagaggaggattgggattacgctcctcttgtattggcaccagatgaccgctcatacaaaagccagtacctcaacaacggaccgcagagaattggccggaagtataagaaagtgcgatttatggcctatacagacgaaacctttaagacaagggaggccatccagcatgagagtgggattttgggacctcttctttacggcgaagttggtgataccctcctcatcatcttcaagaatcaagcttctcgcccctataacatttacccacacgggatcactgacgttaggcctttgtatagcagaagacttcccaaaggcgtgaagcatctcaaagacttccccattttgccaggcgagatctttaagtacaaatggaccgtcacagtggaagatggaccgactaaatcagaccctcgatgccttacgcggtactattcctccttcgtgaatatggagagagatttggcaagcggactcataggaccactcctcatctgttacaaggaatctgtagaccagaggggtaaccagattatgagtgataaacgcaatgtgatcctttttagcgtcttcgacgagaaccggtcctggtacttgaccgagaatatacaaaggttccttcccaaccccgcaggcgttcagttggaagaccctgagtttcaggccagcaatattatgcactcaatcaacggctatgtgtttgatagtctccagctttctgtttgcctccatgaagtagcctattggtacatcttgtcaattggtgctcaaacagacttcctctccgtcttcttctccggctacacctttaagcacaagatggtgtatgaggacactctcacactctttccattttctggagaaaccgtgttcatgagcatggagaatccaggcctttggatcttgggttgccacaacagtgattttcgcaatcggggaatgactgctctcctcaaagtcagcagctgtgattggaacacaggcgactattacgaagattcttacgaggacataagtgcctactttgactccaagaataacgccattgagcccagatcattctcccagaatcctcccgtgcttaaaaggcatcagcgcgaaggtaccagaactactcttcagtctgatcaagaggagattgactatgacgacaccattagcgtggaaatgaagaaggaggatttcgatatctatgacgaagatgagaaccagtctccgcggagctttcagaagaagacgcgacactacttcattgcagcagtcgaaaggctttgggactacggtatgtcatcatcccctcatgtgttgcgcaatagagctcagagtggaagtgttccacagttcaagaaagtcgtctttcaagagtttacagatggcagcttcacacagcctctctatcggggcgagcttaacgaacatttgggactccttggtccctatatccgagccgaagtggaggacaacattatggttacctttaggaatcaagcctctcgcccctacagcttctactcctccctcatcagttatgaggaggatcagagacaaggcgctgaaccacggaagaactttgtgaaaccgaatgagacgaagacctacttctggaaagtacagcaccacatggcccccacaaaagacgaattcgattgcaaagcatgggcgtatttttcagacgttgacttggagaaagatgtacattcaggacttattggtcctttgttggtgtgtcacactaacactctcaatccagcccatggcaggcaggtgacagtccaggaattcgctcttttctttaccatctttgatgagaccaagtcctggtacttcacggaaaacatggagcgcaattgcagagccccctgtaacatacagatggaggaccctacctttaaggaaaattatcggttccacgcaatcaacggatacattatggatacactccctggccttgtgatggctcaggaccaacgaatcaggtggtacctcctcagcatgggttctaatgagaacatacactccattcacttttcaggacatgtgttcactgtccggaagaaagaagagtataagatggccctctacaatttgtatccaggcgtgtttgagaccgttgaaatgcttccctctaaagctggcatctggagagtagagtgcttgatcggagaacatcttcacgcaggtatgagcaccttgttcctcgtgtacagcaacaaatgtcagaatccacttggcatggccagtggacacattcgcgactttcagatcacagcatctggccagtatggacaatgggccccaaagttggctcgcctccattactccggtagcataaatgcgtggtccactaaagaacctttcagctggattaaggtcgatcttcttgcccccatgatcatccacggcattaagacacagggagcgaggcagaaattctcctccctctacatctcacagttcattattatgtatagtttggacggcaagaagtggcaaacttatagaggtaacagtactggaacagacatggtgttcttcggcaacgttgatagctctggcatcaaacacaacatctttaatcctcccataatagctcggtacatcagattgcatccgacccactacagcattaggagtacactccgaatggagcttatgggttgcgacttgaattcctgttcaatgccactcggaatggagtctaaagccatctctgatgcacagataaccgccagtagctactttacgaacatgtttgctacgtggtcaccctctaaggcaaggcttcatttgcaaggccggtctaatgcctggagacctcaggtgaacaacccgaaagaatggctccaggtggactttcagaagaccatgaaagtaacaggtgtcactactcagggagttaagtccttggatactagcatgtatgtgaaggagttccttatttcctcatcacaagatggccaccagtggaccctcttctttcagaatggtaaggtcaaagtgtttcagggcaatcaagacagcttcacacccgtggtgaacagtcttgatcctccactcttgacacgataccttcgaatccatccacagtcttgggagcaccagattgcattgcgcatggaagtacttggatgcgaggctcaggacctctac

SEQ ID NO: 1578 - protein, 1457 aa, synthetic construct
  REGION 1..1457: note = Variant of human B-domain deleted Factor VIII
MQIELSTCFFLCLLRFCFSATRRYYLGAVELSWDYMQSDLGELPVDARFPPRVPKSFPFNTSQVYKKTLFVEFTDHLFNIAKPRPPWMGLLGPTIQAEVYDTVVITLKNMASHPVSLHAVGVSYWKASEGAEYDDQTSQREKEDDKVFPGGSHTYVWQVLKENGPMARDPPCLTYSYLSHVDLVKDLNSGLIGALLVCREGSLAKEKTQTLHKFILLFAVFDEGKSWHSETKNSLMQDRDAASARAWPKMHTVNGYVNRTLPGLIGCHRKSVYWHVIGMGTTPEVHSIFLEGHTFLVRNHRQASLGISPITFLTAQTLLMDLGQFLLFCHIPSHQHDGMEAYVKVDSCPEEPQLRMKNNEEAEDYDDDLTDSEMDVVRFDDDNSPSIIQARSGAKKHPKTWVHYIAAEEEDWDYAPLVLAPDDRSYKSQYLNNGPQRIGRKYKKVRFMAYTDETFKTREAIQHESGILGPLLYGEVGDTLLIIFKNQASRPYNIYPHGITDVRPLYSRRLPKGVKHLKDFPILPGEIFKYKWTVTVEDGPTKSDPRCLTRYYSSFVNMERDLASGLIGPLLICYKESVDQRGNQIMSDKRNVILFSVFDENRSWYLTENIQRFLPNPAGVQLEDPEFQASNIMHSINGYVFDSLQLSVCLHEVAYWYILSIGAQTDFLSVFFSGYTFKHKMVYEDTLTLFPFSGETVFMSMENPGLWILGCHNSDFRNRGMTALLKVSSCDWNTGDYYEDSYEDISAYFDSKNNAIEPRSFSQNPPVLKRHQREGTRTTLQSDQEEIDYDDTISVEMKKEDFDIYDEDENQSPRSFQKKTRHYFIAAVERLWDYGMSSSPHVLRNRAQSGSVPQFKKVVFQEFTDGSFTQPLYRGELNEHLGLLGPYIRAEVEDNIMVTFRNQASRPYSFYSSLISYEEDQRQGAEPRKNFVKPNETKTYFWKVQHHMAPTKDEFDCKAWAYFSDVDLEKDVHSGLIGPLLVCHTNTLNPAHGRQVTVQEFALFFTIFDETKSWYFTENMERNCRAPCNIQMEDPTFKENYRFHAINGYIMDTLPGLVMAQDQRIRWYLLSMGSNENIHSIHFSGHVFTVRKKEEYKMALYNLYPGVFETVEMLPSKAGIWRVECLIGEHLHAGMSTLFLVYSNKCQNPLGMASGHIRDFQITASGQYGQWAPKLARLHYSGSINAWSTKEPFSWIKVDLLAPMIIHGIKTQGARQKFSSLYISQFIIMYSLDGKKWQTYRGNSTGTDMVFFGNVDSSGIKHNIFNPPIIARYIRLHPTHYSIRSTLRMELMGCDLNSCSMPLGMESKAISDAQITASSYFTNMFATWSPSKARLHLQGRSNAWRPQVNNPKEWLQVDFQKTMKVTGVTTQGVKSLDTSMYVKEFLISSSQDGHQWTLFFQNGKVKVFQGNQDSFTPVVNSLDPPLLTRYLRIHPQSWEHQIALRMEVLGCEAQDLY

SEQ ID NO: 1579 - DNA, 4371 bp, synthetic construct
  misc_feature 1..4371: note = Variant of human B-domain deleted Factor VIII
  source 1..4371: mol_type = other DNA
atgcagattgaactgtctacctgcttcttcctctgtttgctgaggttctgctttagcgccactagacggtactaccttggcgctgtggagctgtcctgggactatatgcagagtgatttgggagagcttcccgtcgacgcacgatttcctcctcgcgttccaaagtcatttccctttaacacaagccaggtgtacaagaagacgctcttcgtcgaattcaccgatcacctgttcaatatcgccaaacccagaccaccatggatgggtcttttggggcctaccatacaagcggaggtgtatgacacagttgttatcactctcaagaacatggcttctcatccggtaagtcttcacgcagtgggcgtgtcctactggaaagcttcagaaggagccgagtatgatgatcagacatcccagagggagaaagaagacgacaaggtatttccaggtgggtctcatacctatgtgtggcaagtgctcaaagagaatggccctatggcaagcgatccgccgtgtttgacttacagctacctttcacacgttgacctcgtcaaggacctcaactccgggttgattggagccttgttggtatgcagggaaggatctcttgccaaagagaagacacagaccctccacaagtttatccttctctttgctgtgttcgatgagggcaaaagttggcatagcgaaacgaagaattccctcatgcaggatcgcgacgcagccagcgccagagcttggcccaagatgcacactgtgaacggatatgtcaataggacgcttcctggcttgattgggtgtcatcggaaaagtgtctactggcacgtgatcggaatggggacaacaccagaggtccactccatatttctcgaaggccataccttccttgttcgaaaccacagacaggcatccttggggatctctcccattacctttctcactgcccaaacgctccttatggacttgggtcagttccttctcttttgccatatcccgtcacaccagcatgatggtatggaagcttatgtgaaagtcgacagttgtcctgaggagccacagttgcgcatgaagaataatgaagaagccgaggattacgacgacgatctcaccgattctgagatggacgtggtgaggtttgatgacgacaactctccctccatcattcaagctcggagcggggcgaagaaacaccccaagacttgggtccactatatagcggcggaagaggaggattgggattacgctcctcttgtattggcaccagatgaccgctcatacaaaagccagtacctcaacaacggaccgcagagaattggccggaagtataagaaagtgcgatttatggcctatacagacgaaacctttaagacaagggaggccatccagcatgagagtgggattttgggacctcttctttacggcgaagttggtgataccctcctcatcatcttcaagaatcaagcttctcgcccctataacatttacccacacgggatcactgacgttaggcctttgtatagcagaagacttcccaaaggcgtgaagcatctcaaagacttccccattttgccaggcgagatctttaagtacaaatggaccgtcacagtggaagatggaccgactaaatcagaccctcgatgccttacgcggtactattcctccttcgtgaatatggagagagatttggcaagcggactcataggaccactcctcatctgttacaaggaatctgtagaccagaggggtaaccagattatgagtgataaacgcaatgtgatcctttttagcgtcttcgacgagaaccggtcctggtacttgaccgagaatatacaaaggttccttcccaaccccgcaggcgttcagttggaagaccctgagtttcaggccagcaatattatgcactcaatcaacggctatgtgtttgatagtctccagctttctgtttgcctccatgaagtagcctattggtacatcttgtcaattggtgctcaaacagacttcctctccgtcttcttctccggctacacctttaagcacaagatggtgtatgaggacactctcacactctttccattttctggagaaaccgtgttcatgagcatggagaatccaggcctttggatcttgggttgccacaacagtgattttcgcaatcggggaatgactgctctcctcaaagtcagcagctgtgattggaacacaggcgactattacgaagattcttacgaggacataagtgcctactttgactccaagaataacgccattgagcccagatcattctcccagaatcctcccgtgcttaaaaggcatcagcgcgaaggtaccagaactactcttcagtctgatcaagaggagattgactatgacgacaccattagcgtggaaatgaagaaggaggatttcgatatctatgacgaagatgagaaccagtctccgcggagctttcagaagaagacgcgacactacttcattgcagcagtcgaaaggctttgggactacggtatgtcatcatcccctcatgtgttgcgcaatagagctcagagtggaagtgttccacagttcaagaaagtcgtctttcaagagtttacagatggcagcttcacacagcctctctatcggggcgagcttaacgaacatttgggactccttggtccctatatccgagccgaagtggaggacaacattatggttacctttaggaatcaagcctctcgcccctacagcttctactcctccctcatcagttatgaggaggataggagacaaggcgctgaaccacggaagaactttgtgaaaccgaatgagacgaagacctacttctggaaagtacagcaccacatggcccccacaaaagacgaattcgattgcaaagcatgggcgtatttttcagacgttgacttggagaaagatgtacattcaggacttattggtcctttgttggtgtgtcacactaacactctcaatccagcccatggcaggcaggtgacagtccaggaattcgctcttttctttaccatctttgatgagaccaagtcctggtacttcacggaaaacatggagcgcaattgcagagccccctgtaacatacagatggaggaccctacctttaaggaaaattatcggttccacgcaatcaacggatacattatggatacactccctggccttgtgatggctcaggaccaacgaatcaggtggtacctcctcagcatgggttctaatgagaacatacactccattcacttttcaggacatgtgttcactgtccggaagaaagaagagtataagatggccctctacaatttgtatccaggcgtgtttgagaccgttgaaatgcttccctctaaagctggcatctggagagtagagtgcttgatcggagaacatcttcacgcaggtatgagcaccttgttcctcgtgtacagcaacaaatgtcagaatccacttggcatggccagtggacacattcgcgactttcagatcacagcatctggccagtatggacaatgggccccaaagttggctcgcctccattactccggtagcataaatgcgtggtccactaaagaacctttcagctggattaaggtcgatcttcttgcccccatgatcatccacggcattaagacacagggagcgaggcagaaattctcctccctctacatctcacagttcattattatgtatagtttggacggcaagaagtggcaaacttatagaggtaacagtactggaacagacatggtgttcttcggcaacgttgatagctctggcatcaaacacaacatctttaatcctcccataatagctcggtacatcagattgcatccgacccactacagcattaggagtacactccgaatggagcttatgggttgcgacttgaattcctgttcaatgccactcggaatggagtctaaagccatctctgatgcacagataaccgccagtagctactttacgaacatgtttgctacgtggtcaccctctaaggcaaggcttcatttgcaaggccggtctaatgcctggagacctcaggtgaacaacccgaaagaatggctccaggtggactttcagaagaccatgaaagtaacaggtgtcactactcagggagttaagtccttggatactagcatgtatgtgaaggagttccttatttcctcatcacaagatggccaccagtggaccctcttctttcagaatggtaaggtcaaagtgtttcagggcaatcaagacagcttcacacccgtggtgaacagtcttgatcctccactcttgacacgataccttcgaatccatccacagtcttgggagcaccagattgcattgcgcatggaagtacttggatgcgaggctcaggacctctac

SEQ ID NO: 1580 - protein, 1457 aa, synthetic construct
  REGION 1..1457: note = Variant of human B-domain deleted Factor VIII
MQIELSTCFFLCLLRFCFSATRRYYLGAVELSWDYMQSDLGELPVDARFPPRVPKSFPFNTSQVYKKTLFVEFTDHLFNIAKPRPPWMGLLGPTIQAEVYDTVVITLKNMASHPVSLHAVGVSYWKASEGAEYDDQTSQREKEDDKVFPGGSHTYVWQVLKENGPMASDPPCLTYSYLSHVDLVKDLNSGLIGALLVCREGSLAKEKTQTLHKFILLFAVFDEGKSWHSETKNSLMQDRDAASARAWPKMHTVNGYVNRTLPGLIGCHRKSVYWHVIGMGTTPEVHSIFLEGHTFLVRNHRQASLGISPITFLTAQTLLMDLGQFLLFCHIPSHQHDGMEAYVKVDSCPEEPQLRMKNNEEAEDYDDDLTDSEMDVVRFDDDNSPSIIQARSGAKKHPKTWVHYIAAEEEDWDYAPLVLAPDDRSYKSQYLNNGPQRIGRKYKKVRFMAYTDETFKTREAIQHESGILGPLLYGEVGDTLLIIFKNQASRPYNIYPHGITDVRPLYSRRLPKGVKHLKDFPILPGEIFKYKWTVTVEDGPTKSDPRCLTRYYSSFVNMERDLASGLIGPLLICYKESVDQRGNQIMSDKRNVILFSVFDENRSWYLTENIQRFLPNPAGVQLEDPEFQASNIMHSINGYVFDSLQLSVCLHEVAYWYILSIGAQTDFLSVFFSGYTFKHKMVYEDTLTLFPFSGETVFMSMENPGLWILGCHNSDFRNRGMTALLKVSSCDWNTGDYYEDSYEDISAYFDSKNNAIEPRSFSQNPPVLKRHQREGTRTTLQSDQEEIDYDDTISVEMKKEDFDIYDEDENQSPRSFQKKTRHYFIAAVERLWDYGMSSSPHVLRNRAQSGSVPQFKKVVFQEFTDGSFTQPLYRGELNEHLGLLGPYIRAEVEDNIMVTFRNQASRPYSFYSSLISYEEDRRQGAEPRKNFVKPNETKTYFWKVQHHMAPTKDEFDCKAWAYFSDVDLEKDVHSGLIGPLLVCHTNTLNPAHGRQVTVQEFALFFTIFDETKSWYFTENMERNCRAPCNIQMEDPTFKENYRFHAINGYIMDTLPGLVMAQDQRIRWYLLSMGSNENIHSIHFSGHVFTVRKKEEYKMALYNLYPGVFETVEMLPSKAGIWRVECLIGEHLHAGMSTLFLVYSNKCQNPLGMASGHIRDFQITASGQYGQWAPKLARLHYSGSINAWSTKEPFSWIKVDLLAPMIIHGIKTQGARQKFSSLYISQFIIMYSLDGKKWQTYRGNSTGTDMVFFGNVDSSGIKHNIFNPPIIARYIRLHPTHYSIRSTLRMELMGCDLNSCSMPLGMESKAISDAQITASSYFTNMFATWSPSKARLHLQGRSNAWRPQVNNPKEWLQVDFQKTMKVTGVTTQGVKSLDTSMYVKEFLISSSQDGHQWTLFFQNGKVKVFQGNQDSFTPVVNSLDPPLLTRYLRIHPQSWEHQIALRMEVLGCEAQDLY

SEQ ID NO: 1581 - DNA, 4371 bp, synthetic construct
  misc_feature 1..4371: note = Variant of human B-domain deleted Factor VIII
  source 1..4371: mol_type = other DNA
atgcagattgaactgtctacctgcttcttcctctgtttgctgaggttctgctttagcgccactagacggtactaccttggcgctgtggagctgtcctgggactatatgcagagtgatttgggagagcttcccgtcgacgcacgatttcctcctcgcgttccaaagtcatttccctttaacacaagccaggtgtacaagaagacgctcttcgtcgaattcaccgatcacctgttcaatatcgccaaacccagaccaccatggatgggtcttttggggcctaccatacaagcggaggtgtatgacacagttgttatcactctcaagaacatggcttctcatccggtaagtcttcacgcagtgggcgtgtcctactggaaagcttcagaaggagccgagtatgatgatcagacatcccagagggagaaagaagacgacaaggtatttccaggtgggtctcatacctatgtgtggcaagtgctcaaagagaatggccctatggcaagcgatccgccgtgtttgacttacagctacctttcacacgttgacctcgtcaaggacctcaactccgggttgattggagccttgttggtatgcagggaaggatctcttgccaaagagaagacacagaccctccacaagtttatccttctctttgctgtgttcgatgagggcaaaagttggcatagcgaaacgaagaattccctcatgcaggatcgcgacgcagccagcgccagagcttggcccaagatgcacactgtgaacggatatgtcaataggacgcttcctggcttgattgggtgtcatcggaaaagtgtctactggcacgtgatcggaatggggacaacaccagaggtccactccatatttctcgaaggccataccttccttgttcgaaaccacagacaggcatccttggggatctctcccattacctttctcactgcccaaacgctccttatggacttgggtcagttccttctcttttgccatatcccgtcacaccagcatgatggtatggaagcttatgtgaaagtcgacagttgtcctgaggagccacagttgcgcatgaagaataatgaagaagccgaggattacgacgacgatctcaccgattctgagatggacgtggtgaggtttgatgacgacaactctccctccatcattcaagctcggagcggggcgaagaaacaccccaagacttgggtccactatatagcggcggaagaggaggattgggattacgctcctcttgtattggcaccagatgaccgctcatacaaaagccagtacctcaacaacggaccgcagagaattggccggaagtataagaaagtgcgatttatggcctatacagacgaaacctttaagacaagggaggccatccagcatgagagtgggattttgggacctcttctttacggcgaagttggtgataccctcctcatcatcttcaagaatcaagcttctcgcccctataacatttacccacacgggatcactgacgttaggcctttgtatagcagaagacttcccaaaggcgtgaagcatctcaaagacttccccattttgccaggcgagatctttaagtacaaatggaccgtcacagtggaagatggaccgactaaatcagaccctcgatgccttacgcggtactattcctccttcgtgaatatggagagagatttggcaagcggactcataggaccactcctcatctgttacaaggaatctgtagaccagaggggtaaccagattatgagtgataaacgcaatgtgatcctttttagcgtcttcgacgagaaccggtcctggtacttgaccgagaatatacaaaggttccttcccaaccccgcaggcgttcagttggaagaccctgagtttcaggccagcaatattatgcactcaatcaacggctatgtgtttgatagtctccagctttctgtttgcctccatgaagtagcctattggtacatcttgtcaattggtgctcaaacagacttcctctccgtcttcttctccggctacacctttaagcacaagatggtgtatgaggacactctcacactctttccattttctggagaaaccgtgttcatgagcatggagaatccaggcctttggatcttgggttgccacaacagtgattttcgcaatcggggaatgactgctctcctcaaagtcagcagctgtgattggaacacaggcgactattacgaagattcttacgaggacataagtgcctactttgactccaagaataacgccattgagcccagatcattctcccagaatcctcccgtgcttaaaaggcatcagcgcgaaggtaccagaactactcttcagtctgatcaagaggagattgactatgacgacaccattagcgtggaaatgaagaaggaggatttcgatatctatgacgaagatgagaaccagtctccgcggagctttcagaagaagacgcgacactacttcattgcagcagtcgaaaggctttgggactacggtatgtcatcatcccctcatgtgttgcgcaatagagctcagagtggaagtgttccacagttcaagaaagtcgtctttcaagagtttacagatggcagcttcacacagcctctctatcggggcgagcttaacgaacatttgggactccttggtccctatatccgagccgaagtggaggacaacattatggttacctttaggaatcaagcctctcgcccctacagcttctactcctccctcatcagttatgaggaggatcagagacaaggcgctacgccacggaagaactttgtgaaaccgaatgagacgaagacctacttctggaaagtacagcaccacatggcccccacaaaagacgaattcgattgcaaagcatgggcgtatttttcagacgttgacttggagaaagatgtacattcaggacttattggtcctttgttggtgtgtcacactaacactctcaatccagcccatggcaggcaggtgacagtccaggaattcgctcttttctttaccatctttgatgagaccaagtcctggtacttcacggaaaacatggagcgcaattgcagagccccctgtaacatacagatggaggaccctacctttaaggaaaattatcggttccacgcaatcaacggatacattatggatacactccctggccttgtgatggctcaggaccaacgaatcaggtggtacctcctcagcatgggttctaatgagaacatacactccattcacttttcaggacatgtgttcactgtccggaagaaagaagagtataagatggccctctacaatttgtatccaggcgtgtttgagaccgttgaaatgcttccctctaaagctggcatctggagagtagagtgcttgatcggagaacatcttcacgcaggtatgagcaccttgttcctcgtgtacagcaacaaatgtcagaatccacttggcatggccagtggacacattcgcgactttcagatcacagcatctggccagtatggacaatgggccccaaagttggctcgcctccattactccggtagcataaatgcgtggtccactaaagaacctttcagctggattaaggtcgatcttcttgcccccatgatcatccacggcattaagacacagggagcgaggcagaaattctcctccctctacatctcacagttcattattatgtatagtttggacggcaagaagtggcaaacttatagaggtaacagtactggaacagacatggtgttcttcggcaacgttgatagctctggcatcaaacacaacatctttaatcctcccataatagctcggtacatcagattgcatccgacccactacagcattaggagtacactccgaatggagcttatgggttgcgacttgaattcctgttcaatgccactcggaatggagtctaaagccatctctgatgcacagataaccgccagtagctactttacgaacatgtttgctacgtggtcaccctctaaggcaaggcttcatttgcaaggccggtctaatgcctggagacctcaggtgaacaacccgaaagaatggctccaggtggactttcagaagaccatgaaagtaacaggtgtcactactcagggagttaagtccttggatactagcatgtatgtgaaggagttccttatttcctcatcacaagatggccaccagtggaccctcttctttcagaatggtaaggtcaaagtgtttcagggcaatcaagacagcttcacacccgtggtgaacagtcttgatcctccactcttgacacgataccttcgaatccatccacagtcttgggagcaccagattgcattgcgcatggaagtacttggatgcgaggctcaggacctctac

SEQ ID NO: 1582 - protein, 1457 aa, synthetic construct
  REGION 1..1457: note = Variant of human B-domain deleted Factor VIII
MQIELSTCFFLCLLRFCFSATRRYYLGAVELSWDYMQSDLGELPVDARFPPRVPKSFPFNTSQVYKKTLFVEFTDHLFNIAKPRPPWMGLLGPTIQAEVYDTVVITLKNMASHPVSLHAVGVSYWKASEGAEYDDQTSQREKEDDKVFPGGSHTYVWQVLKENGPMASDPPCLTYSYLSHVDLVKDLNSGLIGALLVCREGSLAKEKTQTLHKFILLFAVFDEGKSWHSETKNSLMQDRDAASARAWPKMHTVNGYVNRTLPGLIGCHRKSVYWHVIGMGTTPEVHSIFLEGHTFLVRNHRQASLGISPITFLTAQTLLMDLGQFLLFCHIPSHQHDGMEAYVKVDSCPEEPQLRMKNNEEAEDYDDDLTDSEMDVVRFDDDNSPSIIQARSGAKKHPKTWVHYIAAEEEDWDYAPLVLAPDDRSYKSQYLNNGPQRIGRKYKKVRFMAYTDETFKTREAIQHESGILGPLLYGEVGDTLLIIFKNQASRPYNIYPHGITDVRPLYSRRLPKGVKHLKDFPILPGEIFKYKWTVTVEDGPTKSDPRCLTRYYSSFVNMERDLASGLIGPLLICYKESVDQRGNQIMSDKRNVILFSVFDENRSWYLTENIQRFLPNPAGVQLEDPEFQASNIMHSINGYVFDSLQLSVCLHEVAYWYILSIGAQTDFLSVFFSGYTFKHKMVYEDTLTLFPFSGETVFMSMENPGLWILGCHNSDFRNRGMTALLKVSSCDWNTGDYYEDSYEDISAYFDSKNNAIEPRSFSQNPPVLKRHQREGTRTTLQSDQEEIDYDDTISVEMKKEDFDIYDEDENQSPRSFQKKTRHYFIAAVERLWDYGMSSSPHVLRNRAQSGSVPQFKKVVFQEFTDGSFTQPLYRGELNEHLGLLGPYIRAEVEDNIMVTFRNQASRPYSFYSSLISYEEDQRQGATPRKNFVKPNETKTYFWKVQHHMAPTKDEFDCKAWAYFSDVDLEKDVHSGLIGPLLVCHTNTLNPAHGRQVTVQEFALFFTIFDETKSWYFTENMERNCRAPCNIQMEDPTFKENYRFHAINGYIMDTLPGLVMAQDQRIRWYLLSMGSNENIHSIHFSGHVFTVRKKEEYKMALYNLYPGVFETVEMLPSKAGIWRVECLIGEHLHAGMSTLFLVYSNKCQNPLGMASGHIRDFQITASGQYGQWAPKLARLHYSGSINAWSTKEPFSWIKVDLLAPMIIHGIKTQGARQKFSSLYISQFIIMYSLDGKKWQTYRGNSTGTDMVFFGNVDSSGIKHNIFNPPIIARYIRLHPTHYSIRSTLRMELMGCDLNSCSMPLGMESKAISDAQITASSYFTNMFATWSPSKARLHLQGRSNAWRPQVNNPKEWLQVDFQKTMKVTGVTTQGVKSLDTSMYVKEFLISSSQDGHQWTLFFQNGKVKVFQGNQDSFTPVVNSLDPPLLTRYLRIHPQSWEHQIALRMEVLGCEAQDLY

SEQ ID NO: 1583 - DNA, 4371 bp, synthetic construct
  misc_feature 1..4371: note = Variant of human B-domain deleted Factor VIII
  source 1..4371: mol_type = other DNA
atgcagattgaactgtctacctgcttcttcctctgtttgctgaggttctgctttagcgccactagacggtactaccttggcgctgtggagctgtcctgggactatatgcagagtgatttgggagagcttcccgtcgacgcacgatttcctcctcgcgttccaaagtcatttccctttaacacaagccaggtgtacaagaagacgctcttcgtcgaattcaccgatcacctgttcaatatcgccaaacccagaccaccatggatgggtcttttggggcctaccatacaagcggaggtgtatgacacagttgttatcactctcaagaacatggcttctcatccggtaagtcttcacgcagtgggcgtgtcctactggaaagcttcagaaggagccgagtatgatgatcagacatcccagagggagaaagaagacgacaaggtatttccaggtgggtctcatacctatgtgtggcaagtgctcaaagagaatggccctatggcaagcgatccgccgtgtttgacttacagctacctttcacacgttgacctcgtcaaggacctcaactccgggttgattggagccttgttggtatgcagggaaggatctcttgccaaagagaagacacagaccctccacaagtttatccttctctttgctgtgttcgatgagggcaaaagttggcatagcgaaacgaagaattccctcatgcaggatcgcgacgcagccagcgccagagcttggcccaagatgcacactgtgaacggatatgtcaataggacgcttcctggcttgattgggtgtcatcggaaaagtgtctactggcacgtgatcggaatggggacaacaccagaggtccactccatatttctcgaaggccataccttccttgttcgaaaccacagacaggcatccttggggatctctcccattacctttctcactgcccaaacgctccttatggacttgggtcagttccttctcttttgccatatcccgtcacaccagcatgatggtatggaagcttatgtgaaagtcgacagttgtcctgaggagccacagttgcgcatgaagaataatgaagaagccgaggattacgacgacgatctcaccgattctgagatggacgtggtgaggtttgatgacgacaactctccctccatcattcaagctcggagcggggcgaagaaacaccccaagacttgggtccactatatagcggcggaagaggaggattgggattacgctcctcttgtattggcaccagatgaccgctcatacaaaagccagtacctcaacaacggaccgcagagaattggccggaagtataagaaagtgcgatttatggcctatacagacgaaacctttaagacaagggaggccatccagcatgagagtgggattttgggacctcttctttacggcgaagttggtgataccctcctcatcatcttcaagaatcaagcttctcgcccctataacatttacccacacgggatcactgacgttaggcctttgtatagcagaagacttcccaaaggcgtgaagcatctcaaagacttccccattttgccaggcgagatctttaagtacaaatggaccgtcacagtggaagatggaccgactaaatcagaccctcgatgccttacgcggtactattcctccttcgtgaatatggagagagatttggcaagcggactcataggaccactcctcatctgttacaaggaatctgtagaccagaggggtaaccagattatgagtgataaacgcaatgtgatcctttttagcgtcttcgacgagaaccggtcctggtacttgaccgagaatatacaaaggttccttcccaaccccgcaggcgttcagttggaagaccctgagtttcaggccagcaatattatgcactcaatcaacggctatgtgtttgatagtctccagctttctgtttgcctccatgaagtagcctattggtacatcttgtcaattggtgctcaaacagacttcctctccgtcttcttctccggctacacctttaagcacaagatggtgtatgaggacactctcacactctttccattttctggagaaaccgtgttcatgagcatggagaatccaggcctttggatcttgggttgccacaacagtgattttcgcaatcggggaatgactgctctcctcaaagtcagcagctgtgattggaacacaggcgactattacgaagattcttacgaggacataagtgcctactttgactccaagaataacgccattgagcccagatcattctcccagaatcctcccgtgcttaaaaggcatcagcgcgaaggtaccagaactactcttcagtctgatcaagaggagattgactatgacgacaccattagcgtggaaatgaagaaggaggatttcgatatctatgacgaagatgagaaccagtctccgcggagctttcagaagaagacgcgacactacttcattgcagcagtcgaaaggctttgggactacggtatgtcatcatcccctcatgtgttgcgcaatagagctcagagtggaagtgttccacagttcaagaaagtcgtctttcaagagtttacagatggcagcttcacacagcctctctatcggggcgagcttaacgaacatttgggactccttggtccctatatccgagccgaagtggaggacaacattatggttacctttaggaatcaagcctctcgcccctacagcttctactcctccctcatcacgtatgaggaggatcagagacaaggcgctgaaccacggaagaactttgtgaaaccgaatgagacgaagacctacttctggaaagtacagcaccacatggcccccacaaaagacgaattcgattgcaaagcatgggcgtatttttcagacgttgacttggagaaagatgtacattcaggacttattggtcctttgttggtgtgtcacactaacactctcaatccagcccatggcaggcaggtgacagtccaggaattcgctcttttctttaccatctttgatgagaccaagtcctggtacttcacggaaaacatggagcgcaattgcagagccccctgtaacatacagatggaggaccctacctttaaggaaaattatcggttccacgcaatcaacggatacattatggatacactccctggccttgtgatggctcaggaccaacgaatcaggtggtacctcctcagcatgggttctaatgagaacatacactccattcacttttcaggacatgtgttcactgtccggaagaaagaagagtataagatggccctctacaatttgtatccaggcgtgtttgagaccgttgaaatgcttccctctaaagctggcatctggagagtagagtgcttgatcggagaacatcttcacgcaggtatgagcaccttgttcctcgtgtacagcaacaaatgtcagaatccacttggcatggccagtggacacattcgcgactttcagatcacagcatctggccagtatggacaatgggccccaaagttggctcgcctccattactccggtagcataaatgcgtggtccactaaagaacctttcagctggattaaggtcgatcttcttgcccccatgatcatccacggcattaagacacagggagcgaggcagaaattctcctccctctacatctcacagttcattattatgtatagtttggacggcaagaagtggcaaacttatagaggtaacagtactggaacagacatggtgttcttcggcaacgttgatagctctggcatcaaacacaacatctttaatcctcccataatagctcggtacatcagattgcatccgacccactacagcattaggagtacactccgaatggagcttatgggttgcgacttgaattcctgttcaatgccactcggaatggagtctaaagccatctctgatgcacagataaccgccagtagctactttacgaacatgtttgctacgtggtcaccctctaaggcaaggcttcatttgcaaggccggtctaatgcctggagacctcaggtgaacaacccgaaagaatggctccaggtggactttcagaagaccatgaaagtaacaggtgtcactactcagggagttaagtccttggatactagcatgtatgtgaaggagttccttatttcctcatcacaagatggccaccagtggaccctcttctttcagaatggtaaggtcaaagtgtttcagggcaatcaagacagcttcacacccgtggtgaacagtcttgatcctccactcttgacacgataccttcgaatccatccacagtcttgggagcaccagattgcattgcgcatggaagtacttggatgcgaggctcaggacctctac

SEQ ID NO: 1584 - protein, 1457 aa, synthetic construct
  REGION 1..1457: note = Variant of human B-domain deleted Factor VIII
MQIELSTCFFLCLLRFCFSATRRYYLGAVELSWDYMQSDLGELPVDARFPPRVPKSFPFNTSQVYKKTLFVEFTDHLFNIAKPRPPWMGLLGPTIQAEVYDTVVITLKNMASHPVSLHAVGVSYWKASEGAEYDDQTSQREKEDDKVFPGGSHTYVWQVLKENGPMASDPPCLTYSYLSHVDLVKDLNSGLIGALLVCREGSLAKEKTQTLHKFILLFAVFDEGKSWHSETKNSLMQDRDAASARAWPKMHTVNGYVNRTLPGLIGCHRKSVYWHVIGMGTTPEVHSIFLEGHTFLVRNHRQASLGISPITFLTAQTLLMDLGQFLLFCHIPSHQHDGMEAYVKVDSCPEEPQLRMKNNEEAEDYDDDLTDSEMDVVRFDDDNSPSIIQARSGAKKHPKTWVHYIAAEEEDWDYAPLVLAPDDRSYKSQYLNNGPQRIGRKYKKVRFMAYTDETFKTREAIQHESGILGPLLYGEVGDTLLIIFKNQASRPYNIYPHGITDVRPLYSRRLPKGVKHLKDFPILPGEIFKYKWTVTVEDGPTKSDPRCLTRYYSSFVNMERDLASGLIGPLLICYKESVDQRGNQIMSDKRNVILFSVFDENRSWYLTENIQRFLPNPAGVQLEDPEFQASNIMHSINGYVFDSLQLSVCLHEVAYWYILSIGAQTDFLSVFFSGYTFKHKMVYEDTLTLFPFSGETVFMSMENPGLWILGCHNSDFRNRGMTALLKVSSCDWNTGDYYEDSYEDISAYFDSKNNAIEPRSFSQNPPVLKRHQREGTRTTLQSDQEEIDYDDTISVEMKKEDFDIYDEDENQSPRSFQKKTRHYFIAAVERLWDYGMSSSPHVLRNRAQSGSVPQFKKVVFQEFTDGSFTQPLYRGELNEHLGLLGPYIRAEVEDNIMVTFRNQASRPYSFYSSLITYEEDQRQGAEPRKNFVKPNETKTYFWKVQHHMAPTKDEFDCKAWAYFSDVDLEKDVHSGLIGPLLVCHTNTLNPAHGRQVTVQEFALFFTIFDETKSWYFTENMERNCRAPCNIQMEDPTFKENYRFHAINGYIMDTLPGLVMAQDQRIRWYLLSMGSNENIHSIHFSGHVFTVRKKEEYKMALYNLYPGVFETVEMLPSKAGIWRVECLIGEHLHAGMSTLFLVYSNKCQNPLGMASGHIRDFQITASGQYGQWAPKLARLHYSGSINAWSTKEPFSWIKVDLLAPMIIHGIKTQGARQKFSSLYISQFIIMYSLDGKKWQTYRGNSTGTDMVFFGNVDSSGIKHNIFNPPIIARYIRLHPTHYSIRSTLRMELMGCDLNSCSMPLGMESKAISDAQITASSYFTNMFATWSPSKARLHLQGRSNAWRPQVNNPKEWLQVDFQKTMKVTGVTTQGVKSLDTSMYVKEFLISSSQDGHQWTLFFQNGKVKVFQGNQDSFTPVVNSLDPPLLTRYLRIHPQSWEHQIALRMEVLGCEAQDLY

SEQ ID NO: 1585 - DNA, 4371 bp, synthetic construct
  misc_feature 1..4371: note = Variant of human B-domain deleted Factor VIII
  source 1..4371: mol_type = other DNA
atgcagattgaactgtctacctgcttcttcctctgtttgctgaggttctgctttagcgccactagacggtactaccttggcgctgtggagctgtcctgggactatatgcagagtgatttgggagagcttcccgtcgacgcacgatttcctcctcgcgttccaaagtcatttccctttaacacaagccaggtgtacaagaagacgctcttcgtcgaattcaccgatcacctgttcaatatcgccaaacccagaccaccatggatgggtcttttggggcctaccatacaagcggaggtgtatgacacagttgttatcactctcaagaacatggcttctcatccggtaagtcttcacgcagtgggcgtgtcctactggaaagcttcagaaggagccgagtatgatgatcagacatcccagagggagaaagaagacgacaaggtatttccaggtgggtctcatacctatgtgtggcaagtgctcaaagagaatggccctatggcaagcgatccgccgtgtttgacttacagctacctttcacacgttgacctcgtcaaggacctcaactccgggttgattggagccttgttggtatgcagggaaggatctcttgccaaagagaagacacagaccctccacaagtttatccttctctttgctgtgttcgatgagggcaaaagttggcatagcgaaacgaagaattccctcatgcaggatcgcgacgcagccagcgccagagcttggcccaagatgcacactgtgaacggatatgtcaataggacgcttcctggcttgattgggtgtcatcggaaaagtgtctactggcacgtgatcggaatggggacaacaccagaggtccactccatatttctcgaaggccataccttccttgttcgaaaccacagacaggcatccttggggatctctcccattacctttctcactgcccaaacgctccttatggacttgggtcagttccttctcttttgccatatcccgtcacaccagcatgatggtatggaagcttatgtgaaagtcgacagttgtcctgaggagccacagttgcgcatgaagaataatgaagaagccgaggattacgacgacgatctcaccgattctgagatggacgtggtgaggtttgatgacgacaactctccctccatcattcaagctcggagcggggcgaagaaacaccccaagacttgggtccactatatagcggcggaagaggaggattgggattacgctcctcttgtattggcaccagatgaccgctcatacaaaagccagtacctcaacaacggaccgcagagaattggccggaagtataagaaagtgcgatttatggcctatacagacgaaacctttaagacaagggaggccatccagcatgagagtgggattttgggacctcttctttacggcgaagttggtgataccctcctcatcatcttcaagaatcaagcttctcgcccctataacatttacccacacgggatcactgacgttaggcctttgtatagcagaagacttcccaaaggcgtgaagcatctcaaagacttccccattttgccaggcgagatctttaagtacaaatggaccgtcacagtggaagatggaccgactaaatcagaccctcgatgccttacgcggtactattcctccttcgtgaatatggagagagatttggcaagcggactcataggaccactcctcatctgttacaaggaatctgtagaccagaggggtaaccagattatgagtgataaacgcaatgtgatcctttttagcgtcttcgacgagaaccggtcctggtacttgaccgagaatatacaaaggttccttcccaaccccgcaggcgttcagttggaagaccctgagtttcaggccagcaatattatgcactcaatcaacggctatgtgtttgatagtctccagctttctgtttgcctccatgaagtagcctattggtacatcttgtcaattggtgctcaaacagacttcctctccgtcttcttctccggctacacctttaagcacaagatggtgtatgaggacactctcacactctttccattttctggagaaaccgtgttcatgagcatggagaatccaggcctttggatcttgggttgccacaacagtgattttcgcaatcggggaatgactgctctcctcaaagtcagcagctgtgattggaacacaggcgacgggtacgaagattcttacgaggacataagtgcctactttgactccaagaataacgccattgagcccagatcattctcccagaatcctcccgtgcttaaaaggcatcagcgcgaaggtaccagaactactcttcagtctgatcaagaggagattgactatgacgacaccattagcgtggaaatgaagaaggaggatttcgatatctatgacgaagatgagaaccagtctccgcggagctttcagaagaagacgcgacactacttcattgcagcagtcgaaaggctttgggactacggtatgtcatcatcccctcatgtgttgcgcaatagagctcagagtggaagtgttccacagttcaagaaagtcgtctttcaagagtttacagatggcagcttcacacagcctctctatcggggcgagcttaacgaacatttgggactccttggtccctatatccgagccgaagtggaggacaacattatggttacctttaggaatcaagcctctcgcccctacagcttctactcctccctcatcagttatgaggaggatcagagacaaggcgctgaaccacggaagaactttgtgaaaccgaatgagacgaagacctacttctggaaagtacagcaccacatggcccccacaaaagacgaattcgattgcaaagcatgggcgtatttttcagacgttgacttggagaaagatgtacattcaggacttattggtcctttgttggtgtgtcacactaacactctcaatccagcccatggcaggcaggtgacagtccaggaattcgctcttttctttaccatctttgatgagaccaagtcctggtacttcacggaaaacatggagcgcaattgcagagccccctgtaacatacagatggaggaccctacctttaaggaaaattatcggttccacgcaatcaacggatacattatggatacactccctggccttgtgatggctcaggaccaacgaatcaggtggtacctcctcagcatgggttctaatgagaacatacactccattcacttttcaggacatgtgttcactgtccggaagaaagaagagtataagatggccctctacaatttgtatccaggcgtgtttgagaccgttgaaatgcttccctctaaagctggcatctggagagtagagtgcttgatcggagaacatcttcacgcaggtatgagcaccttgttcctcgtgtacagcaacaaatgtcagaatccacttggcatggccagtggacacattcgcgactttcagatcacagcatctggccagtatggacaatgggccccaaagttggctcgcctccattactccggtagcataaatgcgtggtccactaaagaacctttcagctggattaaggtcgatcttcttgcccccatgatcatccacggcattaagacacagggagcgaggcagaaattctcctccctctacatctcacagttcattattatgtatagtttggacggcaagaagtggcaaacttatagaggtaacagtactggaacagacatggtgttcttcggcaacgttgatagctctggcatcaaacacaacatctttaatcctcccataatagctcggtacatcagattgcatccgacccactacagcattaggagtacactccgaatggagcttatgggttgcgacttgaattcctgttcaatgccactcggaatggagtctaaagccatctctgatgcacagataaccgccagtagctactttacgaacatgtttgctacgtggtcaccctctaaggcaaggcttcatttgcaaggccggtctaatgcctggagacctcaggtgaacaacccgaaagaatggctccaggtggactttcagaagaccatgaaagtaacaggtgtcactactcagggagttaagtccttggatactagcatgtatgtgaaggagttccttatttcctcatcacaagatggccaccagtggaccctcttctttcagaatggtaaggtcaaagtgtttcagggcaatcaagacagcttcacacccgtggtgaacagtcttgatcctccactcttgacacgataccttcgaatccatccacagtcttgggagcaccagattgcattgcgcatggaagtacttggatgcgaggctcaggacctctac

SEQ ID NO: 1586 - protein, 1457 aa, synthetic construct
  REGION 1..1457: note = Variant of human B-domain deleted Factor VIII
MQIELSTCFFLCLLRFCFSATRRYYLGAVELSWDYMQSDLGELPVDARFPPRVPKSFPFNTSQVYKKTLFVEFTDHLFNIAKPRPPWMGLLGPTIQAEVYDTVVITLKNMASHPVSLHAVGVSYWKASEGAEYDDQTSQREKEDDKVFPGGSHTYVWQVLKENGPMASDPPCLTYSYLSHVDLVKDLNSGLIGALLVCREGSLAKEKTQTLHKFILLFAVFDEGKSWHSETKNSLMQDRDAASARAWPKMHTVNGYVNRTLPGLIGCHRKSVYWHVIGMGTTPEVHSIFLEGHTFLVRNHRQASLGISPITFLTAQTLLMDLGQFLLFCHIPSHQHDGMEAYVKVDSCPEEPQLRMKNNEEAEDYDDDLTDSEMDVVRFDDDNSPSIIQARSGAKKHPKTWVHYIAAEEEDWDYAPLVLAPDDRSYKSQYLNNGPQRIGRKYKKVRFMAYTDETFKTREAIQHESGILGPLLYGEVGDTLLIIFKNQASRPYNIYPHGITDVRPLYSRRLPKGVKHLKDFPILPGEIFKYKWTVTVEDGPTKSDPRCLTRYYSSFVNMERDLASGLIGPLLICYKESVDQRGNQIMSDKRNVILFSVFDENRSWYLTENIQRFLPNPAGVQLEDPEFQASNIMHSINGYVFDSLQLSVCLHEVAYWYILSIGAQTDFLSVFFSGYTFKHKMVYEDTLTLFPFSGETVFMSMENPGLWILGCHNSDFRNRGMTALLKVSSCDWNTGDGYEDSYEDISAYFDSKNNAIEPRSFSQNPPVLKRHQREGTRTTLQSDQEEIDYDDTISVEMKKEDFDIYDEDENQSPRSFQKKTRHYFIAAVERLWDYGMSSSPHVLRNRAQSGSVPQFKKVVFQEFTDGSFTQPLYRGELNEHLGLLGPYIRAEVEDNIMVTFRNQASRPYSFYSSLISYEEDQRQGAEPRKNFVKPNETKTYFWKVQHHMAPTKDEFDCKAWAYFSDVDLEKDVHSGLIGPLLVCHTNTLNPAHGRQVTVQEFALFFTIFDETKSWYFTENMERNCRAPCNIQMEDPTFKENYRFHAINGYIMDTLPGLVMAQDQRIRWYLLSMGSNENIHSIHFSGHVFTVRKKEEYKMALYNLYPGVFETVEMLPSKAGIWRVECLIGEHLHAGMSTLFLVYSNKCQNPLGMASGHIRDFQITASGQYGQWAPKLARLHYSGSINAWSTKEPFSWIKVDLLAPMIIHGIKTQGARQKFSSLYISQFIIMYSLDGKKWQTYRGNSTGTDMVFFGNVDSSGIKHNIFNPPIIARYIRLHPTHYSIRSTLRMELMGCDLNSCSMPLGMESKAISDAQITASSYFTNMFATWSPSKARLHLQGRSNAWRPQVNNPKEWLQVDFQKTMKVTGVTTQGVKSLDTSMYVKEFLISSSQDGHQWTLFFQNGKVKVFQGNQDSFTPVVNSLDPPLLTRYLRIHPQSWEHQIALRMEVLGCEAQDLY

SEQ ID NO: 1587 - DNA, 4371 bp, synthetic construct
  misc_feature 1..4371: note = Variant of human B-domain deleted Factor VIII
  source 1..4371: mol_type = other DNA
atgcagattgaactgtctacctgcttcttcctctgtttgctgaggttctgctttagcgccactagacggtactaccttggcgctgtggagctgtcctgggactatatgcagagtgatttgggagagcttcccgtcgacgcacgatttcctcctcgcgttccaaagtcatttccctttaacacaagccaggtgtacaagaagacgctcttcgtcgaattcaccgatcacctgttcaatatcgccaaacccagaccaccatggatgggtcttttggggcctaccatacaagcggaggtgtatgacacagttgttatcactctcaagaacatggcttctcatccggtaagtcttcacgcagtgggcgtgtcctactggaaagcttcagaaggagccgagtatgatgatcagacatcccagagggagaaagaagacgacaaggtatttccaggtgggtctcatacctatgtgtggcaagtgctcaaagagaatggccctatggcaagcgatccgccgtgtttgacttacagctacctttcacacgttgacctcgtcaaggacctcaactccgggttgattggagccttgttggtatgcagggaaggatctcttgccaaagagaagacacagaccctccacaagtttatccttctctttgctgtgttcgatgagggcaaaagttggcatagcgaaacgaagaattccctcatgcaggatcgcgacgcagccagcgccagagcttggcccaagatgcacactgtgaacggatatgtcaataggacgcttcctggcttgattgggtgtcatcggaaaagtgtctactggcacgtgatcggaatggggacaacaccagaggtccactccatatttctcgaaggccataccttccttgttcgaaaccacagacaggcatccttggggatctctcccattacctttctcactgcccaaacgctccttatggacttgggtcagttccttctcttttgccatatcccgtcacaccagcatgatggtatggaagcttatgtgaaagtcgacagttgtcctgaggagccacagttgcgcatgaagaataatgaagaagccgaggattacgacgacgatctcaccgattctgagatggacgtggtgaggtttgatgacgacaactctccctccatcattcaagctcggagcggggcgaagaaacaccccaagacttgggtccactatatagcggcggaagaggaggattgggattacgctcctcttgtattggcaccagatgaccgctcatacaaaagccagtacctcaacaacggaccgcagagaattggccggaagtataagaaagtgcgatttatggcctatacagacgaaacctttaagacaagggaggccatccagcatgagagtgggattttgggacctcttctttacggcgaagttggtgataccctcctcatcatcttcaagaatcaagcttctcgcccctataacatttacccacacgggatcactgacgttaggcctttgtatagcagaagacttcccaaaggcgtgaagcatctcaaagacttccccattttgccaggcgagatctttaagtacaaatggaccgtcacagtggaagatggaccgactaaatcagaccctcgatgccttacgcggtactattcctccttcgtgaatatggagagagatttggcaagcggactcataggaccactcctcatctgttacaaggaatctgtagaccagaggggtaaccagattatgagtgataaacgcaatgtgatcctttttagcgtcttcgacgagaaccggtcctggtacttgaccgagaatatacaaaggttccttcccaaccccgcaggcgttcagttggaagaccctgagtttcaggccagcaatattatgcactcaatcaacggctatgtgtttgatagtctccagctttctgtttgcctccatgaagtagcctattggtacatcttgtcaattggtgctcaaacagacttcctctccgtcttcttctccggctacacctttaagcacaagatggtgtatgaggacactctcacactctttccattttctggagaaaccgtgttcatgagcatggagaatccaggcctttggatcttgggttgccacaacagtgattttcgcaatcggggaatgactgctctcctcaaagtcagcagctgtgattggaacacaggcgactattacgaagattcttacgaggacataagtgcctactttgactccaagaataacgccattgagcccagatcattctcccagaatcctcccgtgcttaaaaggcatcagcgcgaaggtaccagaactactcttcagtctgatcaagaggagattgactatgacgacaccattagcgtggaaatgaagaaggagcgtttcgatatctatgacgaagatgagaaccagtctccgcggagctttcagaagaagacgcgacactacttcattgcagcagtcgaaaggctttgggactacggtatgtcatcatcccctcatgtgttgcgcaatagagctcagagtggaagtgttccacagttcaagaaagtcgtctttcaagagtttacagatggcagcttcacacagcctctctatcggggcgagcttaacgaacatttgggactccttggtccctatatccgagccgaagtggaggacaacattatggttacctttaggaatcaagcctctcgcccctacagcttctactcctccctcatcagttatgaggaggatcagagacaaggcgctgaaccacggaagaactttgtgaaaccgaatgagacgaagacctacttctggaaagtacagcaccacatggcccccacaaaagacgaattcgattgcaaagcatgggcgtatttttcagacgttgacttggagaaagatgtacattcaggacttattggtcctttgttggtgtgtcacactaacactctcaatccagcccatggcaggcaggtgacagtccaggaattcgctcttttctttaccatctttgatgagaccaagtcctggtacttcacggaaaacatggagcgcaattgcagagccccctgtaacatacagatggaggaccctacctttaaggaaaattatcggttccacgcaatcaacggatacattatggatacactccctggccttgtgatggctcaggaccaacgaatcaggtggtacctcctcagcatgggttctaatgagaacatacactccattcacttttcaggacatgtgttcactgtccggaagaaagaagagtataagatggccctctacaatttgtatccaggcgtgtttgagaccgttgaaatgcttccctctaaagctggcatctggagagtagagtgcttgatcggagaacatcttcacgcaggtatgagcaccttgttcctcgtgtacagcaacaaatgtcagaatccacttggcatggccagtggacacattcgcgactttcagatcacagcatctggccagtatggacaatgggccccaaagttggctcgcctccattactccggtagcataaatgcgtggtccactaaagaacctttcagctggattaaggtcgatcttcttgcccccatgatcatccacggcattaagacacagggagcgaggcagaaattctcctccctctacatctcacagttcattattatgtatagtttggacggcaagaagtggcaaacttatagaggtaacagtactggaacagacatggtgttcttcggcaacgttgatagctctggcatcaaacacaacatctttaatcctcccataatagctcggtacatcagattgcatccgacccactacagcattaggagtacactccgaatggagcttatgggttgcgacttgaattcctgttcaatgccactcggaatggagtctaaagccatctctgatgcacagataaccgccagtagctactttacgaacatgtttgctacgtggtcaccctctaaggcaaggcttcatttgcaaggccggtctaatgcctggagacctcaggtgaacaacccgaaagaatggctccaggtggactttcagaagaccatgaaagtaacaggtgtcactactcagggagttaagtccttggatactagcatgtatgtgaaggagttccttatttcctcatcacaagatggccaccagtggaccctcttctttcagaatggtaaggtcaaagtgtttcagggcaatcaagacagcttcacacccgtggtgaacagtcttgatcctccactcttgacacgataccttcgaatccatccacagtcttgggagcaccagattgcattgcgcatggaagtacttggatgcgaggctcaggacctctac

SEQ ID NO: 1588 - protein, 1457 aa, synthetic construct
  REGION 1..1457: note = Variant of human B-domain deleted Factor VIII
MQIELSTCFFLCLLRFCFSATRRYYLGAVELSWDYMQSDLGELPVDARFPPRVPKSFPFNTSQVYKKTLFVEFTDHLFNIAKPRPPWMGLLGPTIQAEVYDTVVITLKNMASHPVSLHAVGVSYWKASEGAEYDDQTSQREKEDDKVFPGGSHTYVWQVLKENGPMASDPPCLTYSYLSHVDLVKDLNSGLIGALLVCREGSLAKEKTQTLHKFILLFAVFDEGKSWHSETKNSLMQDRDAASARAWPKMHTVNGYVNRTLPGLIGCHRKSVYWHVIGMGTTPEVHSIFLEGHTFLVRNHRQASLGISPITFLTAQTLLMDLGQFLLFCHIPSHQHDGMEAYVKVDSCPEEPQLRMKNNEEAEDYDDDLTDSEMDVVRFDDDNSPSIIQARSGAKKHPKTWVHYIAAEEEDWDYAPLVLAPDDRSYKSQYLNNGPQRIGRKYKKVRFMAYTDETFKTREAIQHESGILGPLLYGEVGDTLLIIFKNQASRPYNIYPHGITDVRPLYSRRLPKGVKHLKDFPILPGEIFKYKWTVTVEDGPTKSDPRCLTRYYSSFVNMERDLASGLIGPLLICYKESVDQRGNQIMSDKRNVILFSVFDENRSWYLTENIQRFLPNPAGVQLEDPEFQASNIMHSINGYVFDSLQLSVCLHEVAYWYILSIGAQTDFLSVFFSGYTFKHKMVYEDTLTLFPFSGETVFMSMENPGLWILGCHNSDFRNRGMTALLKVSSCDWNTGDYYEDSYEDISAYFDSKNNAIEPRSFSQNPPVLKRHQREGTRTTLQSDQEEIDYDDTISVEMKKERFDIYDEDENQSPRSFQKKTRHYFIAAVERLWDYGMSSSPHVLRNRAQSGSVPQFKKVVFQEFTDGSFTQPLYRGELNEHLGLLGPYIRAEVEDNIMVTFRNQASRPYSFYSSLISYEEDQRQGAEPRKNFVKPNETKTYFWKVQHHMAPTKDEFDCKAWAYFSDVDLEKDVHSGLIGPLLVCHTNTLNPAHGRQVTVQEFALFFTIFDETKSWYFTENMERNCRAPCNIQMEDPTFKENYRFHAINGYIMDTLPGLVMAQDQRIRWYLLSMGSNENIHSIHFSGHVFTVRKKEEYKMALYNLYPGVFETVEMLPSKAGIWRVECLIGEHLHAGMSTLFLVYSNKCQNPLGMASGHIRDFQITASGQYGQWAPKLARLHYSGSINAWSTKEPFSWIKVDLLAPMIIHGIKTQGARQKFSSLYISQFIIMYSLDGKKWQTYRGNSTGTDMVFFGNVDSSGIKHNIFNPPIIARYIRLHPTHYSIRSTLRMELMGCDLNSCSMPLGMESKAISDAQITASSYFTNMFATWSPSKARLHLQGRSNAWRPQVNNPKEWLQVDFQKTMKVTGVTTQGVKSLDTSMYVKEFLISSSQDGHQWTLFFQNGKVKVFQGNQDSFTPVVNSLDPPLLTRYLRIHPQSWEHQIALRMEVLGCEAQDLY

SEQ ID NO: 1589 - DNA, 4371 bp, synthetic construct
  misc_feature 1..4371: note = Variant of human B-domain deleted Factor VIII
  source 1..4371: mol_type = other DNA
atgcagattgaactgtctacctgcttcttcctctgtttgctgaggttctgctttagcgccactagacggtactaccttggcgctgtggagctgtcctgggactatatgcagagtgatttgggagagcttcccgtcgacgcacgatttcctcctcgcgttccaaagtcatttccctttaacacaagccaggtgtacaagaagacgctcttcgtcgaattcaccgatcacctgttcaatatcgccaaacccagaccaccatggatgggtcttttggggcctaccatacaagcggaggtgtatgacacagttgttatcactctcaagaacatggcttctcatccggtaagtcttcacgcagtgggcgtgtcctactggaaagcttcagaaggagccgagtatgatgatcagacatcccagagggagaaagaagacgacaaggtatttccaggtgggtctcatacctatgtgtggcaagtgctcaaagagaatggccctatggcaagcgatccgccgtgtttgacttacagctacctttcacacgttgacctcgtcaaggacctcaactccgggttgattggagccttgttggtatgcagggaaggatctcttgccaaagagaagacacagaccctggccaagtttatccttctctttgctgtgttcgatgagggcaaaagttggcatagcgaaacgaagaattccctcatgcaggatcgcgacgcagccagcgccagagcttggcccaagatgcacactgtgaacggatatgtcaataggacgcttcctggcttgattgggtgtcatcggaaaagtgtctactggcacgtgatcggaatggggacaacaccagaggtccactccatatttctcgaaggccataccttccttgttcgaaaccacagacaggcatccttggggatctctcccattacctttctcactgcccaaacgctccttcgtgacttgggtcagttccttctcttttgccatatcccgtcacaccagcatgatggtatggaagcttatgtgaaagtcgacagttgtcctgaggagccacagttgcgcatgaagaataatgaagaagccgaggattacgacgacgatctcaccgattctgagatggacgtggtgaggtttgatgacgacaactctccctccatcattcaagctcggagcggggcgaagaaacaccccaagacttgggtccactatatagcggcggaagaggaggattgggattacgctcctcttgtattggcaccagatgaccgctcatacaaaagccagtacctcaacaacggaccgcagagaattggccggaagtataagaaagtgcgatttatggcctatacagacgaaacctttaagacaagggaggccatccagcatgagagtgggattttgggacctcttctttacggcgaagttggtgataccctcctcatcatcttcaagaatcaagcttctcgcccctataacatttacccacacgggatcactgacgttaggcctttgtatagcagaagacttcccaaaggcgtgaagcatctcaaagacttccccattttgccaggcgagatctttaagtacaaatggaccattacagtggaagatggaccgactaaatcagaccctcgatgccttacgcggtactattcctccttcgtgaattgggagagagatttggcaagcggactcataggaccactcctcatctgttacaaggaatctgtagaccagaggggtaaccagattatgagtgataaacgcaatgtgatcctttttagcgtcttcgacgagaaccggtcctggtacttgaccgagaatatacaaaggttccttcccaaccccgcaggcgttcagttggaagaccctgagtttcaggccagcaatattatgcactcaatcaacggctatgtgtttgatagtctccagctttctgtttgcctccatgaagtagcctattggtacatcttgtcaattggtgctcaaacagacttcctctccgtcttcttctccggctacacctttaagcacaagggcgtgtatgaggacactctcacactctttccattttctggagaaaccgtgttcatgagcatggagaatccaggcctttggatcttgggttgccacaacagtgattttcgcaatcggggaatgactgctctcctcaaagtcagcagctgtgattggaacacaggcgactattacgaagattcttacgaggacataagtgcctactttgactccaagaataacgccattgagcccagatcattctcccagaatcctcccgtgcttaaaaggcatcagcgcgaaggtaccagaactactcttcagtctgatcaagaggagattgactatgacgacaccattagcgtggaaatgaagaaggaggatttcgatatctatgacgaagatgagaaccagtctccgcggagctttcagaagaagacgcgacactacttcattgcagcagtcgaaaggctttgggactacggtatgtcatcatcccctcatgtgttgcgcaatagagctcagagtggaagtgttccacagttcaagaaagtcgtctttcaagagtttacagatggcagcttcacacagcctctctatcggggcgagcttaacgaacatttgggactccttggtccctatatccgagccgaagtggaggacaacattatggttacctttaggaatcaagcctctcgcccctacagcttctactcctccctcatcagttatgaggaggatcagagacaaggcgctgaaccacggaagaactttgtgaaaccgaatgagacgaagacctacttctggaaagtacagcaccacatggcccccacaaaagacgaattcgattgcaaagcatgggcgtatttttcagacgttgacttggagaaagatgtacattcaggacttattggtcctttgttggtgtgtcacactaacactctcaatccagcccatggcaggcaggtgacagtccaggaattcgctcttttctttaccatctttgatgagaccaagtcctggtacttcacggaaaacatggagcgcaattgcagagccccctgtaacatacagatggaggaccctacctttaaggaaaattatgaattccacgcaatcaacggatacattatggatacactccctggccttgtgatggctcaggaccaacgaatcaggtggtacctcctcagcatgggttctaatgagaacatacactccattcacttttcaggacatgtgttcactgtccggaagaaagaagagtataagatggccctctacaatttgtatccaggcgtgtttgagaccgttgaaatgcttccctctaaagctggcatctggagagtagagtgcttgatcggagaacatcttcacgcaggtatgagcaccttgttcctcgtgtacagcaacaaatgtcagaatccacttggcatggccagtggacacattcgcgactttcagatcacagcatctggccagtatggacaatgggccccaaagttggctcgcctccattactccggtagcataaatgcgtggtccactaaagaacctttcagctggattaaggtcgatcttcttgcccccatgatcatccacggcattaagacacagggagcgaggcagaaattctcctccctctacatctcacagttcattattatgtatagtttggacggcaagaagtggcaaacttatagaggtaacagtactggaacagacatggtgttcttcggcaacgttgatagctctggcatcaaacacaacatctttaatcctcccataatagctcggtacatcagattgcatccgacccactacagcattaggagtacactccgaatggagcttatgggttgcgacttgaattcctgttcaatgccactcggaatggagtctaaagccatctctgatgcacagataaccgccagtagctactttacgaacatgtttgctacgtggtcaccctctaaggcaaggcttcatttgcaaggccggtctaatgcctggagacctcaggtgaacaacccgaaagaatggctccaggtggactttcagaagaccatgaaagtaacaggtgtcactactcagggagttaagtccttggatactagcatgtatgtgaaggagttccttatttcctcatcacaagatggccaccagtggaccctcttctttcagaatggtaaggtcaaagtgtttcagggcaatcaagacagcttcacacccgtggtgaacagtcttgatcctccactcttgacacgataccttcgaatccatccacagtcttgggagcaccagattgcattgcgcatggaagtacttggatgcgaggctcaggacctctac

SEQ ID NO: 1590 - protein, 1457 aa, synthetic construct
  REGION 1..1457: note = Variant of human B-domain deleted Factor VIII
MQIELSTCFFLCLLRFCFSATRRYYLGAVELSWDYMQSDLGELPVDARFPPRVPKSFPFNTSQVYKKTLFVEFTDHLFNIAKPRPPWMGLLGPTIQAEVYDTVVITLKNMASHPVSLHAVGVSYWKASEGAEYDDQTSQREKEDDKVFPGGSHTYVWQVLKENGPMASDPPCLTYSYLSHVDLVKDLNSGLIGALLVCREGSLAKEKTQTLAKFILLFAVFDEGKSWHSETKNSLMQDRDAASARAWPKMHTVNGYVNRTLPGLIGCHRKSVYWHVIGMGTTPEVHSIFLEGHTFLVRNHRQASLGISPITFLTAQTLLRDLGQFLLFCHIPSHQHDGMEAYVKVDSCPEEPQLRMKNNEEAEDYDDDLTDSEMDVVRFDDDNSPSIIQARSGAKKHPKTWVHYIAAEEEDWDYAPLVLAPDDRSYKSQYLNNGPQRIGRKYKKVRFMAYTDETFKTREAIQHESGILGPLLYGEVGDTLLIIFKNQASRPYNIYPHGITDVRPLYSRRLPKGVKHLKDFPILPGEIFKYKWTITVEDGPTKSDPRCLTRYYSSFVNWERDLASGLIGPLLICYKESVDQRGNQIMSDKRNVILFSVFDENRSWYLTENIQRFLPNPAGVQLEDPEFQASNIMHSINGYVFDSLQLSVCLHEVAYWYILSIGAQTDFLSVFFSGYTFKHKGVYEDTLTLFPFSGETVFMSMENPGLWILGCHNSDFRNRGMTALLKVSSCDWNTGDYYEDSYEDISAYFDSKNNAIEPRSFSQNPPVLKRHQREGTRTTLQSDQEEIDYDDTISVEMKKEDFDIYDEDENQSPRSFQKKTRHYFIAAVERLWDYGMSSSPHVLRNRAQSGSVPQFKKVVFQEFTDGSFTQPLYRGELNEHLGLLGPYIRAEVEDNIMVTFRNQASRPYSFYSSLISYEEDQRQGAEPRKNFVKPNETKTYFWKVQHHMAPTKDEFDCKAWAYFSDVDLEKDVHSGLIGPLLVCHTNTLNPAHGRQVTVQEFALFFTIFDETKSWYFTENMERNCRAPCNIQMEDPTFKENYEFHAINGYIMDTLPGLVMAQDQRIRWYLLSMGSNENIHSIHFSGHVFTVRKKEEYKMALYNLYPGVFETVEMLPSKAGIWRVECLIGEHLHAGMSTLFLVYSNKCQNPLGMASGHIRDFQITASGQYGQWAPKLARLHYSGSINAWSTKEPFSWIKVDLLAPMIIHGIKTQGARQKFSSLYISQFIIMYSLDGKKWQTYRGNSTGTDMVFFGNVDSSGIKHNIFNPPIIARYIRLHPTHYSIRSTLRMELMGCDLNSCSMPLGMESKAISDAQITASSYFTNMFATWSPSKARLHLQGRSNAWRPQVNNPKEWLQVDFQKTMKVTGVTTQGVKSLDTSMYVKEFLISSSQDGHQWTLFFQNGKVKVFQGNQDSFTPVVNSLDPPLLTRYLRIHPQSWEHQIALRMEVLGCEAQDLY

SEQ ID NO: 1591 - DNA, 4371 bp, synthetic construct
  misc_feature 1..4371: note = Variant of human B-domain deleted Factor VIII
  source 1..4371: mol_type = other DNA
atgcagattgaactgtctacctgcttcttcctctgtttgctgaggttctgctttagcgccactagacggtactaccttggcgctgtggagctgtcctgggactatatgcagagtgatttgggagagcttcccgtcgacgcacgatttcctcctcgcgttccaaagtcatttccctttaacacaagccaggtgtacaagaagacgctcttcgtcgaattcaccgatcacctgttcaatatcgccaaacccagaccaccatggatgggtcttttggggcctaccatacaagcggaggtgtatgacacagttgttatcactctcaagaacatggcttctcatccggtaagtcttcacgcagtgggcgtgtcctactggaaagcttcagaaggagccgagtatgatgatcagacatcccagagggagaaagaagacgacaaggtatttccaggtgggtctcatacctatgtgtggcaagtgctcaaagagaatggccctatggcaagcgatccgccgtgtttgacttacagctacctttcacacgttgacctcgtcaaggacctcaactccgggttgattggagccttgttggtatgcagggaaggatctcttgccaaagagaagacacagaccctggccaagtttatccttctctttgctgtgttcgatgagggcaaaagttggcatagcgaaacgaagaattccctcatgcaggatcgcgacgcagccagcgccagagcttggcccaagatgcacactgtgaacggatatgtcaataggacgcttcctggcttgattgggtgtcatcggaaaagtgtctactggcacgtgatcggaatggggacaacaccagaggtccactccatatttctcgaaggccataccttccttgttcgaaaccacagacaggcatccttggggatctctcccattacctttctcactgcccaaacgctccttcgtgacttgggtcagttccttctcttttgccatatcccgtcacaccagcatgatggtatggaagcttatgtgaaagtcgacagttgtcctgaggagccacagttgcgcatgaagaataatgaagaagccgaggattacgacgacgatctcaccgattctgagatggacgtggtgaggtttgatgacgacaactctccctccatcattcaagctcggagcggggcgaagaaacaccccaagacttgggtccactatatagcggcggaagaggaggattgggattacgctcctcttgtattggcaccagatgaccgctcatacaaaagccagtacctcaacaacggaccgcagagaattggccggaagtataagaaagtgcgatttatggcctatacagacgaaacctttaagacaagggaggccatccagcatgagagtgggattttgggacctcttctttacggcgaagttggtgataccctcctcatcatcttcaagaatcaagcttctcgcccctataacatttacccacacgggatcactgacgttaggcctttgtatagcagaagacttcccaaaggcgtgaagcatctcaaagacttccccattttgccaggcgagatctttaagtacaaatggaccattacagtggaagatggaccgactaaatcagaccctcgatgccttacgcggtactattcctccttcgtgaattgggagagagatttggcaagcggactcataggaccactcctcatctgttacaaggaatctgtagaccagaggggtaaccagattatgagtgataaacgcaatgtgatcctttttagcgtcttcgacgagaaccggtcctggtacttgaccgagaatatacaaaggttccttcccaaccccgcaggcgttcagttggaagaccctgagtttcaggccagcaatattatgcactcaatcaacggctatgtgtttgatagtctccagctttctgtttgcctccatgaagtagcctattggtacatcttgtcaattggtgctcaaacagacttcctctccgtcttcttctccggctacacctttaagcacaagggcgtgtatgaggacactctcacactctttccattttctggagaaaccgtgttcatgagcatggagaatccaggcctttggatcttgggttgccacaacagtgattttcgcaatcggggaatgactgctctcctcaaagtcagcagctgtgattggaacacaggcgactattacgaagattcttacgaggacataagtgcctactttgactccaagaataacgccattgagcccagatcattctcccagaatcctcccgtgcttaaaaggcatcagcgcgaaggtaccagaactactcttcagtctgatcaagaggagattgactatgacgacaccattagcgtggaaatgaagaaggaggatttcgatatctatgacgaagatgagaaccagtctccgcggagctttcagaagaagacgcgacactacttcattgcagcagtcgaaaggctttgggactacggtatgtcatcatcccctcatgtgttgcgcaatagagctcagagtggaagtgttccacagttcaagaaagtcgtctttcaagagtttacagatggcagcttcacacagcctctctatcggggcgagcttaacgaacatttgggactccttggtccctatatccgagccgaagtggaggacaacattatggttacctttaggaatcaagcctctcgcccctacagcttctactcctccctcatcagttatgaggaggatcagagacaaggcgctgaaccacggaagaactttgtgaaaccgaatgagacgaagacctacttctggaaagtacagcaccacatggcccccacaaaagacgaattcgattgcaaagcatgggcgtatttttcagacgttgacttggagaaagatgtacattcaggacttattggtcctttgttggtgtgtcacactaacactctcaatccagcccatggcaggcaggtgacagtccaggaattcgctcttttctttaccatctttgatgagaccaagtcctggtacttcacggaaaacatggagcgcaattgcagagccccctgtaacatacagatggaggaccctacctttaaggaaaataaccggttccacgcaatcaacggatacattatggatacactccctggccttgtgatggctcaggaccaacgaatcaggtggtacctcctcagcatgggttctaatgagaacatacactccattcacttttcaggacatgtgttcactgtccggaagaaagaagagtataagatggccctctacaatttgtatccaggcgtgtttgagaccgttgaaatgcttccctctaaagctggcatctggagagtagagtgcttgatcggagaacatcttcacgcaggtatgagcaccttgttcctcgtgtacagcaacaaatgtcagaatccacttggcatggccagtggacacattcgcgactttcagatcacagcatctggccagtatggacaatgggccccaaagttggctcgcctccattactccggtagcataaatgcgtggtccactaaagaacctttcagctggattaaggtcgatcttcttgcccccatgatcatccacggcattaagacacagggagcgaggcagaaattctcctccctctacatctcacagttcattattatgtatagtttggacggcaagaagtggcaaacttatagaggtaacagtactggaacagacatggtgttcttcggcaacgttgatagctctggcatcaaacacaacatctttaatcctcccataatagctcggtacatcagattgcatccgacccactacagcattaggagtacactccgaatggagcttatgggttgcgacttgaattcctgttcaatgccactcggaatggagtctaaagccatctctgatgcacagataaccgccagtagctactttacgaacatgtttgctacgtggtcaccctctaaggcaaggcttcatttgcaaggccggtctaatgcctggagacctcaggtgaacaacccgaaagaatggctccaggtggactttcagaagaccatgaaagtaacaggtgtcactactcagggagttaagtccttggatactagcatgtatgtgaaggagttccttatttcctcatcacaagatggccaccagtggaccctcttctttcagaatggtaaggtcaaagtgtttcagggcaatcaagacagcttcacacccgtggtgaacagtcttgatcctccactcttgacacgataccttcgaatccatccacagtcttgggagcaccagattgcattgcgcatggaagtacttggatgcgaggctcaggacctctac

SEQ ID NO: 1592 - protein, 1457 aa, synthetic construct
  REGION 1..1457: note = Variant of human B-domain deleted Factor VIII
MQIELSTCFFLCLLRFCFSATRRYYLGAVELSWDYMQSDLGELPVDARFPPRVPKSFPFNTSQVYKKTLFVEFTDHLFNIAKPRPPWMGLLGPTIQAEVYDTVVITLKNMASHPVSLHAVGVSYWKASEGAEYDDQTSQREKEDDKVFPGGSHTYVWQVLKENGPMASDPPCLTYSYLSHVDLVKDLNSGLIGALLVCREGSLAKEKTQTLAKFILLFAVFDEGKSWHSETKNSLMQDRDAASARAWPKMHTVNGYVNRTLPGLIGCHRKSVYWHVIGMGTTPEVHSIFLEGHTFLVRNHRQASLGISPITFLTAQTLLRDLGQFLLFCHIPSHQHDGMEAYVKVDSCPEEPQLRMKNNEEAEDYDDDLTDSEMDVVRFDDDNSPSIIQARSGAKKHPKTWVHYIAAEEEDWDYAPLVLAPDDRSYKSQYLNNGPQRIGRKYKKVRFMAYTDETFKTREAIQHESGILGPLLYGEVGDTLLIIFKNQASRPYNIYPHGITDVRPLYSRRLPKGVKHLKDFPILPGEIFKYKWTITVEDGPTKSDPRCLTRYYSSFVNWERDLASGLIGPLLICYKESVDQRGNQIMSDKRNVILFSVFDENRSWYLTENIQRFLPNPAGVQLEDPEFQASNIMHSINGYVFDSLQLSVCLHEVAYWYILSIGAQTDFLSVFFSGYTFKHKGVYEDTLTLFPFSGETVFMSMENPGLWILGCHNSDFRNRGMTALLKVSSCDWNTGDYYEDSYEDISAYFDSKNNAIEPRSFSQNPPVLKRHQREGTRTTLQSDQEEIDYDDTISVEMKKEDFDIYDEDENQSPRSFQKKTRHYFIAAVERLWDYGMSSSPHVLRNRAQSGSVPQFKKVVFQEFTDGSFTQPLYRGELNEHLGLLGPYIRAEVEDNIMVTFRNQASRPYSFYSSLISYEEDQRQGAEPRKNFVKPNETKTYFWKVQHHMAPTKDEFDCKAWAYFSDVDLEKDVHSGLIGPLLVCHTNTLNPAHGRQVTVQEFALFFTIFDETKSWYFTENMERNCRAPCNIQMEDPTFKENNRFHAINGYIMDTLPGLVMAQDQRIRWYLLSMGSNENIHSIHFSGHVFTVRKKEEYKMALYNLYPGVFETVEMLPSKAGIWRVECLIGEHLHAGMSTLFLVYSNKCQNPLGMASGHIRDFQITASGQYGQWAPKLARLHYSGSINAWSTKEPFSWIKVDLLAPMIIHGIKTQGARQKFSSLYISQFIIMYSLDGKKWQTYRGNSTGTDMVFFGNVDSSGIKHNIFNPPIIARYIRLHPTHYSIRSTLRMELMGCDLNSCSMPLGMESKAISDAQITASSYFTNMFATWSPSKARLHLQGRSNAWRPQVNNPKEWLQVDFQKTMKVTGVTTQGVKSLDTSMYVKEFLISSSQDGHQWTLFFQNGKVKVFQGNQDSFTPVVNSLDPPLLTRYLRIHPQSWEHQIALRMEVLGCEAQDLY

SEQ ID NO: 1593 - DNA, 4371 bp, synthetic construct
  misc_feature 1..4371: note = Variant of human B-domain deleted Factor VIII
  source 1..4371: mol_type = other DNA
atgcagattgaactgtctacctgcttcttcctctgtttgctgaggttctgctttagcgccactagacggtactaccttggcgctgtggagctgtcctgggactatatgcagagtgatttgggagagcttcccgtcgacgcacgatttcctcctcgcgttccaaagtcatttccctttaacacaagccaggtgtacaagaagacgctcttcgtcgaattcaccgatcacctgttcaatatcgccaaacccagaccaccatggatgggtcttttggggcctaccatacaagcggaggtgtatgacacagttgttatcactctcaagaacatggcttctcatccggtaagtcttcacgcagtgggcgtgtcctactggaaagcttcagaaggagccgagtatgatgatcagacatcccagagggagaaagaagacgacaaggtatttccaggtgggtctcatacctatgtgtggcaagtgctcaaagagaatggccctatggcaagcgatccgccgtgtttgacttacagctacctttcacacgttgacctcgtcaaggacctcaactccgggttgattggagccttgttggtatgcagggaaggatctcttgccaaagagaagacacagaccctggccaagtttatccttctctttgctgtgttcgatgagggcaaaagttggcatagcgaaacgaagaattccctcatgcaggatcgcgacgcagccagcgccagagcttggcccaagatgcacactgtgaacggatatgtcaataggacgcttcctggcttgattgggtgtcatcggaaaagtgtctactggcacgtgatcggaatggggacaacaccagaggtccactccatatttctcgaaggccataccttccttgttcgaaaccacagacaggcatccttggggatctctcccattacctttctcactgcccaaacgctccttcgtgacttgggtcagttccttctcttttgccatatcccgtcacaccagcatgatggtatggaagcttatgtgaaagtcgacagttgtcctgaggagccacagttgcgcatgaagaataatgaagaagccgaggattacgacgacgatctcaccgattctgagatggacgtggtgaggtttgatgacgacaactctccctccatcattcaagctcggagcggggcgaagaaacaccccaagacttgggtccactatatagcggcggaagaggaggattgggattacgctcctcttgtattggcaccagatgaccgctcatacaaaagccagtacctcaacaacggaccgcagagaattggccggaagtataagaaagtgcgatttatggcctatacagacgaaacctttaagacaagggaggccatccagcatgagagtgggattttgggacctcttctttacggcgaagttggtgataccctcctcatcatcttcaagaatcaagcttctcgcccctataacatttacccacacgggatcactgacgttaggcctttgtatagcagaagacttcccaaaggcgtgaagcatctcaaagacttccccattttgccaggcgagatctttaagtacaaatggaccattacagtggaagatggaccgactaaatcagaccctcgatgccttacgcggtactattcctccttcgtgaattgggagagagatttggcaagcggactcataggaccactcctcatctgttacaaggaatctgtagaccagaggggtaaccagattatgagtgataaacgcaatgtgatcctttttagcgtcttcgacgagaaccggtcctggtacttgaccgagaatatacaaaggttccttcccaaccccgcaggcgttcagttggaagaccctgagtttcaggccagcaatattatgcactcaatcaacggctatgtgtttgatagtctccagctttctgtttgcctccatgaagtagcctattggtacatcttgtcaattggtgctcaaacagacttcctctccgtcttcttctccggctacacctttaagcacaagggcgtgtatgaggacactctcacactctttccattttctggagaaaccgtgttcatgagcatggagaatccaggcctttggatcttgggttgccacaacagtgattttcgcaatcggggaatgactgctctcctcaaagtcagcagctgtgattggaacacaggcgactattacgaagattcttacgaggacataagtgcctactttgactccaagaataacgccattgagcccagatcattctcccagaatcctcccgtgcttaaaaggcatcagcgcgaaggtaccagaactactcttcagtctgatcaagaggagattgactatgacgacaccattagcgtggaaatgaagaaggaggatttcgatatctatgacgaagatgagaaccagtctccgcggagctttcagaagaagacgcgacactacttcattgcagcagtcgaaaggctttgggactacggtatgtcatcatcccctcatgtgttgcgcaatagagctcagagtggaagtgttccacagttcaagaaagtcgtctttcaagagtttacagatggcagcttcacacagcctctctatcggggcgagcttaacgaacatttgggactccttggtccctatatccgagccgaagtggaggacaacattatggttacctttaggaatcaagcctctcgcccctacagcttctactcctccctcatcagttatgaggaggatcagagacaaggcgctgaaccacggaagaactttgtgaaaccgaatgagacgaagacctacttctggaaagtacagcaccacatggcccccacaaaagacgaattcgattgcaaagcatgggcgtatttttcagacgttgacttggagaaagatgtacattcaggacttattggtcctttgttggtgtgtcacactaacactctcaatccagcccatggcaggcaggtgacagtccaggaattcgctcttttctttaccatctttgatgagaccaagtcctggtacttcacggaaaacatggagcgcaattgcagagccccctgtaacatacagatggaggaccctacctttaaggaaaattatcggttccacgcaatcaacggatacattcatgatacactccctggccttgtgatggctcaggaccaacgaatcaggtggtacctcctcagcatgggttctaatgagaacatacactccattcacttttcaggacatgtgttcactgtccggaagaaagaagagtataagatggccctctacaatttgtatccaggcgtgtttgagaccgttgaaatgcttccctctaaagctggcatctggagagtagagtgcttgatcggagaacatcttcacgcaggtatgagcaccttgttcctcgtgtacagcaacaaatgtcagaatccacttggcatggccagtggacacattcgcgactttcagatcacagcatctggccagtatggacaatgggccccaaagttggctcgcctccattactccggtagcataaatgcgtggtccactaaagaacctttcagctggattaaggtcgatcttcttgcccccatgatcatccacggcattaagacacagggagcgaggcagaaattctcctccctctacatctcacagttcattattatgtatagtttggacggcaagaagtggcaaacttatagaggtaacagtactggaacagacatggtgttcttcggcaacgttgatagctctggcatcaaacacaacatctttaatcctcccataatagctcggtacatcagattgcatccgacccactacagcattaggagtacactccgaatggagcttatgggttgcgacttgaattcctgttcaatgccactcggaatggagtctaaagccatctctgatgcacagataaccgccagtagctactttacgaacatgtttgctacgtggtcaccctctaaggcaaggcttcatttgcaaggccggtctaatgcctggagacctcaggtgaacaacccgaaagaatggctccaggtggactttcagaagaccatgaaagtaacaggtgtcactactcagggagttaagtccttggatactagcatgtatgtgaaggagttccttatttcctcatcacaagatggccaccagtggaccctcttctttcagaatggtaaggtcaaagtgtttcagggcaatcaagacagcttcacacccgtggtgaacagtcttgatcctccactcttgacacgataccttcgaatccatccacagtcttgggagcaccagattgcattgcgcatggaagtacttggatgcgaggctcaggacctctac

SEQ ID NO: 1594 - protein, 1457 aa, synthetic construct
  REGION 1..1457: note = Variant of human B-domain deleted Factor VIII
MQIELSTCFFLCLLRFCFSATRRYYLGAVELSWDYMQSDLGELPVDARFPPRVPKSFPFNTSQVYKKTLFVEFTDHLFNIAKPRPPWMGLLGPTIQAEVYDTVVITLKNMASHPVSLHAVGVSYWKASEGAEYDDQTSQREKEDDKVFPGGSHTYVWQVLKENGPMASDPPCLTYSYLSHVDLVKDLNSGLIGALLVCREGSLAKEKTQTLAKFILLFAVFDEGKSWHSETKNSLMQDRDAASARAWPKMHTVNGYVNRTLPGLIGCHRKSVYWHVIGMGTTPEVHSIFLEGHTFLVRNHRQASLGISPITFLTAQTLLRDLGQFLLFCHIPSHQHDGMEAYVKVDSCPEEPQLRMKNNEEAEDYDDDLTDSEMDVVRFDDDNSPSIIQARSGAKKHPKTWVHYIAAEEEDWDYAPLVLAPDDRSYKSQYLNNGPQRIGRKYKKVRFMAYTDETFKTREAIQHESGILGPLLYGEVGDTLLIIFKNQASRPYNIYPHGITDVRPLYSRRLPKGVKHLKDFPILPGEIFKYKWTITVEDGPTKSDPRCLTRYYSSFVNWERDLASGLIGPLLICYKESVDQRGNQIMSDKRNVILFSVFDENRSWYLTENIQRFLPNPAGVQLEDPEFQASNIMHSINGYVFDSLQLSVCLHEVAYWYILSIGAQTDFLSVFFSGYTFKHKGVYEDTLTLFPFSGETVFMSMENPGLWILGCHNSDFRNRGMTALLKVSSCDWNTGDYYEDSYEDISAYFDSKNNAIEPRSFSQNPPVLKRHQREGTRTTLQSDQEEIDYDDTISVEMKKEDFDIYDEDENQSPRSFQKKTRHYFIAAVERLWDYGMSSSPHVLRNRAQSGSVPQFKKVVFQEFTDGSFTQPLYRGELNEHLGLLGPYIRAEVEDNIMVTFRNQASRPYSFYSSLISYEEDQRQGAEPRKNFVKPNETKTYFWKVQHHMAPTKDEFDCKAWAYFSDVDLEKDVHSGLIGPLLVCHTNTLNPAHGRQVTVQEFALFFTIFDETKSWYFTENMERNCRAPCNIQMEDPTFKENYRFHAINGYIHDTLPGLVMAQDQRIRWYLLSMGSNENIHSIHFSGHVFTVRKKEEYKMALYNLYPGVFETVEMLPSKAGIWRVECLIGEHLHAGMSTLFLVYSNKCQNPLGMASGHIRDFQITASGQYGQWAPKLARLHYSGSINAWSTKEPFSWIKVDLLAPMIIHGIKTQGARQKFSSLYISQFIIMYSLDGKKWQTYRGNSTGTDMVFFGNVDSSGIKHNIFNPPIIARYIRLHPTHYSIRSTLRMELMGCDLNSCSMPLGMESKAISDAQITASSYFTNMFATWSPSKARLHLQGRSNAWRPQVNNPKEWLQVDFQKTMKVTGVTTQGVKSLDTSMYVKEFLISSSQDGHQWTLFFQNGKVKVFQGNQDSFTPVVNSLDPPLLTRYLRIHPQSWEHQIALRMEVLGCEAQDLY

SEQ ID NO: 1595 - DNA, 4371 bp, synthetic construct
  misc_feature 1..4371: note = Variant of human B-domain deleted Factor VIII
  source 1..4371: mol_type = other DNA
atgcagattgaactgtctacctgcttcttcctctgtttgctgaggttctgctttagcgccactagacggtactaccttggcgctgtggagctgtcctgggactatatgcagagtgatttgggagagcttcccgtcgacgcacgatttcctcctcgcgttccaaagtcatttccctttaacacaagccaggtgtacaagaagacgctcttcgtcgaattcaccgatcacctgttcaatatcgccaaacccagaccaccatggatgggtcttttggggcctaccatacaagcggaggtgtatgacacagttgttatcactctcaagaacatggcttctcatccggtaagtcttcacgcagtgggcgtgtcctactggaaagcttcagaaggagccgagtatgatgatcagacatcccagagggagaaagaagacgacaaggtatttccaggtgggtctcatacctatgtgtggcaagtgctcaaagagaatggccctatggcaagcgatccgccgtgtttgacttacagctacctttcacacgttgacctcgtcaaggacctcaactccgggttgattggagccttgttggtatgcagggaaggatctcttgccaaagagaagacacagaccctggccaagtttatccttctctttgctgtgttcgatgagggcaaaagttggcatagcgaaacgaagaattccctcatgcaggatcgcgacgcagccagcgccagagcttggcccaagatgcacactgtgaacggatatgtcaataggacgcttcctggcttgattgggtgtcatcggaaaagtgtctactggcacgtgatcggaatggggacaacaccagaggtccactccatatttctcgaaggccataccttccttgttcgaaaccacagacaggcatccttggggatctctcccattacctttctcactgcccaaacgctccttcgtgacttgggtcagttccttctcttttgccatatcccgtcacaccagcatgatggtatggaagcttatgtgaaagtcgacagttgtcctgaggagccacagttgcgcatgaagaataatgaagaagccgaggattacgacgacgatctcaccgattctgagatggacgtggtgaggtttgatgacgacaactctccctccatcattcaagctcggagcggggcgaagaaacaccccaagacttgggtccactatatagcggcggaagaggaggattgggattacgctcctcttgtattggcaccagatgaccgctcatacaaaagccagtacctcaacaacggaccgcagagaattggccggaagtataagaaagtgcgatttatggcctatacagacgaaacctttaagacaagggaggccatccagcatgagagtgggattttgggacctcttctttacggcgaagttggtgataccctcctcatcatcttcaagaatcaagcttctcgcccctataacatttacccacacgggatcactgacgttaggcctttgtatagcagaagacttcccaaaggcgtgaagcatctcaaagacttccccattttgccaggcgagatctttaagtacaaatggaccattacagtggaagatggaccgactaaatcagaccctcgatgccttacgcggtactattcctccttcgtgaattgggagagagatttggcaagcggactcataggaccactcctcatctgttacaaggaatctgtagaccagaggggtaaccagattatgagtgataaacgcaatgtgatcctttttagcgtcttcgacgagaaccggtcctggtacttgaccgagaatatacaaaggttccttcccaaccccgcaggcgttcagttggaagaccctgagtttcaggccagcaatattatgcactcaatcaacggctatgtgtttgatagtctccagctttctgtttgcctccatgaagtagcctattggtacatcttgtcaattggtgctcaaacagacttcctctccgtcttcttctccggctacacctttaagcacaagggcgtgtatgaggacactctcacactctttccattttctggagaaaccgtgttcatgagcatggagaatccaggcctttggatcttgggttgccacaacagtgattttcgcaatcggggaatgactgctctcctcaaagtcagcagctgtgattggaacacaggcgactattacgaagattcttacgaggacataagtgcctactttgactccaagaataacgccattgagcccagatcattctcccagaatcctcccgtgcttaaaaggcatcagcgcgaaggtaccagaactactcttcagtctgatcaagaggagattgactatgacgacaccattagcgtggaaatgaagaaggaggatttcgatatctatgacgaagatgagaaccagtctccgcggagctttcagaagaagacgcgacactacttcattgcagcagtcgaaaggctttgggactacggtatgtcatcatcccctcatgtgttgcgcaatagagctcagagtggaagtgttccacagttcaagaaagtcgtctttcaagagtttacagatggcagcttcacacagcctctctatcggggcgagcttaacgaacatttgggactccttggtccctatatccgagccgaagtggaggacaacattatggttacctttaggaatcaagcctctcgcccctacagcttctactcctccctcatcagttatgaggaggatcagagacaaggcgctgaaccacggaagaactttgtgaaaccgaatgagacgaagacctacttctggaaagtacagcaccacatggcccccacaaaagacgaattcgattgcaaagcatgggcgtatttttcagacgttgacttggagaaagatgtacattcaggacttattggtcctttgttggtgtgtcacactaacactctcaatccagcccatggcaggcaggtgacagtccaggaattcgctcttttctttaccatctttgatgagaccaagtcctggtacttcacggaaaacatggagcgcaattgcagagccccctgtaacatacagatggaggaccctacctttaaggaaaattatcggttccacgcaatcaacggatacattatggatacactccctggccttgtgatggctcaggaccaacgaatcaggtggtacctcctcagcatgggttctaatgagaacatacactccattcacttttcaggacatgtgttcactgtccggaagaaagaagagtataagatggccctctacaatttgtatccaggcgtgtttgagaccgttgaaatgcttccctctaaagctggcatctggagagtagagtgcttgatcggagaacatcttcacgcaggtatgagcaccttgttcctcgtgtacagcaacaaatgtcagaatccacttggcatggccagtggacacattcgcgactttcagatcacagcatctggccagtatggacaatgggccccaaagttggctcgcctccattactccggtagcataaatgcgtggtccactaaagaacctttcagctggattaaggtcgatcttcttgcccccatgatcatccacggcattaagacacagggagcgaggcagaaattctcctccctctacatctcacagttcattattatgtatagtttggacggcaagaagtggcaaacttatagaggtaacagtactggaacagacatggtgttcttcggcaacgttgatagctctggcatcaaacacaacatctttaatcctcccataatagctcggtacatcagattgcatccgacccactacagccataggagtacactccgaatggagcttatgggttgcgacttgaattcctgttcaatgccactcggaatggagtctaaagccatctctgatgcacagataaccgccagtagctactttacgaacatgtttgctacgtggtcaccctctaaggcaaggcttcatttgcaaggccggtctaatgcctggagacctcaggtgaacaacccgaaagaatggctccaggtggactttcagaagaccatgaaagtaacaggtgtcactactcagggagttaagtccttggatactagcatgtatgtgaaggagttccttatttcctcatcacaagatggccaccagtggaccctcttctttcagaatggtaaggtcaaagtgtttcagggcaatcaagacagcttcacacccgtggtgaacagtcttgatcctccactcttgacacgataccttcgaatccatccacagtcttgggagcaccagattgcattgcgcatggaagtacttggatgcgaggctcaggacctctac

SEQ ID NO: 1596 - protein, 1457 aa, synthetic construct
  REGION 1..1457: note = Variant of human B-domain deleted Factor VIII
MQIELSTCFFLCLLRFCFSATRRYYLGAVELSWDYMQSDLGELPVDARFPPRVPKSFPFNTSQVYKKTLFVEFTDHLFNIAKPRPPWMGLLGPTIQAEVYDTVVITLKNMASHPVSLHAVGVSYWKASEGAEYDDQTSQREKEDDKVFPGGSHTYVWQVLKENGPMASDPPCLTYSYLSHVDLVKDLNSGLIGALLVCREGSLAKEKTQTLAKFILLFAVFDEGKSWHSETKNSLMQDRDAASARAWPKMHTVNGYVNRTLPGLIGCHRKSVYWHVIGMGTTPEVHSIFLEGHTFLVRNHRQASLGISPITFLTAQTLLRDLGQFLLFCHIPSHQHDGMEAYVKVDSCPEEPQLRMKNNEEAEDYDDDLTDSEMDVVRFDDDNSPSIIQARSGAKKHPKTWVHYIAAEEEDWDYAPLVLAPDDRSYKSQYLNNGPQRIGRKYKKVRFMAYTDETFKTREAIQHESGILGPLLYGEVGDTLLIIFKNQASRPYNIYPHGITDVRPLYSRRLPKGVKHLKDFPILPGEIFKYKWTITVEDGPTKSDPRCLTRYYSSFVNWERDLASGLIGPLLICYKESVDQRGNQIMSDKRNVILFSVFDENRSWYLTENIQRFLPNPAGVQLEDPEFQASNIMHSINGYVFDSLQLSVCLHEVAYWYILSIGAQTDFLSVFFSGYTFKHKGVYEDTLTLFPFSGETVFMSMENPGLWILGCHNSDFRNRGMTALLKVSSCDWNTGDYYEDSYEDISAYFDSKNNAIEPRSFSQNPPVLKRHQREGTRTTLQSDQEEIDYDDTISVEMKKEDFDIYDEDENQSPRSFQKKTRHYFIAAVERLWDYGMSSSPHVLRNRAQSGSVPQFKKVVFQEFTDGSFTQPLYRGELNEHLGLLGPYIRAEVEDNIMVTFRNQASRPYSFYSSLISYEEDQRQGAEPRKNFVKPNETKTYFWKVQHHMAPTKDEFDCKAWAYFSDVDLEKDVHSGLIGPLLVCHTNTLNPAHGRQVTVQEFALFFTIFDETKSWYFTENMERNCRAPCNIQMEDPTFKENYRFHAINGYIMDTLPGLVMAQDQRIRWYLLSMGSNENIHSIHFSGHVFTVRKKEEYKMALYNLYPGVFETVEMLPSKAGIWRVECLIGEHLHAGMSTLFLVYSNKCQNPLGMASGHIRDFQITASGQYGQWAPKLARLHYSGSINAWSTKEPFSWIKVDLLAPMIIHGIKTQGARQKFSSLYISQFIIMYSLDGKKWQTYRGNSTGTDMVFFGNVDSSGIKHNIFNPPIIARYIRLHPTHYSHRSTLRMELMGCDLNSCSMPLGMESKAISDAQITASSYFTNMFATWSPSKARLHLQGRSNAWRPQVNNPKEWLQVDFQKTMKVTGVTTQGVKSLDTSMYVKEFLISSSQDGHQWTLFFQNGKVKVFQGNQDSFTPVVNSLDPPLLTRYLRIHPQSWEHQIALRMEVLGCEAQDLY

SEQ ID NO: 1597 - DNA, 4371 bp, synthetic construct
  misc_feature 1..4371: note = Variant of human B-domain deleted Factor VIII
  source 1..4371: mol_type = other DNA
atgcagattgaactgtctacctgcttcttcctctgtttgctgaggttctgctttagcgccactagacggtactaccttggcgctgtggagctgtcctgggactatatgcagagtgatttgggagagcttcccgtcgacgcacgatttcctcctcgcgttccaaagtcatttccctttaacacaagccaggtgtacaagaagacgctcttcgtcgaattcaccgatcacctgttcaatatcgccaaacccagaccaccatggatgggtcttttggggcctaccatacaagcggaggtgtatgacacagttgttatcactctcaagaacatggcttctcatccggtaagtcttcacgcagtgggcgtgtcctactggaaagcttcagaaggagccgagtatgatgatcagacatcccagagggagaaagaagacgacaaggtatttccaggtgggtctcatacctatgtgtggcaagtgctcaaagagaatggccctatggcaagcgatccgccgtgtttgacttacagctacctttcacacgttgacctcgtcaaggacctcaactccgggttgattggagccttgttggtatgcagggaaggatctcttgccaaagagaagacacagaccctggccaagtttatccttctctttgctgtgttcgatgagggcaaaagttggcatagcgaaacgaagaattccctcatgcaggatcgcgacgcagccagcgccagagcttggcccaagatgcacactgtgaacggatatgtcaataggacgcttcctggcttgattgggtgtcatcggaaaagtgtctactggcacgtgatcggaatggggacaacaccagaggtccactccatatttctcgaaggccataccttccttgttcgaaaccacagacaggcatccttggggatctctcccattacctttctcactgcccaaacgctccttcgtgacttgggtcagttccttctcttttgccatatcccgtcacaccagcatgatggtatggaagcttatgtgaaagtcgacagttgtcctgaggagccacagttgcgcatgaagaataatgaagaagccgaggattacgacgacgatctcaccgattctgagatggacgtggtgaggtttgatgacgacaactctccctccatcattcaagctcggagcggggcgaagaaacaccccaagacttgggtccactatatagcggcggaagaggaggattgggattacgctcctcttgtattggcaccagatgaccgctcatacaaaagccagtacctcaacaacggaccgcagagaattggccggaagtataagaaagtgcgatttatggcctatacagacgaaacctttaagacaagggaggccatccagcatgagagtgggattttgggacctcttctttacggcgaagttggtgataccctcctcatcatcttcaagaatcaagcttctcgcccctataacatttacccacacgggatcactgacgttaggcctttgtatagcagaagacttcccaaaggcgtgaagcatctcaaagacttccccattttgccaggcgagatctttaagtacaaatggaccattacagtggaagatggaccgactaaatcagaccctcgatgccttacgcggtactattcctccttcgtgaattgggagagagatttggcaagcggactcataggaccactcctcatctgttacaaggaatctgtagaccagaggggtaaccagattatgagtgataaacgcaatgtgatcctttttagcgtcttcgacgagaaccggtcctggtacttgaccgagaatatacaaaggttccttcccaaccccgcaggcgttcagttggaagaccctgagtttcaggccagcaatattatgcactcaatcaacggctatgtgtttgatagtctccagctttctgtttgcctccatgaagtagcctattggtacatcttgtcaattggtgctcaaacagacttcctctccgtcttcttctccggctacacctttaagcacaagggcgtgtatgaggacactctcacactctttccattttctggagaaaccgtgttcatgagcatggagaatccaggcctttggatcttgggttgccacaacagtgattttcgcaatcggggaatgactgctctcctcaaagtcagcagctgtgattggaacacaggcgactattacgaagattcttacgaggacataagtgcctactttgactccaagaataacgccattgagcccagatcattctcccagaatcctcccgtgcttaaaaggcatcagcgcgaaggtaccagaactactcttcagtctgatcaagaggagattgactatgacgacaccattagcgtggaaatgaagaaggaggatttcgatatctatgacgaagatgagaaccagtctccgcggagctttcagaagaagacgcgacactacttcattgcagcagtcgaaaggctttgggactacggtatgtcatcatcccctcatgtgttgcgcaatagagctcagagtggaagtgttccacagttcaagaaagtcgtctttcaagagtttacagatggcagcttcacacagcctctctatcggggcgagcttaacgaacatttgggactccttggtccctatatccgagccgaagtggaggacaacattatggttacctttaggaatcaagcctctcgcccctacagcttctactcctccctcatcagttatgaggaggatcagagacaaggcgctgaaccacggaagaactttgtgaaaccgaatgagacgaagacctacttctggaaagtacagcaccacatggcccccacaaaagacgaattcgattgcaaagcatgggcgtatttttcagacgttgacttggagaaagatgtacattcaggacttattggtcctttgttggtgtgtcacactaacactctcaatccagcccatggcaggcaggtgacagtccaggaattcgctcttttctttaccatctttgatgagaccaagtcctggtacttcacggaaaacatggagcgcaattgcagagccccctgtaacatacagatggaggaccctacctttaaggaaaattatcggttccacgcaatcaacggatacattatggatacactccctggccttgtgatggctcaggaccaacgaatcaggtggtacctcctcagcatgggttctaatgagaacatacactccattcacttttcaggacatgtgttcactgtccggaagaaagaagagtataagatggccctctacaatttgtatccaggcgtgtttgagaccgttgaaatgcttccctctaaagctggcatctggagagtagagtgcttgatcggagaacatcttcacgcaggtatgagcaccttgttcctcgtgtacagcaacaaatgtcagaatccacttggcatggccagtggacacattcgcgactttcagatcacagcatctggccagtatggacaatgggccccaaagttggctcgcctccattactccggtagcataaatgcgtggtccactaaagaacctttcagctggattaaggtcgatcttcttgcccccatgatcatccacggcattaagacacagggagcgaggcagaaattctcctccctctacatctcacagttcattattatgtatagtttggacggcaagaagtggcaaacttatagaggtaacagtactggaacagacatggtgttcttcggcaacgttgatagctctggcatcaaacacaacatctttaatcctcccataatagctcggtacatcagattgcatccgacccactacagcacgaggagtacactccgaatggagcttatgggttgcgacttgaattcctgttcaatgccactcggaatggagtctaaagccatctctgatgcacagataaccgccagtagctactttacgaacatgtttgctacgtggtcaccctctaaggcaaggcttcatttgcaaggccggtctaatgcctggagacctcaggtgaacaacccgaaagaatggctccaggtggactttcagaagaccatgaaagtaacaggtgtcactactcagggagttaagtccttggatactagcatgtatgtgaaggagttccttatttcctcatcacaagatggccaccagtggaccctcttctttcagaatggtaaggtcaaagtgtttcagggcaatcaagacagcttcacacccgtggtgaacagtcttgatcctccactcttgacacgataccttcgaatccatccacagtcttgggagcaccagattgcattgcgcatggaagtacttggatgcgaggctcaggacctctac

SEQ ID NO: 1598 - protein, 1457 aa, synthetic construct
  REGION 1..1457: note = Variant of human B-domain deleted Factor VIII
MQIELSTCFFLCLLRFCFSATRRYYLGAVELSWDYMQSDLGELPVDARFPPRVPKSFPFNTSQVYKKTLFVEFTDHLFNIAKPRPPWMGLLGPTIQAEVYDTVVITLKNMASHPVSLHAVGVSYWKASEGAEYDDQTSQREKEDDKVFPGGSHTYVWQVLKENGPMASDPPCLTYSYLSHVDLVKDLNSGLIGALLVCREGSLAKEKTQTLAKFILLFAVFDEGKSWHSETKNSLMQDRDAASARAWPKMHTVNGYVNRTLPGLIGCHRKSVYWHVIGMGTTPEVHSIFLEGHTFLVRNHRQASLGISPITFLTAQTLLRDLGQFLLFCHIPSHQHDGMEAYVKVDSCPEEPQLRMKNNEEAEDYDDDLTDSEMDVVRFDDDNSPSIIQARSGAKKHPKTWVHYIAAEEEDWDYAPLVLAPDDRSYKSQYLNNGPQRIGRKYKKVRFMAYTDETFKTREAIQHESGILGPLLYGEVGDTLLIIFKNQASRPYNIYPHGITDVRPLYSRRLPKGVKHLKDFPILPGEIFKYKWTITVEDGPTKSDPRCLTRYYSSFVNWERDLASGLIGPLLICYKESVDQRGNQIMSDKRNVILFSVFDENRSWYLTENIQRFLPNPAGVQLEDPEFQASNIMHSINGYVFDSLQLSVCLHEVAYWYILSIGAQTDFLSVFFSGYTFKHKGVYEDTLTLFPFSGETVFMSMENPGLWILGCHNSDFRNRGMTALLKVSSCDWNTGDYYEDSYEDISAYFDSKNNAIEPRSFSQNPPVLKRHQREGTRTTLQSDQEEIDYDDTISVEMKKEDFDIYDEDENQSPRSFQKKTRHYFIAAVERLWDYGMSSSPHVLRNRAQSGSVPQFKKVVFQEFTDGSFTQPLYRGELNEHLGLLGPYIRAEVEDNIMVTFRNQASRPYSFYSSLISYEEDQRQGAEPRKNFVKPNETKTYFWKVQHHMAPTKDEFDCKAWAYFSDVDLEKDVHSGLIGPLLVCHTNTLNPAHGRQVTVQEFALFFTIFDETKSWYFTENMERNCRAPCNIQMEDPTFKENYRFHAINGYIMDTLPGLVMAQDQRIRWYLLSMGSNENIHSIHFSGHVFTVRKKEEYKMALYNLYPGVFETVEMLPSKAGIWRVECLIGEHLHAGMSTLFLVYSNKCQNPLGMASGHIRDFQITASGQYGQWAPKLARLHYSGSINAWSTKEPFSWIKVDLLAPMIIHGIKTQGARQKFSSLYISQFIIMYSLDGKKWQTYRGNSTGTDMVFFGNVDSSGIKHNIFNPPIIARYIRLHPTHYSTRSTLRMELMGCDLNSCSMPLGMESKAISDAQITASSYFTNMFATWSPSKARLHLQGRSNAWRPQVNNPKEWLQVDFQKTMKVTGVTTQGVKSLDTSMYVKEFLISSSQDGHQWTLFFQNGKVKVFQGNQDSFTPVVNSLDPPLLTRYLRIHPQSWEHQIALRMEVLGCEAQDLY

SEQ ID NO: 1599 - DNA, 4371 bp, synthetic construct
  misc_feature 1..4371: note = Variant of human B-domain deleted Factor VIII
  source 1..4371: mol_type = other DNA
atgcagattgaactgtctacctgcttcttcctctgtttgctgaggttctgctttagcgccactagacggtactaccttggcgctgtggagctgtcctgggactatatgcagagtgatttgggagagcttcccgtcgacgcacgatttcctcctcgcgttccaaagtcatttccctttaacacaagccaggtgtacaagaagacgctcttcgtcgaattcaccgatcacctgttcaatatcgccaaacccagaccaccatggatgggtcttttggggcctaccatacaagcggaggtgtatgacacagttgttatcactctcaagaacatggcttctcatccggtaagtcttcacgcagtgggcgtgtcctactggaaagcttcagaaggagccgagtatgatgatcagacatcccagagggagaaagaagacgacaaggtatttccaggtgggtctcatacctatgtgtggcaagtgctcaaagagaatggccctatggcaagcgatccgccgtgtttgacttacagctacctttcacacgttgacctcgtcaaggacctcaactccgggttgattggagccttgttggtatgcagggaaggatctcttgccaaagagaagacacagaccctggccaagtttatccttctctttgctgtgttcgatgagggcaaaagttggcatagcgaaacgaagaattccctcatgcaggatcgcgacgcagccagcgccagagcttggcccaagatgcacactgtgaacggatatgtcaataggacgcttcctggcttgattgggtgtcatcggaaaagtgtctactggcacgtgatcggaatggggacaacaccagaggtccactccatatttctcgaaggccataccttccttgttcgaaaccacagacaggcatccttggggatctctcccattacctttctcactgcccaaacgctccttcgtgacttgggtcagttccttctcttttgccatatcccgtcacaccagcatgatggtatggaagcttatgtgaaagtcgacagttgtcctgaggagccacagttgcgcatgaagaataatgaagaagccgaggattacgacgacgatctcaccgattctgagatggacgtggtgaggtttgatgacgacaactctccctccatcattcaagctcggagcggggcgaagaaacaccccaagacttgggtccactatatagcggcggaagaggaggattgggattacgctcctcttgtattggcaccagatgaccgctcatacaaaagccagtacctcaacaacggaccgcagagaattggccggaagtataagaaagtgcgatttatggcctatacagacgaaacctttaagacaagggaggccatccagcatgagagtgggattttgggacctcttctttacggcgaagttggtgataccctcctcatcatcttcaagaatcaagcttctcgcccctataacatttacccacacgggatcactgacgttaggcctttgtatagcagaagacttcccaaaggcgtgaagcatctcaaagacttccccattttgccaggcgagatctttaagtacaaatggaccattacagtggaagatggaccgactaaatcagaccctcgatgccttacgcggtactattcctccttcgtgaattgggagagagatttggcaagcggactcataggaccactcctcatctgttacaaggaatctgtagaccagaggggtaaccagattatgagtgataaacgcaatgtgatcctttttagcgtcttcgacgagaaccggtcctggtacttgaccgagaatatacaaaggttccttcccaaccccgcaggcgttcagttggaagaccctgagtttcaggccagcaatattatgcactcaatcaacggctatgtgtttgatagtctccagctttctgtttgcctccatgaagtagcctattggtacatcttgtcaattggtgctcaaacagacttcctctccgtcttcttctccggctacacctttaagcacaagggcgtgtatgaggacactctcacactctttccattttctggagaaaccgtgttcatgagcatggagaatccaggcctttggatcttgggttgccacaacagtgattttcgcaatcggggaatgactgctctcctcaaagtcagcagctgtgattggaacacaggcgactattacgaagattcttacgaggacataagtgcctactttgactccaagaataacgccattgagcccagatcattctcccagaatcctcccgtgcttaaaaggcatcagcgcgaaggtaccagaactactcttcagtctgatcaagaggagattgactatgacgacaccattagcgtggaaatgaagaaggaggatttcgatatctatgacgaagatgagaaccagtctccgcggagctttcagaagaagacgcgacactacttcattgcagcagtcgaaaggctttgggactacggtatgtcatcatcccctcatgtgttgcgcaatagagctcagagtggaagtgttccacagttcaagaaagtcgtctttcaagagtttacagatggcagcttcacacagcctctctatcggggcgagcttaacgaacatttgggactccttggtccctatatccgagccgaagtggaggacaacattatggttacctttaggaatcaagcctctcgcccctacagcttctactcctccctcatcagttatgaggaggatcagagacaaggcgctgaaccacggaagaactttgtgaaaccgaatgagacgaagacctacttctggaaagtacagcaccacatggcccccacaaaagacgaattcgattgcaaagcatgggcgtatttttcagacgttgacttggagaaagatgtacattcaggacttattggtcctttgttggtgtgtcacactaacactctcaatccagcccatggcaggcaggtgacagtccaggaattcgctcttttctttaccatctttgatgagaccaagtcctggtacttcacggaaaacatggagcgcaattgcagagccccctgtaacatacagatggaggaccctacctttaaggaaaattatcggttccacgcaatcaacggatacattatggatacactccctggccttgtgatggctcaggaccaacgaatcaggtggtacctcctcagcatgggttctaatgagaacatacactccattcacttttcaggacatgtgttcactgtccggaagaaagaagagtataagatggccctctacaatttgtatccaggcgtgtttgagaccgttgaaatgcttccctctaaagctggcatctggagagtagagtgcttgatcggagaacatcttcacgcaggtatgagcaccttgttcctcgtgtacagcaacaaatgtcagaatccacttggcatggccagtggacacattcgcgactttcagatcacagcatctggccagtatggacaatgggccccaaagttggctcgcctccattactccggtagcataaatgcgtggtccactaaagaacctttcagctggattaaggtcgatcttcttgcccccatgatcatccacggcattaagacacagggagcgaggcagaaattctcctccctctacatctcacagttcattattatgtatagtttggacggcaagaagtggcaaacttatagaggtaacagtactggaacagacatggtgttcttcggcaacgttgatagctctggcatcaaacacaacatctttaatcctcccataatagctcggtacatcagattgcatccgacccaccagagcattaggagtacactccgaatggagcttatgggttgcgacttgaattcctgttcaatgccactcggaatggagtctaaagccatctctgatgcacagataaccgccagtagctactttacgaacatgtttgctacgtggtcaccctctaaggcaaggcttcatttgcaaggccggtctaatgcctggagacctcaggtgaacaacccgaaagaatggctccaggtggactttcagaagaccatgaaagtaacaggtgtcactactcagggagttaagtccttggatactagcatgtatgtgaaggagttccttatttcctcatcacaagatggccaccagtggaccctcttctttcagaatggtaaggtcaaagtgtttcagggcaatcaagacagcttcacacccgtggtgaacagtcttgatcctccactcttgacacgataccttcgaatccatccacagtcttgggagcaccagattgcattgcgcatggaagtacttggatgcgaggctcaggacctctac

SEQ ID NO: 1600 - protein, 1457 aa, synthetic construct
  REGION 1..1457: note = Variant of human B-domain deleted Factor VIII
MQIELSTCFFLCLLRFCFSATRRYYLGAVELSWDYMQSDLGELPVDARFPPRVPKSFPFNTSQVYKKTLFVEFTDHLFNIAKPRPPWMGLLGPTIQAEVYDTVVITLKNMASHPVSLHAVGVSYWKASEGAEYDDQTSQREKEDDKVFPGGSHTYVWQVLKENGPMASDPPCLTYSYLSHVDLVKDLNSGLIGALLVCREGSLAKEKTQTLAKFILLFAVFDEGKSWHSETKNSLMQDRDAASARAWPKMHTVNGYVNRTLPGLIGCHRKSVYWHVIGMGTTPEVHSIFLEGHTFLVRNHRQASLGISPITFLTAQTLLRDLGQFLLFCHIPSHQHDGMEAYVKVDSCPEEPQLRMKNNEEAEDYDDDLTDSEMDVVRFDDDNSPSIIQARSGAKKHPKTWVHYIAAEEEDWDYAPLVLAPDDRSYKSQYLNNGPQRIGRKYKKVRFMAYTDETFKTREAIQHESGILGPLLYGEVGDTLLIIFKNQASRPYNIYPHGITDVRPLYSRRLPKGVKHLKDFPILPGEIFKYKWTITVEDGPTKSDPRCLTRYYSSFVNWERDLASGLIGPLLICYKESVDQRGNQIMSDKRNVILFSVFDENRSWYLTENIQRFLPNPAGVQLEDPEFQASNIMHSINGYVFDSLQLSVCLHEVAYWYILSIGAQTDFLSVFFSGYTFKHKGVYEDTLTLFPFSGETVFMSMENPGLWILGCHNSDFRNRGMTALLKVSSCDWNTGDYYEDSYEDISAYFDSKNNAIEPRSFSQNPPVLKRHQREGTRTTLQSDQEEIDYDDTISVEMKKEDFDIYDEDENQSPRSFQKKTRHYFIAAVERLWDYGMSSSPHVLRNRAQSGSVPQFKKVVFQEFTDGSFTQPLYRGELNEHLGLLGPYIRAEVEDNIMVTFRNQASRPYSFYSSLISYEEDQRQGAEPRKNFVKPNETKTYFWKVQHHMAPTKDEFDCKAWAYFSDVDLEKDVHSGLIGPLLVCHTNTLNPAHGRQVTVQEFALFFTIFDETKSWYFTENMERNCRAPCNIQMEDPTFKENYRFHAINGYIMDTLPGLVMAQDQRIRWYLLSMGSNENIHSIHFSGHVFTVRKKEEYKMALYNLYPGVFETVEMLPSKAGIWRVECLIGEHLHAGMSTLFLVYSNKCQNPLGMASGHIRDFQITASGQYGQWAPKLARLHYSGSINAWSTKEPFSWIKVDLLAPMIIHGIKTQGARQKFSSLYISQFIIMYSLDGKKWQTYRGNSTGTDMVFFGNVDSSGIKHNIFNPPIIARYIRLHPTHQSIRSTLRMELMGCDLNSCSMPLGMESKAISDAQITASSYFTNMFATWSPSKARLHLQGRSNAWRPQVNNPKEWLQVDFQKTMKVTGVTTQGVKSLDTSMYVKEFLISSSQDGHQWTLFFQNGKVKVFQGNQDSFTPVVNSLDPPLLTRYLRIHPQSWEHQIALRMEVLGCEAQDLY

SEQ ID NO: 1601 - DNA, 4371 bp, synthetic construct
  misc_feature 1..4371: note = Variant of human B-domain deleted Factor VIII
  source 1..4371: mol_type = other DNA
atgcagattgaactgtctacctgcttcttcctctgtttgctgaggttctgctttagcgccactagacggtactaccttggcgctgtggagctgtcctgggactatatgcagagtgatttgggagagcttcccgtcgacgcacgatttcctcctcgcgttccaaagtcatttccctttaacacaagccaggtgtacaagaagacgctcttcgtcgaattcaccgatcacctgttcaatatcgccaaacccagaccaccatggatgggtcttttggggcctaccatacaagcggaggtgtatgacacagttgttatcactctcaagaacatggcttctcatccggtaagtcttcacgcagtgggcgtgtcctactggaaagcttcagaaggagccgagtatgatgatcagacatcccagagggagaaagaagacgacaaggtatttccaggtgggtctcatacctatgtgtggcaagtgctcaaagagaatggccctatggcaagcgatccgccgtgtttgacttacagctacctttcacacgttgacctcgtcaaggacctcaactccgggttgattggagccttgttggtatgcagggaaggatctcttgccaaagagaagacacagaccctggccaagtttatccttctctttgctgtgttcgatgagggcaaaagttggcatagcgaaacgaagaattccctcatgcaggatcgcgacgcagccagcgccagagcttggcccaagatgcacactgtgaacggatatgtcaataggacgcttcctggcttgattgggtgtcatcggaaaagtgtctactggcacgtgatcggaatggggacaacaccagaggtccactccatatttctcgaaggccataccttccttgttcgaaaccacagacaggcatccttggggatctctcccattacctttctcactgcccaaacgctccttcgtgacttgggtcagttccttctcttttgccatatcccgtcacaccagcatgatggtatggaagcttatgtgaaagtcgacagttgtcctgaggagccacagttgcgcatgaagaataatgaagaagccgaggattacgacgacgatctcaccgattctgagatggacgtggtgaggtttgatgacgacaactctccctccatcattcaagctcggagcggggcgaagaaacaccccaagacttgggtccactatatagcggcggaagaggaggattgggattacgctcctcttgtattggcaccagatgaccgctcatacaaaagccagtacctcaacaacggaccgcagagaattggccggaagtataagaaagtgcgatttatggcctatacagacgaaacctttaagacaagggaggccatccagcatgagagtgggattttgggacctcttctttacggcgaagttggtgataccctcctcatcatcttcaagaatcaagcttctcgcccctataacatttacccacacgggatcactgacgttaggcctttgtatagcagaagacttcccaaaggcgtgaagcatctcaaagacttccccattttgccaggcgagatctttaagtacaaatggaccattacagtggaagatggaccgactaaatcagaccctcgatgccttacgcggtactattcctccttcgtgaattgggagagagatttggcaagcggactcataggaccactcctcatctgttacaaggaatctgtagaccagaggggtaaccagattatgagtgataaacgcaatgtgatcctttttagcgtcttcgacgagaaccggtcctggtacttgaccgagaatatacaaaggttccttcccaaccccgcaggcgttcagttggaagaccctgagtttcaggccagcaatattatgcactcaatcaacggctatgtgtttgatagtctccagctttctgtttgcctccatgaagtagcctattggtacatcttgtcaattggtgctcaaacagacttcctctccgtcttcttctccggctacacctttaagcacaagggcgtgtatgaggacactctcacactctttccattttctggagaaaccgtgttcatgagcatggagaatccaggcctttggatcttgggttgccacaacagtgattttcgcaatcggggaatgactgctctcctcaaagtcagcagctgtgattggaacacaggcgactattacgaagattcttacgaggacataagtgcctactttgactccaagaataacgccattgagcccagatcattctcccagaatcctcccgtgcttaaaaggcatcagcgcgaaggtaccagaactactcttcagtctgatcaagaggagattgactatgacgacaccattagcgtggaaatgaagaaggaggatttcgatatctatgacgaagatgagaaccagtctccgcggagctttcagaagaagacgcgacactacttcattgcagcagtcgaaaggctttgggactacggtatgtcatcatcccctcatgtgttgcgcaatagagctcagagtggaagtgttccacagttcaagaaagtcgtctttcaagagtttacagatggcagcttcacacagcctctctatcggggcgagcttaacgaacatttgggactccttggtccctatatccgagccgaagtggaggacaacattatggttacctttaggaatcaagcctctcgcccctacagcttctactcctccctcatcagttatgaggaggatcagagacaaggcgctgaaccacggaagaactttgtgaaaccgaatgagacgaagacctacttctggaaagtacagcaccacatggcccccacaaaagacgaattcgattgcaaagcatgggcgtatttttcagacgttgacttggagaaagatgtacattcaggacttattggtcctttgttggtgtgtcacactaacactctcaatccagcccatggcaggcaggtgacagtccaggaattcgctcttttctttaccatctttgatgagaccaagtcctggtacttcacggaaaacatggagcgcaattgcagagccccctgtaacatacagatggaggaccctacctttaaggaaaattatcggttccacgcaatcaacggatacattatggatacactccctggccttgtgatggctcaggaccaacgaatcaggtggtacctcctcagcatgggttctaatgagaacatacactccattcacttttcaggacatgtgttcactgtccggaagaaagaagagtataagatggccctctacaatttgtatccaggcgtgtttgagaccgttgaaatgcttccctctaaagctggcatctggagagtagagtgcttgatcggagaacatcttcacgcaggtatgagcaccttgttcctcgtgtacagcaacaaatgtcagaatccacttggcatggccagtggacacattcgcgactttcagatcacagcatctggccagtatggacaatgggccccaaagttggctcgcctccattactccggtagcataaatgcgtggtccactaaagaacctttcagctggattaaggtcgatcttcttgcccccatgatcatccacggcattaagacacagggagcgaggcagaaattctcctccctctacatctcacagttcattattatgtatagtttggacggcaagaagtggcaaacttatagaggtaacagtactggaacagacatggtgttcttcggcaacgttgatagctctggcatcaaacacaacatctttaatcctcccataatagctcggtacatcagattgcatccgacccacccgagcattaggagtacactccgaatggagcttatgggttgcgacttgaattcctgttcaatgccactcggaatggagtctaaagccatctctgatgcacagataaccgccagtagctactttacgaacatgtttgctacgtggtcaccctctaaggcaaggcttcatttgcaaggccggtctaatgcctggagacctcaggtgaacaacccgaaagaatggctccaggtggactttcagaagaccatgaaagtaacaggtgtcactactcagggagttaagtccttggatactagcatgtatgtgaaggagttccttatttcctcatcacaagatggccaccagtggaccctcttctttcagaatggtaaggtcaaagtgtttcagggcaatcaagacagcttcacacccgtggtgaacagtcttgatcctccactcttgacacgataccttcgaatccatccacagtcttgggagcaccagattgcattgcgcatggaagtacttggatgcgaggctcaggacctctac

SEQ ID NO: 1602 - protein, 1457 aa, synthetic construct
  REGION 1..1457: note = Variant of human B-domain deleted Factor VIII
MQIELSTCFFLCLLRFCFSATRRYYLGAVELSWDYMQSDLGELPVDARFPPRVPKSFPFNTSQVYKKTLFVEFTDHLFNIAKPRPPWMGLLGPTIQAEVYDTVVITLKNMASHPVSLHAVGVSYWKASEGAEYDDQTSQREKEDDKVFPGGSHTYVWQVLKENGPMASDPPCLTYSYLSHVDLVKDLNSGLIGALLVCREGSLAKEKTQTLAKFILLFAVFDEGKSWHSETKNSLMQDRDAASARAWPKMHTVNGYVNRTLPGLIGCHRKSVYWHVIGMGTTPEVHSIFLEGHTFLVRNHRQASLGISPITFLTAQTLLRDLGQFLLFCHIPSHQHDGMEAYVKVDSCPEEPQLRMKNNEEAEDYDDDLTDSEMDVVRFDDDNSPSIIQARSGAKKHPKTWVHYIAAEEEDWDYAPLVLAPDDRSYKSQYLNNGPQRIGRKYKKVRFMAYTDETFKTREAIQHESGILGPLLYGEVGDTLLIIFKNQASRPYNIYPHGITDVRPLYSRRLPKGVKHLKDFPILPGEIFKYKWTITVEDGPTKSDPRCLTRYYSSFVNWERDLASGLIGPLLICYKESVDQRGNQIMSDKRNVILFSVFDENRSWYLTENIQRFLPNPAGVQLEDPEFQASNIMHSINGYVFDSLQLSVCLHEVAYWYILSIGAQTDFLSVFFSGYTFKHKGVYEDTLTLFPFSGETVFMSMENPGLWILGCHNSDFRNRGMTALLKVSSCDWNTGDYYEDSYEDISAYFDSKNNAIEPRSFSQNPPVLKRHQREGTRTTLQSDQEEIDYDDTISVEMKKEDFDIYDEDENQSPRSFQKKTRHYFIAAVERLWDYGMSSSPHVLRNRAQSGSVPQFKKVVFQEFTDGSFTQPLYRGELNEHLGLLGPYIRAEVEDNIMVTFRNQASRPYSFYSSLISYEEDQRQGAEPRKNFVKPNETKTYFWKVQHHMAPTKDEFDCKAWAYFSDVDLEKDVHSGLIGPLLVCHTNTLNPAHGRQVTVQEFALFFTIFDETKSWYFTENMERNCRAPCNIQMEDPTFKENYRFHAINGYIMDTLPGLVMAQDQRIRWYLLSMGSNENIHSIHFSGHVFTVRKKEEYKMALYNLYPGVFETVEMLPSKAGIWRVECLIGEHLHAGMSTLFLVYSNKCQNPLGMASGHIRDFQITASGQYGQWAPKLARLHYSGSINAWSTKEPFSWIKVDLLAPMIIHGIKTQGARQKFSSLYISQFIIMYSLDGKKWQTYRGNSTGTDMVFFGNVDSSGIKHNIFNPPIIARYIRLHPTHPSIRSTLRMELMGCDLNSCSMPLGMESKAISDAQITASSYFTNMFATWSPSKARLHLQGRSNAWRPQVNNPKEWLQVDFQKTMKVTGVTTQGVKSLDTSMYVKEFLISSSQDGHQWTLFFQNGKVKVFQGNQDSFTPVVNSLDPPLLTRYLRIHPQSWEHQIALRMEVLGCEAQDLY

SEQ ID NO: 1603 - DNA, 4371 bp, synthetic construct
  misc_feature 1..4371: note = Variant of human B-domain deleted Factor VIII
  source 1..4371: mol_type = other DNA
atgcagattgaactgtctacctgcttcttcctctgtttgctgaggttctgctttagcgccactagacggtactaccttggcgctgtggagctgtcctgggactatatgcagagtgatttgggagagcttcccgtcgacgcacgatttcctcctcgcgttccaaagtcatttccctttaacacaagccaggtgtacaagaagacgctcttcgtcgaattcaccgatcacctgttcaatatcgccaaacccagaccaccatggatgggtcttttggggcctaccatacaagcggaggtgtatgacacagttgttatcactctcaagaacatggcttctcatccggtaagtcttcacgcagtgggcgtgtcctactggaaagcttcagaaggagccgagtatgatgatcagacatcccagagggagaaagaagacgacaaggtatttccaggtgggtctcatacctatgtgtggcaagtgctcaaagagaatggccctatggcaagcgatccgccgtgtttgacttacagctacctttcacacgttgacctcgtcaaggacctcaactccgggttgattggagccttgttggtatgcagggaaggatctcttgccaaagagaagacacagaccctggccaagtttatccttctctttgctgtgttcgatgagggcaaaagttggcatagcgaaacgaagaattccctcatgcaggatcgcgacgcagccagcgccagagcttggcccaagatgcacactgtgaacggatatgtcaataggacgcttcctggcttgattgggtgtcatcggaaaagtgtctactggcacgtgatcggaatggggacaacaccagaggtccactccatatttctcgaaggccataccttccttgttcgaaaccacagacaggcatccttggggatctctcccattacctttctcactgcccaaacgctccttcgtgacttgggtcagttccttctcttttgccatatcccgtcacaccagcatgatggtatggaagcttatgtgaaagtcgacagttgtcctgaggagccacagttgcgcatgaagaataatgaagaagccgaggattacgacgacgatctcaccgattctgagatggacgtggtgaggtttgatgacgacaactctccctccatcattcaagctcggagcggggcgaagaaacaccccaagacttgggtccactatatagcggcggaagaggaggattgggattacgctcctcttgtattggcaccagatgaccgctcatacaaaagccagtacctcaacaacggaccgcagagaattggccggaagtataagaaagtgcgatttatggcctatacagacgaaacctttaagacaagggaggccatccagcatgagagtgggattttgggacctcttctttacggcgaagttggtgataccctcctcatcatcttcaagaatcaagcttctcgcccctataacatttacccacacgggatcactgacgttaggcctttgtatagcagaagacttcccaaaggcgtgaagcatctcaaagacttccccattttgccaggcgagatctttaagtacaaatggaccattacagtggaagatggaccgactaaatcagaccctcgatgccttacgcggtactattcctccttcgtgaattgggagagagatttggcaagcggactcataggaccactcctcatctgttacaaggaatctgtagaccagaggggtaaccagattatgagtgataaacgcaatgtgatcctttttagcgtcttcgacgagaaccggtcctggtacttgaccgagaatatacaaaggttccttcccaaccccgcaggcgttcagttggaagaccctgagtttcaggccagcaatattatgcactcaatcaacggctatgtgtttgatagtctccagctttctgtttgcctccatgaagtagcctattggtacatcttgtcaattggtgctcaaacagacttcctctccgtcttcttctccggctacacctttaagcacaagggcgtgtatgaggacactctcacactctttccattttctggagaaaccgtgttcatgagcatggagaatccaggcctttggatcttgggttgccacaacagtgattttcgcaatcggggaatgactgctctcctcaaagtcagcagctgtgattggaacacaggcgactattacgaagattcttacgaggacataagtgcctactttgactccaagaataacgccattgagcccagatcattctcccagaatcctcccgtgcttaaaaggcatcagcgcgaaggtaccagaactactcttcagtctgatcaagaggagattgactatgacgacaccattagcgtggaaatgaagaaggaggatttcgatatctatgacgaagatgagaaccagtctccgcggagctttcagaagaagacgcgacactacttcattgcagcagtcgaaaggctttgggactacggtatgtcatcatcccctcatgtgttgcgcaatagagctcagagtggaagtgttccacagttcaagaaagtcgtctttcaagagtttacagatggcagcttcacacagcctctctatcggggcgagcttaacgaacatttgggactccttggtccctatatccgagccgaagtggaggacaacattatggttacctttaggaatcaagcctctcgcccctacagcttctactcctccctcatcgagtatgaggaggatcagagacaaggcgctgaaccacggaagaactttgtgaaaccgaatgagacgaagacctacttctggaaagtacagcaccacatggcccccacaaaagacgaattcgattgcaaagcatgggcgtatttttcagacgttgacttggagaaagatgtacattcaggacttattggtcctttgttggtgtgtcacactaacactctcaatccagcccatggcaggcaggtgacagtccaggaattcgctcttttctttaccatctttgatgagaccaagtcctggtacttcacggaaaacatggagcgcaattgcagagccccctgtaacatacagatggaggaccctacctttaaggaaaattatcggttccacgcaatcaacggatacattatggatacactccctggccttgtgatggctcaggaccaacgaatcaggtggtacctcctcagcatgggttctaatgagaacatacactccattcacttttcaggacatgtgttcactgtccggaagaaagaagagtataagatggccctctacaatttgtatccaggcgtgtttgagaccgttgaaatgcttccctctaaagctggcatctggagagtagagtgcttgatcggagaacatcttcacgcaggtatgagcaccttgttcctcgtgtacagcaacaaatgtcagaatccacttggcatggccagtggacacattcgcgactttcagatcacagcatctggccagtatggacaatgggccccaaagttggctcgcctccattactccggtagcataaatgcgtggtccactaaagaacctttcagctggattaaggtcgatcttcttgcccccatgatcatccacggcattaagacacagggagcgaggcagaaattctcctccctctacatctcacagttcattattatgtatagtttggacggcaagaagtggcaaacttatagaggtaacagtactggaacagacatggtgttcttcggcaacgttgatagctctggcatcaaacacaacatctttaatcctcccataatagctcggtacatcagattgcatccgacccactacagcattaggagtacactccgaatggagcttatgggttgcgacttgaattcctgttcaatgccactcggaatggagtctaaagccatctctgatgcacagataaccgccagtagctactttacgaacatgtttgctacgtggtcaccctctaaggcaaggcttcatttgcaaggccggtctaatgcctggagacctcaggtgaacaacccgaaagaatggctccaggtggactttcagaagaccatgaaagtaacaggtgtcactactcagggagttaagtccttggatactagcatgtatgtgaaggagttccttatttcctcatcacaagatggccaccagtggaccctcttctttcagaatggtaaggtcaaagtgtttcagggcaatcaagacagcttcacacccgtggtgaacagtcttgatcctccactcttgacacgataccttcgaatccatccacagtcttgggagcaccagattgcattgcgcatggaagtacttggatgcgaggctcaggacctctac

SEQ ID NO: 1604 - protein, 1457 aa, synthetic construct
  REGION 1..1457: note = Variant of human B-domain deleted Factor VIII
MQIELSTCFFLCLLRFCFSATRRYYLGAVELSWDYMQSDLGELPVDARFPPRVPKSFPFNTSQVYKKTLFVEFTDHLFNIAKPRPPWMGLLGPTIQAEVYDTVVITLKNMASHPVSLHAVGVSYWKASEGAEYDDQTSQREKEDDKVFPGGSHTYVWQVLKENGPMASDPPCLTYSYLSHVDLVKDLNSGLIGALLVCREGSLAKEKTQTLAKFILLFAVFDEGKSWHSETKNSLMQDRDAASARAWPKMHTVNGYVNRTLPGLIGCHRKSVYWHVIGMGTTPEVHSIFLEGHTFLVRNHRQASLGISPITFLTAQTLLRDLGQFLLFCHIPSHQHDGMEAYVKVDSCPEEPQLRMKNNEEAEDYDDDLTDSEMDVVRFDDDNSPSIIQARSGAKKHPKTWVHYIAAEEEDWDYAPLVLAPDDRSYKSQYLNNGPQRIGRKYKKVRFMAYTDETFKTREAIQHESGILGPLLYGEVGDTLLIIFKNQASRPYNIYPHGITDVRPLYSRRLPKGVKHLKDFPILPGEIFKYKWTITVEDGPTKSDPRCLTRYYSSFVNWERDLASGLIGPLLICYKESVDQRGNQIMSDKRNVILFSVFDENRSWYLTENIQRFLPNPAGVQLEDPEFQASNIMHSINGYVFDSLQLSVCLHEVAYWYILSIGAQTDFLSVFFSGYTFKHKGVYEDTLTLFPFSGETVFMSMENPGLWILGCHNSDFRNRGMTALLKVSSCDWNTGDYYEDSYEDISAYFDSKNNAIEPRSFSQNPPVLKRHQREGTRTTLQSDQEEIDYDDTISVEMKKEDFDIYDEDENQSPRSFQKKTRHYFIAAVERLWDYGMSSSPHVLRNRAQSGSVPQFKKVVFQEFTDGSFTQPLYRGELNEHLGLLGPYIRAEVEDNIMVTFRNQASRPYSFYSSLIEYEEDQRQGAEPRKNFVKPNETKTYFWKVQHHMAPTKDEFDCKAWAYFSDVDLEKDVHSGLIGPLLVCHTNTLNPAHGRQVTVQEFALFFTIFDETKSWYFTENMERNCRAPCNIQMEDPTFKENYRFHAINGYIMDTLPGLVMAQDQRIRWYLLSMGSNENIHSIHFSGHVFTVRKKEEYKMALYNLYPGVFETVEMLPSKAGIWRVECLIGEHLHAGMSTLFLVYSNKCQNPLGMASGHIRDFQITASGQYGQWAPKLARLHYSGSINAWSTKEPFSWIKVDLLAPMIIHGIKTQGARQKFSSLYISQFIIMYSLDGKKWQTYRGNSTGTDMVFFGNVDSSGIKHNIFNPPIIARYIRLHPTHYSIRSTLRMELMGCDLNSCSMPLGMESKAISDAQITASSYFTNMFATWSPSKARLHLQGRSNAWRPQVNNPKEWLQVDFQKTMKVTGVTTQGVKSLDTSMYVKEFLISSSQDGHQWTLFFQNGKVKVFQGNQDSFTPVVNSLDPPLLTRYLRIHPQSWEHQIALRMEVLGCEAQDLY

SEQ ID NO: 1605 - DNA, 4371 bp, synthetic construct
  misc_feature 1..4371: note = Variant of human B-domain deleted Factor VIII
  source 1..4371: mol_type = other DNA
atgcagattgaactgtctacctgcttcttcctctgtttgctgaggttctgctttagcgccactagacggtactaccttggcgctgtggagctgtcctgggactatatgcagagtgatttgggagagcttcccgtcgacgcacgatttcctcctcgcgttccaaagtcatttccctttaacacaagccaggtgtacaagaagacgctcttcgtcgaattcaccgatcacctgttcaatatcgccaaacccagaccaccatggatgggtcttttggggcctaccatacaagcggaggtgtatgacacagttgttatcactctcaagaacatggcttctcatccggtaagtcttcacgcagtgggcgtgtcctactggaaagcttcagaaggagccgagtatgatgatcagacatcccagagggagaaagaagacgacaaggtatttccaggtgggtctcatacctatgtgtggcaagtgctcaaagagaatggccctatggcaagcgatccgccgtgtttgacttacagctacctttcacacgttgacctcgtcaaggacctcaactccgggttgattggagccttgttggtatgcagggaaggatctcttgccaaagagaagacacagaccctggccaagtttatccttctctttgctgtgttcgatgagggcaaaagttggcatagcgaaacgaagaattccctcatgcaggatcgcgacgcagccagcgccagagcttggcccaagatgcacactgtgaacggatatgtcaataggacgcttcctggcttgattgggtgtcatcggaaaagtgtctactggcacgtgatcggaatggggacaacaccagaggtccactccatatttctcgaaggccataccttccttgttcgaaaccacagacaggcatccttggggatctctcccattacctttctcactgcccaaacgctccttcgtgacttgggtcagttccttctcttttgccatatcccgtcacaccagcatgatggtatggaagcttatgtgaaagtcgacagttgtcctgaggagccacagttgcgcatgaagaataatgaagaagccgaggattacgacgacgatctcaccgattctgagatggacgtggtgaggtttgatgacgacaactctccctccatcattcaagctcggagcggggcgaagaaacaccccaagacttgggtccactatatagcggcggaagaggaggattgggattacgctcctcttgtattggcaccagatgaccgctcatacaaaagccagtacctcaacaacggaccgcagagaattggccggaagtataagaaagtgcgatttatggcctatacagacgaaacctttaagacaagggaggccatccagcatgagagtgggattttgggacctcttctttacggcgaagttggtgataccctcctcatcatcttcaagaatcaagcttctcgcccctataacatttacccacacgggatcactgacgttaggcctttgtatagcagaagacttcccaaaggcgtgaagcatctcaaagacttccccattttgccaggcgagatctttaagtacaaatggaccattacagtggaagatggaccgactaaatcagaccctcgatgccttacgcggtactattcctccttcgtgaattgggagagagatttggcaagcggactcataggaccactcctcatctgttacaaggaatctgtagaccagaggggtaaccagattatgagtgataaacgcaatgtgatcctttttagcgtcttcgacgagaaccggtcctggtacttgaccgagaatatacaaaggttccttcccaaccccgcaggcgttcagttggaagaccctgagtttcaggccagcaatattatgcactcaatcaacggctatgtgtttgatagtctccagctttctgtttgcctccatgaagtagcctattggtacatcttgtcaattggtgctcaaacagacttcctctccgtcttcttctccggctacacctttaagcacaagggcgtgtatgaggacactctcacactctttccattttctggagaaaccgtgttcatgagcatggagaatccaggcctttggatcttgggttgccacaacagtgattttcgcaatcggggaatgactgctctcctcaaagtcagcagctgtgattggaacacaggcgactattacgaagattcttacgaggacataagtgcctactttgactccaagaataacgccattgagcccagatcattctcccagaatcctcccgtgcttaaaaggcatcagcgcgaaggtaccagaactactcttcagtctgatcaagaggagattgactatgacgacaccattagcgtggaaatgaagaaggaggatttcgatatctatgacgaagatgagaaccagtctccgcggagctttcagaagaagacgcgacactacttcattgcagcagtcgaaaggctttgggactacggtatgtcatcatcccctcatgtgttgcgcaatagagctcagagtggaagtgttccacagttcaagaaagtcgtctttcaagagtttacagatggcagcttcacacagcctctctatcggggcgagcttaacgaacatttgggactccttggtccctatatccgagccgaagtggaggacaacattatggttacctttaggaatcaagcctctcgcccctacagcttctactcctccctcatcagttatgaggaggatcagagacaaggcgctgaaccacggaagaactttgtgaaaccgaatgagacgaagacctacttctggaaagtacagcaccacatggcccccacaaaagacgaattcgattgcaaagcatgggcgtatttttcagacgttgacttggagaaagatgtacattcaggacttattggtcctttgttggtgtgtcacactaacactctcaatccagcccatggcaggcaggtgacagtccaggaattcgctcttttctttaccatctttgatgagaccaagtcctggtacttcacggaaaacatggagcgcaattgcagagccccctgtaacatacagatggaggaccctacctttaaggaaaattatcggttccacgcaatcaacggatacatttgggatacactccctggccttgtgatggctcaggaccaacgaatcaggtggtacctcctcagcatgggttctaatgagaacatacactccattcacttttcaggacatgtgttcactgtccggaagaaagaagagtataagatggccctctacaatttgtatccaggcgtgtttgagaccgttgaaatgcttccctctaaagctggcatctggagagtagagtgcttgatcggagaacatcttcacgcaggtatgagcaccttgttcctcgtgtacagcaacaaatgtcagaatccacttggcatggccagtggacacattcgcgactttcagatcacagcatctggccagtatggacaatgggccccaaagttggctcgcctccattactccggtagcataaatgcgtggtccactaaagaacctttcagctggattaaggtcgatcttcttgcccccatgatcatccacggcattaagacacagggagcgaggcagaaattctcctccctctacatctcacagttcattattatgtatagtttggacggcaagaagtggcaaacttatagaggtaacagtactggaacagacatggtgttcttcggcaacgttgatagctctggcatcaaacacaacatctttaatcctcccataatagctcggtacatcagattgcatccgacccactacagcattaggagtacactccgaatggagcttatgggttgcgacttgaattcctgttcaatgccactcggaatggagtctaaagccatctctgatgcacagataaccgccagtagctactttacgaacatgtttgctacgtggtcaccctctaaggcaaggcttcatttgcaaggccggtctaatgcctggagacctcaggtgaacaacccgaaagaatggctccaggtggactttcagaagaccatgaaagtaacaggtgtcactactcagggagttaagtccttggatactagcatgtatgtgaaggagttccttatttcctcatcacaagatggccaccagtggaccctcttctttcagaatggtaaggtcaaagtgtttcagggcaatcaagacagcttcacacccgtggtgaacagtcttgatcctccactcttgacacgataccttcgaatccatccacagtcttgggagcaccagattgcattgcgcatggaagtacttggatgcgaggctcaggacctctac

SEQ ID NO: 1606 - protein, 1457 aa, synthetic construct
  REGION 1..1457: note = Variant of human B-domain deleted Factor VIII
MQIELSTCFFLCLLRFCFSATRRYYLGAVELSWDYMQSDLGELPVDARFPPRVPKSFPFNTSQVYKKTLFVEFTDHLFNIAKPRPPWMGLLGPTIQAEVYDTVVITLKNMASHPVSLHAVGVSYWKASEGAEYDDQTSQREKEDDKVFPGGSHTYVWQVLKENGPMASDPPCLTYSYLSHVDLVKDLNSGLIGALLVCREGSLAKEKTQTLAKFILLFAVFDEGKSWHSETKNSLMQDRDAASARAWPKMHTVNGYVNRTLPGLIGCHRKSVYWHVIGMGTTPEVHSIFLEGHTFLVRNHRQASLGISPITFLTAQTLLRDLGQFLLFCHIPSHQHDGMEAYVKVDSCPEEPQLRMKNNEEAEDYDDDLTDSEMDVVRFDDDNSPSIIQARSGAKKHPKTWVHYIAAEEEDWDYAPLVLAPDDRSYKSQYLNNGPQRIGRKYKKVRFMAYTDETFKTREAIQHESGILGPLLYGEVGDTLLIIFKNQASRPYNIYPHGITDVRPLYSRRLPKGVKHLKDFPILPGEIFKYKWTITVEDGPTKSDPRCLTRYYSSFVNWERDLASGLIGPLLICYKESVDQRGNQIMSDKRNVILFSVFDENRSWYLTENIQRFLPNPAGVQLEDPEFQASNIMHSINGYVFDSLQLSVCLHEVAYWYILSIGAQTDFLSVFFSGYTFKHKGVYEDTLTLFPFSGETVFMSMENPGLWILGCHNSDFRNRGMTALLKVSSCDWNTGDYYEDSYEDISAYFDSKNNAIEPRSFSQNPPVLKRHQREGTRTTLQSDQEEIDYDDTISVEMKKEDFDIYDEDENQSPRSFQKKTRHYFIAAVERLWDYGMSSSPHVLRNRAQSGSVPQFKKVVFQEFTDGSFTQPLYRGELNEHLGLLGPYIRAEVEDNIMVTFRNQASRPYSFYSSLISYEEDQRQGAEPRKNFVKPNETKTYFWKVQHHMAPTKDEFDCKAWAYFSDVDLEKDVHSGLIGPLLVCHTNTLNPAHGRQVTVQEFALFFTIFDETKSWYFTENMERNCRAPCNIQMEDPTFKENYRFHAINGYIWDTLPGLVMAQDQRIRWYLLSMGSNENIHSIHFSGHVFTVRKKEEYKMALYNLYPGVFETVEMLPSKAGIWRVECLIGEHLHAGMSTLFLVYSNKCQNPLGMASGHIRDFQITASGQYGQWAPKLARLHYSGSINAWSTKEPFSWIKVDLLAPMIIHGIKTQGARQKFSSLYISQFIIMYSLDGKKWQTYRGNSTGTDMVFFGNVDSSGIKHNIFNPPIIARYIRLHPTHYSIRSTLRMELMGCDLNSCSMPLGMESKAISDAQITASSYFTNMFATWSPSKARLHLQGRSNAWRPQVNNPKEWLQVDFQKTMKVTGVTTQGVKSLDTSMYVKEFLISSSQDGHQWTLFFQNGKVKVFQGNQDSFTPVVNSLDPPLLTRYLRIHPQSWEHQIALRMEVLGCEAQDLY

SEQ ID NO: 1607 - DNA, 4371 bp, synthetic construct
  misc_feature 1..4371: note = Variant of human B-domain deleted Factor VIII
  source 1..4371: mol_type = other DNA
atgcagattgaactgtctacctgcttcttcctctgtttgctgaggttctgctttagcgccactagacggtactaccttggcgctgtggagctgtcctgggactatatgcagagtgatttgggagagcttcccgtcgacgcacgatttcctcctcgcgttccaaagtcatttccctttaacacaagccaggtgtacaagaagacgctcttcgtcgaattcaccgatcacctgttcaatatcgccaaacccagaccaccatggatgggtcttttggggcctaccatacaagcggaggtgtatgacacagttgttatcactctcaagaacatggcttctcatccggtaagtcttcacgcagtgggcgtgtcctactggaaagcttcagaaggagccgagtatgatgatcagacatcccagagggagaaagaagacgacaaggtatttccaggtgggtctcatacctatgtgtggcaagtgctcaaagagaatggccctatggcaagcgatccgccgtgtttgacttacagctacctttcacacgttgacctcgtcaaggactgtaactccgggttgattggagccttgttggtatgcagggaaggatctcttgccaaagagaagacacagaccctggccaagtttatccttctctttgctgtgttcgatgagggcaaaagttggcatagcgaaacgaagaattccctcatgcaggatcgcgacgcagccagcgccagagcttggcccaagatgcacactgtgaacggatatgtcaataggacgcttcctggcttgattgggtgtcatcggaaaagtgtctactggcacgtgatcggaatggggacaacaccagaggtccactccatatttctcgaaggccataccttccttgttcgaaaccacagacaggcatccttggggatctctcccattacctttctcactgcccaaacgctccttcgtgacttgggtcagttccttctcttttgccatatcccgtcacaccagcatgatggtatggaagcttatgtgaaagtcgacagttgtcctgaggagccacagttgcgcatgaagaataatgaagaagccgaggattacgacgacgatctcaccgattctgagatggacgtggtgaggtttgatgacgacaactctccctccatcattcaagctcggagcggggcgaagaaacaccccaagacttgggtccactatatagcggcggaagaggaggattgggattacgctcctcttgtattggcaccagatgaccgctcatacaaaagccagtacctcaacaacggaccgcagagaattggccggaagtataagaaagtgcgatttatggcctatacagacgaaacctttaagacaagggaggccatccagcatgagagtgggattttgggacctcttctttacggcgaagttggtgataccctcctcatcatcttcaagaatcaagcttctcgcccctataacatttacccacacgggatcactgacgttaggcctttgtatagcagaagacttcccaaaggcgtgaagcatctcaaagacttccccattttgccaggcgagatctttaagtacaaatggaccattacagtggaagatggaccgactaaatcagaccctcgatgccttacgcggtactattcctccttcgtgaattgggagagagatttggcaagcggactcataggaccactcctcatctgttacaaggaatctgtagaccagaggggtaaccagattatgagtgataaacgcaatgtgatcctttttagcgtcttcgacgagaaccggtcctggtacttgaccgagaatatacaaaggttccttcccaaccccgcaggcgttcagttggaagaccctgagtttcaggccagcaatattatgcactcaatcaacggctatgtgtttgatagtctccagctttctgtttgcctccatgaagtagcctattggtacatcttgtcaattggtgctcaaacagacttcctctccgtcttcttctccggctacacctttaagcacaagggcgtgtatgaggacactctcacactctttccattttctggagaaaccgtgttcatgagcatggagaatccaggcctttggatcttgggttgccacaacagtgattttcgcaatcggggaatgactgctctcctcaaagtcagcagctgtgattggaacacaggcgactattacgaagattcttacgaggacataagtgcctactttgactccaagaataacgccattgagcccagatcattctcccagaatcctcccgtgcttaaaaggcatcagcgcgaaggtaccagaactactcttcagtctgatcaagaggagattgactatgacgacaccattagcgtggaaatgaagaaggaggatttcgatatctatgacgaagatgagaaccagtctccgcggagctttcagaagaagacgcgacactacttcattgcagcagtcgaaaggctttgggactacggtatgtcatcatcccctcatgtgttgcgcaatagagctcagagtggaagtgttccacagttcaagaaagtcgtctttcaagagtttacagatggcagcttcacacagcctctctatcggggcgagcttaacgaacatttgggactccttggtccctatatccgagccgaagtggaggacaacattatggttacctttaggaatcaagcctctcgcccctacagcttctactcctccctcatcagttatgaggaggatcagagacaaggcgctgaaccacggaagaactttgtgaaaccgaatgagacgaagacctacttctggaaagtacagcaccacatggcccccacaaaagacgaattcgattgcaaagcatgggcgtatttttcagacgttgacttggagaaagatgtacattcaggacttattggtcctttgttggtgtgtcacactaacactctcaatccagcccatggcaggcaggtgacagtccaggaattcgctcttttctttaccatctttgatgagaccaagtcctggtacttcacggaaaacatggagcgcaattgcagagccccctgtaacatacagatggaggaccctacctttaaggaaaattatcggttccacgcaatcaacggatacattatggatacactccctggccttgtgatggctcaggaccaacgaatcaggtggtacctcctcagcatgggttctaatgagaacatacactccattcacttttcaggacatgtgttcactgtccggaagaaagaagagtataagatggccctctacaatttgtatccaggcgtgtttgagaccgttgaaatgcttccctctaaagctggcatctggagagtagagtgcttgatcggagaacatcttcacgcaggtatgagcaccttgttcctcgtgtacagcaacaaatgtcagaatccacttggcatggccagtggacacattcgcgactttcagatcacagcatctggccagtatggacaatgggccccaaagttggctcgcctccattactccggtagcataaatgcgtggtccactaaagaacctttcagctggattaaggtcgatcttcttgcccccatgatcatccacggcattaagacacagggagcgaggcagaaattctcctccctctacatctcacagttcattattatgtatagtttggacggcaagaagtggcaaacttatagaggtaacagtactggaacagacatggtgttcttcggcaacgttgatagctctggcatcaaacacaacatctttaatcctcccataatagctcggtacatcagattgcatccgacccactacagcattaggagtacactccgaatggagcttatgggttgcgacttgaattcctgttcaatgccactcggaatggagtctaaagccatctctgatgcacagataaccgccagtagctactttacgaacatgtttgctacgtggtcaccctctaaggcaaggcttcatttgcaaggccggtctaatgcctggagacctcaggtgaacaacccgaaagaatggctccaggtggactttcagaagaccatgaaagtaacaggtgtcactactcagggagttaagtccttggatactagcatgtatgtgaaggagttccttatttcctcatcacaagatggccaccagtggaccctcttctttcagaatggtaaggtcaaagtgtttcagggcaatcaagacagcttcacacccgtggtgaacagtcttgatcctccactcttgacacgataccttcgaatccatccacagtcttgggagcaccagattgcattgcgcatggaagtacttggatgcgaggctcaggacctctac

SEQ ID NO: 1608 - protein, 1457 aa, synthetic construct
  REGION 1..1457: note = Variant of human B-domain deleted Factor VIII
MQIELSTCFFLCLLRFCFSATRRYYLGAVELSWDYMQSDLGELPVDARFPPRVPKSFPFNTSQVYKKTLFVEFTDHLFNIAKPRPPWMGLLGPTIQAEVYDTVVITLKNMASHPVSLHAVGVSYWKASEGAEYDDQTSQREKEDDKVFPGGSHTYVWQVLKENGPMASDPPCLTYSYLSHVDLVKDCNSGLIGALLVCREGSLAKEKTQTLAKFILLFAVFDEGKSWHSETKNSLMQDRDAASARAWPKMHTVNGYVNRTLPGLIGCHRKSVYWHVIGMGTTPEVHSIFLEGHTFLVRNHRQASLGISPITFLTAQTLLRDLGQFLLFCHIPSHQHDGMEAYVKVDSCPEEPQLRMKNNEEAEDYDDDLTDSEMDVVRFDDDNSPSIIQARSGAKKHPKTWVHYIAAEEEDWDYAPLVLAPDDRSYKSQYLNNGPQRIGRKYKKVRFMAYTDETFKTREAIQHESGILGPLLYGEVGDTLLIIFKNQASRPYNIYPHGITDVRPLYSRRLPKGVKHLKDFPILPGEIFKYKWTITVEDGPTKSDPRCLTRYYSSFVNWERDLASGLIGPLLICYKESVDQRGNQIMSDKRNVILFSVFDENRSWYLTENIQRFLPNPAGVQLEDPEFQASNIMHSINGYVFDSLQLSVCLHEVAYWYILSIGAQTDFLSVFFSGYTFKHKGVYEDTLTLFPFSGETVFMSMENPGLWILGCHNSDFRNRGMTALLKVSSCDWNTGDYYEDSYEDISAYFDSKNNAIEPRSFSQNPPVLKRHQREGTRTTLQSDQEEIDYDDTISVEMKKEDFDIYDEDENQSPRSFQKKTRHYFIAAVERLWDYGMSSSPHVLRNRAQSGSVPQFKKVVFQEFTDGSFTQPLYRGELNEHLGLLGPYIRAEVEDNIMVTFRNQASRPYSFYSSLISYEEDQRQGAEPRKNFVKPNETKTYFWKVQHHMAPTKDEFDCKAWAYFSDVDLEKDVHSGLIGPLLVCHTNTLNPAHGRQVTVQEFALFFTIFDETKSWYFTENMERNCRAPCNIQMEDPTFKENYRFHAINGYIMDTLPGLVMAQDQRIRWYLLSMGSNENIHSIHFSGHVFTVRKKEEYKMALYNLYPGVFETVEMLPSKAGIWRVECLIGEHLHAGMSTLFLVYSNKCQNPLGMASGHIRDFQITASGQYGQWAPKLARLHYSGSINAWSTKEPFSWIKVDLLAPMIIHGIKTQGARQKFSSLYISQFIIMYSLDGKKWQTYRGNSTGTDMVFFGNVDSSGIKHNIFNPPIIARYIRLHPTHYSIRSTLRMELMGCDLNSCSMPLGMESKAISDAQITASSYFTNMFATWSPSKARLHLQGRSNAWRPQVNNPKEWLQVDFQKTMKVTGVTTQGVKSLDTSMYVKEFLISSSQDGHQWTLFFQNGKVKVFQGNQDSFTPVVNSLDPPLLTRYLRIHPQSWEHQIALRMEVLGCEAQDLY

SEQ ID NO: 1609 - DNA, 4371 bp, synthetic construct
  misc_feature 1..4371: note = Variant of human B-domain deleted Factor VIII
  source 1..4371: mol_type = other DNA
atgcagattgaactgtctacctgcttcttcctctgtttgctgaggttctgctttagcgccactagacggtactaccttggcgctgtggagctgtcctgggactatatgcagagtgatttgggagagcttcccgtcgacgcacgatttcctcctcgcgttccaaagtcatttccctttaacacaagccaggtgtacaagaagacgctcttcgtcgaattcaccgatcacctgttcaatatcgccaaacccagaccaccatggatgggtcttttggggcctaccatacaagcggaggtgtatgacacagttgttatcactctcaagaacatggcttctcatccggtaagtcttcacgcagtgggcgtgtcctactggaaagcttcagaaggagccgagtatgatgatcagacatcccagagggagaaagaagacgacaaggtatttccaggtgggtctcatacctatgtgtggcaagtgctcaaagagaatggccctatggcaagcgatccgccgtgtttgacttacagctacctttcacacgttgacctcgtcaaggacctcaactccgggttgattggagccttgttggtatgcagggaaggatctcttgccaaagagaagacacagaccctggccaagtttgaacttctctttgctgtgttcgatgagggcaaaagttggcatagcgaaacgaagaattccctcatgcaggatcgcgacgcagccagcgccagagcttggcccaagatgcacactgtgaacggatatgtcaataggacgcttcctggcttgattgggtgtcatcggaaaagtgtctactggcacgtgatcggaatggggacaacaccagaggtccactccatatttctcgaaggccataccttccttgttcgaaaccacagacaggcatccttggggatctctcccattacctttctcactgcccaaacgctccttcgtgacttgggtcagttccttctcttttgccatatcccgtcacaccagcatgatggtatggaagcttatgtgaaagtcgacagttgtcctgaggagccacagttgcgcatgaagaataatgaagaagccgaggattacgacgacgatctcaccgattctgagatggacgtggtgaggtttgatgacgacaactctccctccatcattcaagctcggagcggggcgaagaaacaccccaagacttgggtccactatatagcggcggaagaggaggattgggattacgctcctcttgtattggcaccagatgaccgctcatacaaaagccagtacctcaacaacggaccgcagagaattggccggaagtataagaaagtgcgatttatggcctatacagacgaaacctttaagacaagggaggccatccagcatgagagtgggattttgggacctcttctttacggcgaagttggtgataccctcctcatcatcttcaagaatcaagcttctcgcccctataacatttacccacacgggatcactgacgttaggcctttgtatagcagaagacttcccaaaggcgtgaagcatctcaaagacttccccattttgccaggcgagatctttaagtacaaatggaccattacagtggaagatggaccgactaaatcagaccctcgatgccttacgcggtactattcctccttcgtgaattgggagagagatttggcaagcggactcataggaccactcctcatctgttacaaggaatctgtagaccagaggggtaaccagattatgagtgataaacgcaatgtgatcctttttagcgtcttcgacgagaaccggtcctggtacttgaccgagaatatacaaaggttccttcccaaccccgcaggcgttcagttggaagaccctgagtttcaggccagcaatattatgcactcaatcaacggctatgtgtttgatagtctccagctttctgtttgcctccatgaagtagcctattggtacatcttgtcaattggtgctcaaacagacttcctctccgtcttcttctccggctacacctttaagcacaagggcgtgtatgaggacactctcacactctttccattttctggagaaaccgtgttcatgagcatggagaatccaggcctttggatcttgggttgccacaacagtgattttcgcaatcggggaatgactgctctcctcaaagtcagcagctgtgattggaacacaggcgactattacgaagattcttacgaggacataagtgcctactttgactccaagaataacgccattgagcccagatcattctcccagaatcctcccgtgcttaaaaggcatcagcgcgaaggtaccagaactactcttcagtctgatcaagaggagattgactatgacgacaccattagcgtggaaatgaagaaggaggatttcgatatctatgacgaagatgagaaccagtctccgcggagctttcagaagaagacgcgacactacttcattgcagcagtcgaaaggctttgggactacggtatgtcatcatcccctcatgtgttgcgcaatagagctcagagtggaagtgttccacagttcaagaaagtcgtctttcaagagtttacagatggcagcttcacacagcctctctatcggggcgagcttaacgaacatttgggactccttggtccctatatccgagccgaagtggaggacaacattatggttacctttaggaatcaagcctctcgcccctacagcttctactcctccctcatcagttatgaggaggatcagagacaaggcgctgaaccacggaagaactttgtgaaaccgaatgagacgaagacctacttctggaaagtacagcaccacatggcccccacaaaagacgaattcgattgcaaagcatgggcgtatttttcagacgttgacttggagaaagatgtacattcaggacttattggtcctttgttggtgtgtcacactaacactctcaatccagcccatggcaggcaggtgacagtccaggaattcgctcttttctttaccatctttgatgagaccaagtcctggtacttcacggaaaacatggagcgcaattgcagagccccctgtaacatacagatggaggaccctacctttaaggaaaattatcggttccacgcaatcaacggatacattatggatacactccctggccttgtgatggctcaggaccaacgaatcaggtggtacctcctcagcatgggttctaatgagaacatacactccattcacttttcaggacatgtgttcactgtccggaagaaagaagagtataagatggccctctacaatttgtatccaggcgtgtttgagaccgttgaaatgcttccctctaaagctggcatctggagagtagagtgcttgatcggagaacatcttcacgcaggtatgagcaccttgttcctcgtgtacagcaacaaatgtcagaatccacttggcatggccagtggacacattcgcgactttcagatcacagcatctggccagtatggacaatgggccccaaagttggctcgcctccattactccggtagcataaatgcgtggtccactaaagaacctttcagctggattaaggtcgatcttcttgcccccatgatcatccacggcattaagacacagggagcgaggcagaaattctcctccctctacatctcacagttcattattatgtatagtttggacggcaagaagtggcaaacttatagaggtaacagtactggaacagacatggtgttcttcggcaacgttgatagctctggcatcaaacacaacatctttaatcctcccataatagctcggtacatcagattgcatccgacccactacagcattaggagtacactccgaatggagcttatgggttgcgacttgaattcctgttcaatgccactcggaatggagtctaaagccatctctgatgcacagataaccgccagtagctactttacgaacatgtttgctacgtggtcaccctctaaggcaaggcttcatttgcaaggccggtctaatgcctggagacctcaggtgaacaacccgaaagaatggctccaggtggactttcagaagaccatgaaagtaacaggtgtcactactcagggagttaagtccttggatactagcatgtatgtgaaggagttccttatttcctcatcacaagatggccaccagtggaccctcttctttcagaatggtaaggtcaaagtgtttcagggcaatcaagacagcttcacacccgtggtgaacagtcttgatcctccactcttgacacgataccttcgaatccatccacagtcttgggagcaccagattgcattgcgcatggaagtacttggatgcgaggctcaggacctctac

SEQ ID NO: 1610 - protein, 1457 aa, synthetic construct
  REGION 1..1457: note = Variant of human B-domain deleted Factor VIII
MQIELSTCFFLCLLRFCFSATRRYYLGAVELSWDYMQSDLGELPVDARFPPRVPKSFPFNTSQVYKKTLFVEFTDHLFNIAKPRPPWMGLLGPTIQAEVYDTVVITLKNMASHPVSLHAVGVSYWKASEGAEYDDQTSQREKEDDKVFPGGSHTYVWQVLKENGPMASDPPCLTYSYLSHVDLVKDLNSGLIGALLVCREGSLAKEKTQTLAKFELLFAVFDEGKSWHSETKNSLMQDRDAASARAWPKMHTVNGYVNRTLPGLIGCHRKSVYWHVIGMGTTPEVHSIFLEGHTFLVRNHRQASLGISPITFLTAQTLLRDLGQFLLFCHIPSHQHDGMEAYVKVDSCPEEPQLRMKNNEEAEDYDDDLTDSEMDVVRFDDDNSPSIIQARSGAKKHPKTWVHYIAAEEEDWDYAPLVLAPDDRSYKSQYLNNGPQRIGRKYKKVRFMAYTDETFKTREAIQHESGILGPLLYGEVGDTLLIIFKNQASRPYNIYPHGITDVRPLYSRRLPKGVKHLKDFPILPGEIFKYKWTITVEDGPTKSDPRCLTRYYSSFVNWERDLASGLIGPLLICYKESVDQRGNQIMSDKRNVILFSVFDENRSWYLTENIQRFLPNPAGVQLEDPEFQASNIMHSINGYVFDSLQLSVCLHEVAYWYILSIGAQTDFLSVFFSGYTFKHKGVYEDTLTLFPFSGETVFMSMENPGLWILGCHNSDFRNRGMTALLKVSSCDWNTGDYYEDSYEDISAYFDSKNNAIEPRSFSQNPPVLKRHQREGTRTTLQSDQEEIDYDDTISVEMKKEDFDIYDEDENQSPRSFQKKTRHYFIAAVERLWDYGMSSSPHVLRNRAQSGSVPQFKKVVFQEFTDGSFTQPLYRGELNEHLGLLGPYIRAEVEDNIMVTFRNQASRPYSFYSSLISYEEDQRQGAEPRKNFVKPNETKTYFWKVQHHMAPTKDEFDCKAWAYFSDVDLEKDVHSGLIGPLLVCHTNTLNPAHGRQVTVQEFALFFTIFDETKSWYFTENMERNCRAPCNIQMEDPTFKENYRFHAINGYIMDTLPGLVMAQDQRIRWYLLSMGSNENIHSIHFSGHVFTVRKKEEYKMALYNLYPGVFETVEMLPSKAGIWRVECLIGEHLHAGMSTLFLVYSNKCQNPLGMASGHIRDFQITASGQYGQWAPKLARLHYSGSINAWSTKEPFSWIKVDLLAPMIIHGIKTQGARQKFSSLYISQFIIMYSLDGKKWQTYRGNSTGTDMVFFGNVDSSGIKHNIFNPPIIARYIRLHPTHYSIRSTLRMELMGCDLNSCSMPLGMESKAISDAQITASSYFTNMFATWSPSKARLHLQGRSNAWRPQVNNPKEWLQVDFQKTMKVTGVTTQGVKSLDTSMYVKEFLISSSQDGHQWTLFFQNGKVKVFQGNQDSFTPVVNSLDPPLLTRYLRIHPQSWEHQIALRMEVLGCEAQDLY

SEQ ID NO: 1611 - DNA, 4371 bp, synthetic construct
  misc_feature 1..4371: note = Variant of human B-domain deleted Factor VIII
  source 1..4371: mol_type = other DNA
atgcagattgaactgtctacctgcttcttcctctgtttgctgaggttctgctttagcgccactagacggtactaccttggcgctgtggagctgtcctgggactatatgcagagtgatttgggagagcttcccgtcgacgcacgatttcctcctcgcgttccaaagtcatttccctttaacacaagccaggtgtacaagaagacgctcttcgtcgaattcaccgatcacctgttcaatatcgccaaacccagaccaccatggatgggtcttttggggcctaccatacaagcggaggtgtatgacacagttgttatcactctcaagaacatggcttctcatccggtaagtcttcacgcagtgggcgtgtcctactggaaagcttcagaaggagccgagtatgatgatcagacatcccagagggagaaagaagacgacaaggtatttccaggtgggtctcatacctatgtgtggcaagtgctcaaagagaatggccctatggcaagcgatccgccgtgtttgacttacagctacctttcacacgttgacctcgtcaaggacctcaactccgggttgattggagccttgttggtatgcagggaaggatctcttgccaaagagaagacacagaccctggccaagtttccgcttctctttgctgtgttcgatgagggcaaaagttggcatagcgaaacgaagaattccctcatgcaggatcgcgacgcagccagcgccagagcttggcccaagatgcacactgtgaacggatatgtcaataggacgcttcctggcttgattgggtgtcatcggaaaagtgtctactggcacgtgatcggaatggggacaacaccagaggtccactccatatttctcgaaggccataccttccttgttcgaaaccacagacaggcatccttggggatctctcccattacctttctcactgcccaaacgctccttcgtgacttgggtcagttccttctcttttgccatatcccgtcacaccagcatgatggtatggaagcttatgtgaaagtcgacagttgtcctgaggagccacagttgcgcatgaagaataatgaagaagccgaggattacgacgacgatctcaccgattctgagatggacgtggtgaggtttgatgacgacaactctccctccatcattcaagctcggagcggggcgaagaaacaccccaagacttgggtccactatatagcggcggaagaggaggattgggattacgctcctcttgtattggcaccagatgaccgctcatacaaaagccagtacctcaacaacggaccgcagagaattggccggaagtataagaaagtgcgatttatggcctatacagacgaaacctttaagacaagggaggccatccagcatgagagtgggattttgggacctcttctttacggcgaagttggtgataccctcctcatcatcttcaagaatcaagcttctcgcccctataacatttacccacacgggatcactgacgttaggcctttgtatagcagaagacttcccaaaggcgtgaagcatctcaaagacttccccattttgccaggcgagatctttaagtacaaatggaccattacagtggaagatggaccgactaaatcagaccctcgatgccttacgcggtactattcctccttcgtgaattgggagagagatttggcaagcggactcataggaccactcctcatctgttacaaggaatctgtagaccagaggggtaaccagattatgagtgataaacgcaatgtgatcctttttagcgtcttcgacgagaaccggtcctggtacttgaccgagaatatacaaaggttccttcccaaccccgcaggcgttcagttggaagaccctgagtttcaggccagcaatattatgcactcaatcaacggctatgtgtttgatagtctccagctttctgtttgcctccatgaagtagcctattggtacatcttgtcaattggtgctcaaacagacttcctctccgtcttcttctccggctacacctttaagcacaagggcgtgtatgaggacactctcacactctttccattttctggagaaaccgtgttcatgagcatggagaatccaggcctttggatcttgggttgccacaacagtgattttcgcaatcggggaatgactgctctcctcaaagtcagcagctgtgattggaacacaggcgactattacgaagattcttacgaggacataagtgcctactttgactccaagaataacgccattgagcccagatcattctcccagaatcctcccgtgcttaaaaggcatcagcgcgaaggtaccagaactactcttcagtctgatcaagaggagattgactatgacgacaccattagcgtggaaatgaagaaggaggatttcgatatctatgacgaagatgagaaccagtctccgcggagctttcagaagaagacgcgacactacttcattgcagcagtcgaaaggctttgggactacggtatgtcatcatcccctcatgtgttgcgcaatagagctcagagtggaagtgttccacagttcaagaaagtcgtctttcaagagtttacagatggcagcttcacacagcctctctatcggggcgagcttaacgaacatttgggactccttggtccctatatccgagccgaagtggaggacaacattatggttacctttaggaatcaagcctctcgcccctacagcttctactcctccctcatcagttatgaggaggatcagagacaaggcgctgaaccacggaagaactttgtgaaaccgaatgagacgaagacctacttctggaaagtacagcaccacatggcccccacaaaagacgaattcgattgcaaagcatgggcgtatttttcagacgttgacttggagaaagatgtacattcaggacttattggtcctttgttggtgtgtcacactaacactctcaatccagcccatggcaggcaggtgacagtccaggaattcgctcttttctttaccatctttgatgagaccaagtcctggtacttcacggaaaacatggagcgcaattgcagagccccctgtaacatacagatggaggaccctacctttaaggaaaattatcggttccacgcaatcaacggatacattatggatacactccctggccttgtgatggctcaggaccaacgaatcaggtggtacctcctcagcatgggttctaatgagaacatacactccattcacttttcaggacatgtgttcactgtccggaagaaagaagagtataagatggccctctacaatttgtatccaggcgtgtttgagaccgttgaaatgcttccctctaaagctggcatctggagagtagagtgcttgatcggagaacatcttcacgcaggtatgagcaccttgttcctcgtgtacagcaacaaatgtcagaatccacttggcatggccagtggacacattcgcgactttcagatcacagcatctggccagtatggacaatgggccccaaagttggctcgcctccattactccggtagcataaatgcgtggtccactaaagaacctttcagctggattaaggtcgatcttcttgcccccatgatcatccacggcattaagacacagggagcgaggcagaaattctcctccctctacatctcacagttcattattatgtatagtttggacggcaagaagtggcaaacttatagaggtaacagtactggaacagacatggtgttcttcggcaacgttgatagctctggcatcaaacacaacatctttaatcctcccataatagctcggtacatcagattgcatccgacccactacagcattaggagtacactccgaatggagcttatgggttgcgacttgaattcctgttcaatgccactcggaatggagtctaaagccatctctgatgcacagataaccgccagtagctactttacgaacatgtttgctacgtggtcaccctctaaggcaaggcttcatttgcaaggccggtctaatgcctggagacctcaggtgaacaacccgaaagaatggctccaggtggactttcagaagaccatgaaagtaacaggtgtcactactcagggagttaagtccttggatactagcatgtatgtgaaggagttccttatttcctcatcacaagatggccaccagtggaccctcttctttcagaatggtaaggtcaaagtgtttcagggcaatcaagacagcttcacacccgtggtgaacagtcttgatcctccactcttgacacgataccttcgaatccatccacagtcttgggagcaccagattgcattgcgcatggaagtacttggatgcgaggctcaggacctctac

SEQ ID NO: 1612 - protein, 1457 aa, synthetic construct
  REGION 1..1457: note = Variant of human B-domain deleted Factor VIII
MQIELSTCFFLCLLRFCFSATRRYYLGAVELSWDYMQSDLGELPVDARFPPRVPKSFPFNTSQVYKKTLFVEFTDHLFNIAKPRPPWMGLLGPTIQAEVYDTVVITLKNMASHPVSLHAVGVSYWKASEGAEYDDQTSQREKEDDKVFPGGSHTYVWQVLKENGPMASDPPCLTYSYLSHVDLVKDLNSGLIGALLVCREGSLAKEKTQTLAKFPLLFAVFDEGKSWHSETKNSLMQDRDAASARAWPKMHTVNGYVNRTLPGLIGCHRKSVYWHVIGMGTTPEVHSIFLEGHTFLVRNHRQASLGISPITFLTAQTLLRDLGQFLLFCHIPSHQHDGMEAYVKVDSCPEEPQLRMKNNEEAEDYDDDLTDSEMDVVRFDDDNSPSIIQARSGAKKHPKTWVHYIAAEEEDWDYAPLVLAPDDRSYKSQYLNNGPQRIGRKYKKVRFMAYTDETFKTREAIQHESGILGPLLYGEVGDTLLIIFKNQASRPYNIYPHGITDVRPLYSRRLPKGVKHLKDFPILPGEIFKYKWTITVEDGPTKSDPRCLTRYYSSFVNWERDLASGLIGPLLICYKESVDQRGNQIMSDKRNVILFSVFDENRSWYLTENIQRFLPNPAGVQLEDPEFQASNIMHSINGYVFDSLQLSVCLHEVAYWYILSIGAQTDFLSVFFSGYTFKHKGVYEDTLTLFPFSGETVFMSMENPGLWILGCHNSDFRNRGMTALLKVSSCDWNTGDYYEDSYEDISAYFDSKNNAIEPRSFSQNPPVLKRHQREGTRTTLQSDQEEIDYDDTISVEMKKEDFDIYDEDENQSPRSFQKKTRHYFIAAVERLWDYGMSSSPHVLRNRAQSGSVPQFKKVVFQEFTDGSFTQPLYRGELNEHLGLLGPYIRAEVEDNIMVTFRNQASRPYSFYSSLISYEEDQRQGAEPRKNFVKPNETKTYFWKVQHHMAPTKDEFDCKAWAYFSDVDLEKDVHSGLIGPLLVCHTNTLNPAHGRQVTVQEFALFFTIFDETKSWYFTENMERNCRAPCNIQMEDPTFKENYRFHAINGYIMDTLPGLVMAQDQRIRWYLLSMGSNENIHSIHFSGHVFTVRKKEEYKMALYNLYPGVFETVEMLPSKAGIWRVECLIGEHLHAGMSTLFLVYSNKCQNPLGMASGHIRDFQITASGQYGQWAPKLARLHYSGSINAWSTKEPFSWIKVDLLAPMIIHGIKTQGARQKFSSLYISQFIIMYSLDGKKWQTYRGNSTGTDMVFFGNVDSSGIKHNIFNPPIIARYIRLHPTHYSIRSTLRMELMGCDLNSCSMPLGMESKAISDAQITASSYFTNMFATWSPSKARLHLQGRSNAWRPQVNNPKEWLQVDFQKTMKVTGVTTQGVKSLDTSMYVKEFLISSSQDGHQWTLFFQNGKVKVFQGNQDSFTPVVNSLDPPLLTRYLRIHPQSWEHQIALRMEVLGCEAQDLY

SEQ ID NO: 1613 - DNA, 4371 bp, synthetic construct
  misc_feature 1..4371: note = Variant of human B-domain deleted Factor VIII
  source 1..4371: mol_type = other DNA
atgcagattgaactgtctacctgcttcttcctctgtttgctgaggttctgctttagcgccactagacggtactaccttggcgctgtggagctgtcctgggactatatgcagagtgatttgggagagcttcccgtcgacgcacgatttcctcctcgcgttccaaagtcatttccctttaacacaagccaggtgtacaagaagacgctcttcgtcgaattcaccgatcacctgttcaatatcgccaaacccagaccaccatggatgggtcttttggggcctaccatacaagcggaggtgtatgacacagttgttatcactctcaagaacatggcttctcatccggtaagtcttcacgcagtgggcgtgtcctactggaaagcttcagaaggagccgagtatgatgatcagacatcccagagggagaaagaagacgacaaggtatttccaggtgggtctcatacctatgtgtggcaagtgctcaaagagaatggccctatggcaagcgatccgccgtgtttgacttacagctacctttcacacgttgacctcgtcaaggacctcaactccgggttgattggagccttgttggtatgcagggaaggatctcttgccaaagagaagacacagaccctggccaagtttagtcttctctttgctgtgttcgatgagggcaaaagttggcatagcgaaacgaagaattccctcatgcaggatcgcgacgcagccagcgccagagcttggcccaagatgcacactgtgaacggatatgtcaataggacgcttcctggcttgattgggtgtcatcggaaaagtgtctactggcacgtgatcggaatggggacaacaccagaggtccactccatatttctcgaaggccataccttccttgttcgaaaccacagacaggcatccttggggatctctcccattacctttctcactgcccaaacgctccttcgtgacttgggtcagttccttctcttttgccatatcccgtcacaccagcatgatggtatggaagcttatgtgaaagtcgacagttgtcctgaggagccacagttgcgcatgaagaataatgaagaagccgaggattacgacgacgatctcaccgattctgagatggacgtggtgaggtttgatgacgacaactctccctccatcattcaagctcggagcggggcgaagaaacaccccaagacttgggtccactatatagcggcggaagaggaggattgggattacgctcctcttgtattggcaccagatgaccgctcatacaaaagccagtacctcaacaacggaccgcagagaattggccggaagtataagaaagtgcgatttatggcctatacagacgaaacctttaagacaagggaggccatccagcatgagagtgggattttgggacctcttctttacggcgaagttggtgataccctcctcatcatcttcaagaatcaagcttctcgcccctataacatttacccacacgggatcactgacgttaggcctttgtatagcagaagacttcccaaaggcgtgaagcatctcaaagacttccccattttgccaggcgagatctttaagtacaaatggaccattacagtggaagatggaccgactaaatcagaccctcgatgccttacgcggtactattcctccttcgtgaattgggagagagatttggcaagcggactcataggaccactcctcatctgttacaaggaatctgtagaccagaggggtaaccagattatgagtgataaacgcaatgtgatcctttttagcgtcttcgacgagaaccggtcctggtacttgaccgagaatatacaaaggttccttcccaaccccgcaggcgttcagttggaagaccctgagtttcaggccagcaatattatgcactcaatcaacggctatgtgtttgatagtctccagctttctgtttgcctccatgaagtagcctattggtacatcttgtcaattggtgctcaaacagacttcctctccgtcttcttctccggctacacctttaagcacaagggcgtgtatgaggacactctcacactctttccattttctggagaaaccgtgttcatgagcatggagaatccaggcctttggatcttgggttgccacaacagtgattttcgcaatcggggaatgactgctctcctcaaagtcagcagctgtgattggaacacaggcgactattacgaagattcttacgaggacataagtgcctactttgactccaagaataacgccattgagcccagatcattctcccagaatcctcccgtgcttaaaaggcatcagcgcgaaggtaccagaactactcttcagtctgatcaagaggagattgactatgacgacaccattagcgtggaaatgaagaaggaggatttcgatatctatgacgaagatgagaaccagtctccgcggagctttcagaagaagacgcgacactacttcattgcagcagtcgaaaggctttgggactacggtatgtcatcatcccctcatgtgttgcgcaatagagctcagagtggaagtgttccacagttcaagaaagtcgtctttcaagagtttacagatggcagcttcacacagcctctctatcggggcgagcttaacgaacatttgggactccttggtccctatatccgagccgaagtggaggacaacattatggttacctttaggaatcaagcctctcgcccctacagcttctactcctccctcatcagttatgaggaggatcagagacaaggcgctgaaccacggaagaactttgtgaaaccgaatgagacgaagacctacttctggaaagtacagcaccacatggcccccacaaaagacgaattcgattgcaaagcatgggcgtatttttcagacgttgacttggagaaagatgtacattcaggacttattggtcctttgttggtgtgtcacactaacactctcaatccagcccatggcaggcaggtgacagtccaggaattcgctcttttctttaccatctttgatgagaccaagtcctggtacttcacggaaaacatggagcgcaattgcagagccccctgtaacatacagatggaggaccctacctttaaggaaaattatcggttccacgcaatcaacggatacattatggatacactccctggccttgtgatggctcaggaccaacgaatcaggtggtacctcctcagcatgggttctaatgagaacatacactccattcacttttcaggacatgtgttcactgtccggaagaaagaagagtataagatggccctctacaatttgtatccaggcgtgtttgagaccgttgaaatgcttccctctaaagctggcatctggagagtagagtgcttgatcggagaacatcttcacgcaggtatgagcaccttgttcctcgtgtacagcaacaaatgtcagaatccacttggcatggccagtggacacattcgcgactttcagatcacagcatctggccagtatggacaatgggccccaaagttggctcgcctccattactccggtagcataaatgcgtggtccactaaagaacctttcagctggattaaggtcgatcttcttgcccccatgatcatccacggcattaagacacagggagcgaggcagaaattctcctccctctacatctcacagttcattattatgtatagtttggacggcaagaagtggcaaacttatagaggtaacagtactggaacagacatggtgttcttcggcaacgttgatagctctggcatcaaacacaacatctttaatcctcccataatagctcggtacatcagattgcatccgacccactacagcattaggagtacactccgaatggagcttatgggttgcgacttgaattcctgttcaatgccactcggaatggagtctaaagccatctctgatgcacagataaccgccagtagctactttacgaacatgtttgctacgtggtcaccctctaaggcaaggcttcatttgcaaggccggtctaatgcctggagacctcaggtgaacaacccgaaagaatggctccaggtggactttcagaagaccatgaaagtaacaggtgtcactactcagggagttaagtccttggatactagcatgtatgtgaaggagttccttatttcctcatcacaagatggccaccagtggaccctcttctttcagaatggtaaggtcaaagtgtttcagggcaatcaagacagcttcacacccgtggtgaacagtcttgatcctccactcttgacacgataccttcgaatccatccacagtcttgggagcaccagattgcattgcgcatggaagtacttggatgcgaggctcaggacctctac

SEQ ID NO: 1614 - protein, 1457 aa, synthetic construct
  REGION 1..1457: note = Variant of human B-domain deleted Factor VIII
MQIELSTCFFLCLLRFCFSATRRYYLGAVELSWDYMQSDLGELPVDARFPPRVPKSFPFNTSQVYKKTLFVEFTDHLFNIAKPRPPWMGLLGPTIQAEVYDTVVITLKNMASHPVSLHAVGVSYWKASEGAEYDDQTSQREKEDDKVFPGGSHTYVWQVLKENGPMASDPPCLTYSYLSHVDLVKDLNSGLIGALLVCREGSLAKEKTQTLAKFSLLFAVFDEGKSWHSETKNSLMQDRDAASARAWPKMHTVNGYVNRTLPGLIGCHRKSVYWHVIGMGTTPEVHSIFLEGHTFLVRNHRQASLGISPITFLTAQTLLRDLGQFLLFCHIPSHQHDGMEAYVKVDSCPEEPQLRMKNNEEAEDYDDDLTDSEMDVVRFDDDNSPSIIQARSGAKKHPKTWVHYIAAEEEDWDYAPLVLAPDDRSYKSQYLNNGPQRIGRKYKKVRFMAYTDETFKTREAIQHESGILGPLLYGEVGDTLLIIFKNQASRPYNIYPHGITDVRPLYSRRLPKGVKHLKDFPILPGEIFKYKWTITVEDGPTKSDPRCLTRYYSSFVNWERDLASGLIGPLLICYKESVDQRGNQIMSDKRNVILFSVFDENRSWYLTENIQRFLPNPAGVQLEDPEFQASNIMHSINGYVFDSLQLSVCLHEVAYWYILSIGAQTDFLSVFFSGYTFKHKGVYEDTLTLFPFSGETVFMSMENPGLWILGCHNSDFRNRGMTALLKVSSCDWNTGDYYEDSYEDISAYFDSKNNAIEPRSFSQNPPVLKRHQREGTRTTLQSDQEEIDYDDTISVEMKKEDFDIYDEDENQSPRSFQKKTRHYFIAAVERLWDYGMSSSPHVLRNRAQSGSVPQFKKVVFQEFTDGSFTQPLYRGELNEHLGLLGPYIRAEVEDNIMVTFRNQASRPYSFYSSLISYEEDQRQGAEPRKNFVKPNETKTYFWKVQHHMAPTKDEFDCKAWAYFSDVDLEKDVHSGLIGPLLVCHTNTLNPAHGRQVTVQEFALFFTIFDETKSWYFTENMERNCRAPCNIQMEDPTFKENYRFHAINGYIMDTLPGLVMAQDQRIRWYLLSMGSNENIHSIHFSGHVFTVRKKEEYKMALYNLYPGVFETVEMLPSKAGIWRVECLIGEHLHAGMSTLFLVYSNKCQNPLGMASGHIRDFQITASGQYGQWAPKLARLHYSGSINAWSTKEPFSWIKVDLLAPMIIHGIKTQGARQKFSSLYISQFIIMYSLDGKKWQTYRGNSTGTDMVFFGNVDSSGIKHNIFNPPIIARYIRLHPTHYSIRSTLRMELMGCDLNSCSMPLGMESKAISDAQITASSYFTNMFATWSPSKARLHLQGRSNAWRPQVNNPKEWLQVDFQKTMKVTGVTTQGVKSLDTSMYVKEFLISSSQDGHQWTLFFQNGKVKVFQGNQDSFTPVVNSLDPPLLTRYLRIHPQSWEHQIALRMEVLGCEAQDLY

SEQ ID NO: 1615 - DNA, 4371 bp, synthetic construct
  misc_feature 1..4371: note = Variant of human B-domain deleted Factor VIII
  source 1..4371: mol_type = other DNA
atgcagattgaactgtctacctgcttcttcctctgtttgctgaggttctgctttagcgccactagacggtactaccttggcgctgtggagctgtcctgggactatatgcagagtgatttgggagagcttcccgtcgacgcacgatttcctcctcgcgttccaaagtcatttccctttaacacaagccaggtgtacaagaagacgctcttcgtcgaattcaccgatcacctgttcaatatcgccaaacccagaccaccatggatgggtcttttggggcctaccatacaagcggaggtgtatgacacagttgttatcactctcaagaacatggcttctcatccggtaagtcttcacgcagtgggcgtgtcctactggaaagcttcagaaggagccgagtatgatgatcagacatcccagagggagaaagaagacgacaaggtatttccaggtgggtctcatacctatgtgtggcaagtgctcaaagagaatggccctatggcaagcgatccgccgtgtttgacttacagctactgttcacacgttgacctcgtcaaggacctcaactccgggttgattggagccttgttggtatgcagggaaggatctcttgccaaagagaagacacagaccctggccaagtttatccttctctttgctgtgttcgatgagggcaaaagttggcatagcgaaacgaagaattccctcatgcaggatcgcgacgcagccagcgccagagcttggcccaagatgcacactgtgaacggatatgtcaataggacgcttcctggcttgattgggtgtcatcggaaaagtgtctactggcacgtgatcggaatggggacaacaccagaggtccactccatatttctcgaaggccataccttccttgttcgaaaccacagacaggcatccttggggatctctcccattacctttctcactgcccaaacgctccttcgtgacttgggtcagttccttctcttttgccatatcccgtcacaccagcatgatggtatggaagcttatgtgaaagtcgacagttgtcctgaggagccacagttgcgcatgaagaataatgaagaagccgaggattacgacgacgatctcaccgattctgagatggacgtggtgaggtttgatgacgacaactctccctccatcattcaagctcggagcggggcgaagaaacaccccaagacttgggtccactatatagcggcggaagaggaggattgggattacgctcctcttgtattggcaccagatgaccgctcatacaaaagccagtacctcaacaacggaccgcagagaattggccggaagtataagaaagtgcgatttatggcctatacagacgaaacctttaagacaagggaggccatccagcatgagagtgggattttgggacctcttctttacggcgaagttggtgataccctcctcatcatcttcaagaatcaagcttctcgcccctataacatttacccacacgggatcactgacgttaggcctttgtatagcagaagacttcccaaaggcgtgaagcatctcaaagacttccccattttgccaggcgagatctttaagtacaaatggaccattacagtggaagatggaccgactaaatcagaccctcgatgccttacgcggtactattcctccttcgtgaattgggagagagatttggcaagcggactcataggaccactcctcatctgttacaaggaatctgtagaccagaggggtaaccagattatgagtgataaacgcaatgtgatcctttttagcgtcttcgacgagaaccggtcctggtacttgaccgagaatatacaaaggttccttcccaaccccgcaggcgttcagttggaagaccctgagtttcaggccagcaatattatgcactcaatcaacggctatgtgtttgatagtctccagctttctgtttgcctccatgaagtagcctattggtacatcttgtcaattggtgctcaaacagacttcctctccgtcttcttctccggctacacctttaagcacaagggcgtgtatgaggacactctcacactctttccattttctggagaaaccgtgttcatgagcatggagaatccaggcctttggatcttgggttgccacaacagtgattttcgcaatcggggaatgactgctctcctcaaagtcagcagctgtgattggaacacaggcgactattacgaagattcttacgaggacataagtgcctactttgactccaagaataacgccattgagcccagatcattctcccagaatcctcccgtgcttaaaaggcatcagcgcgaaggtaccagaactactcttcagtctgatcaagaggagattgactatgacgacaccattagcgtggaaatgaagaaggaggatttcgatatctatgacgaagatgagaaccagtctccgcggagctttcagaagaagacgcgacactacttcattgcagcagtcgaaaggctttgggactacggtatgtcatcatcccctcatgtgttgcgcaatagagctcagagtggaagtgttccacagttcaagaaagtcgtctttcaagagtttacagatggcagcttcacacagcctctctatcggggcgagcttaacgaacatttgggactccttggtccctatatccgagccgaagtggaggacaacattatggttacctttaggaatcaagcctctcgcccctacagcttctactcctccctcatcagttatgaggaggatcagagacaaggcgctgaaccacggaagaactttgtgaaaccgaatgagacgaagacctacttctggaaagtacagcaccacatggcccccacaaaagacgaattcgattgcaaagcatgggcgtatttttcagacgttgacttggagaaagatgtacattcaggacttattggtcctttgttggtgtgtcacactaacactctcaatccagcccatggcaggcaggtgacagtccaggaattcgctcttttctttaccatctttgatgagaccaagtcctggtacttcacggaaaacatggagcgcaattgcagagccccctgtaacatacagatggaggaccctacctttaaggaaaattatcggttccacgcaatcaacggatacattatggatacactccctggccttgtgatggctcaggaccaacgaatcaggtggtacctcctcagcatgggttctaatgagaacatacactccattcacttttcaggacatgtgttcactgtccggaagaaagaagagtataagatggccctctacaatttgtatccaggcgtgtttgagaccgttgaaatgcttccctctaaagctggcatctggagagtagagtgcttgatcggagaacatcttcacgcaggtatgagcaccttgttcctcgtgtacagcaacaaatgtcagaatccacttggcatggccagtggacacattcgcgactttcagatcacagcatctggccagtatggacaatgggccccaaagttggctcgcctccattactccggtagcataaatgcgtggtccactaaagaacctttcagctggattaaggtcgatcttcttgcccccatgatcatccacggcattaagacacagggagcgaggcagaaattctcctccctctacatctcacagttcattattatgtatagtttggacggcaagaagtggcaaacttatagaggtaacagtactggaacagacatggtgttcttcggcaacgttgatagctctggcatcaaacacaacatctttaatcctcccataatagctcggtacatcagattgcatccgacccactacagcattaggagtacactccgaatggagcttatgggttgcgacttgaattcctgttcaatgccactcggaatggagtctaaagccatctctgatgcacagataaccgccagtagctactttacgaacatgtttgctacgtggtcaccctctaaggcaaggcttcatttgcaaggccggtctaatgcctggagacctcaggtgaacaacccgaaagaatggctccaggtggactttcagaagaccatgaaagtaacaggtgtcactactcagggagttaagtccttggatactagcatgtatgtgaaggagttccttatttcctcatcacaagatggccaccagtggaccctcttctttcagaatggtaaggtcaaagtgtttcagggcaatcaagacagcttcacacccgtggtgaacagtcttgatcctccactcttgacacgataccttcgaatccatccacagtcttgggagcaccagattgcattgcgcatggaagtacttggatgcgaggctcaggacctctac

SEQ ID NO: 1616 - protein, 1457 aa, synthetic construct
  REGION 1..1457: note = Variant of human B-domain deleted Factor VIII
MQIELSTCFFLCLLRFCFSATRRYYLGAVELSWDYMQSDLGELPVDARFPPRVPKSFPFNTSQVYKKTLFVEFTDHLFNIAKPRPPWMGLLGPTIQAEVYDTVVITLKNMASHPVSLHAVGVSYWKASEGAEYDDQTSQREKEDDKVFPGGSHTYVWQVLKENGPMASDPPCLTYSYCSHVDLVKDLNSGLIGALLVCREGSLAKEKTQTLAKFILLFAVFDEGKSWHSETKNSLMQDRDAASARAWPKMHTVNGYVNRTLPGLIGCHRKSVYWHVIGMGTTPEVHSIFLEGHTFLVRNHRQASLGISPITFLTAQTLLRDLGQFLLFCHIPSHQHDGMEAYVKVDSCPEEPQLRMKNNEEAEDYDDDLTDSEMDVVRFDDDNSPSIIQARSGAKKHPKTWVHYIAAEEEDWDYAPLVLAPDDRSYKSQYLNNGPQRIGRKYKKVRFMAYTDETFKTREAIQHESGILGPLLYGEVGDTLLIIFKNQASRPYNIYPHGITDVRPLYSRRLPKGVKHLKDFPILPGEIFKYKWTITVEDGPTKSDPRCLTRYYSSFVNWERDLASGLIGPLLICYKESVDQRGNQIMSDKRNVILFSVFDENRSWYLTENIQRFLPNPAGVQLEDPEFQASNIMHSINGYVFDSLQLSVCLHEVAYWYILSIGAQTDFLSVFFSGYTFKHKGVYEDTLTLFPFSGETVFMSMENPGLWILGCHNSDFRNRGMTALLKVSSCDWNTGDYYEDSYEDISAYFDSKNNAIEPRSFSQNPPVLKRHQREGTRTTLQSDQEEIDYDDTISVEMKKEDFDIYDEDENQSPRSFQKKTRHYFIAAVERLWDYGMSSSPHVLRNRAQSGSVPQFKKVVFQEFTDGSFTQPLYRGELNEHLGLLGPYIRAEVEDNIMVTFRNQASRPYSFYSSLISYEEDQRQGAEPRKNFVKPNETKTYFWKVQHHMAPTKDEFDCKAWAYFSDVDLEKDVHSGLIGPLLVCHTNTLNPAHGRQVTVQEFALFFTIFDETKSWYFTENMERNCRAPCNIQMEDPTFKENYRFHAINGYIMDTLPGLVMAQDQRIRWYLLSMGSNENIHSIHFSGHVFTVRKKEEYKMALYNLYPGVFETVEMLPSKAGIWRVECLIGEHLHAGMSTLFLVYSNKCQNPLGMASGHIRDFQITASGQYGQWAPKLARLHYSGSINAWSTKEPFSWIKVDLLAPMIIHGIKTQGARQKFSSLYISQFIIMYSLDGKKWQTYRGNSTGTDMVFFGNVDSSGIKHNIFNPPIIARYIRLHPTHYSIRSTLRMELMGCDLNSCSMPLGMESKAISDAQITASSYFTNMFATWSPSKARLHLQGRSNAWRPQVNNPKEWLQVDFQKTMKVTGVTTQGVKSLDTSMYVKEFLISSSQDGHQWTLFFQNGKVKVFQGNQDSFTPVVNSLDPPLLTRYLRIHPQSWEHQIALRMEVLGCEAQDLY

SEQ ID NO: 1617 - DNA, 4371 bp, synthetic construct
  misc_feature 1..4371: note = Variant of human B-domain deleted Factor VIII
  source 1..4371: mol_type = other DNA
atgcagattgaactgtctacctgcttcttcctctgtttgctgaggttctgctttagcgccactagacggtactaccttggcgctgtggagctgtcctgggactatatgcagagtgatttgggagagcttcccgtcgacgcacgatttcctcctcgcgttccaaagtcatttccctttaacacaagccaggtgtacaagaagacgctcttcgtcgaattcaccgatcacctgttcaatatcgccaaacccagaccaccatggatgggtcttttggggcctaccatacaagcggaggtgtatgacacagttgttatcactctcaagaacatggcttctcatccggtaagtcttcacgcagtgggcgtgtcctactggaaagcttcagaaggagccgagtatgatgatcagacatcccagagggagaaagaagacgacaaggtatttccaggtgggtctcatacctatgtgtggcaagtgctcaaagagaatggccctatggcaagcgatccgccgtgtttgacttacagctacctttcacacgttgacctcgtcaaggacctcaactccgggttgattggagccttgttggtatgcagggaaggatctcttgccaaagagaagacacagaccctggccaagtttatccttctctttgctgtgttcgatgagggcaaaagttggcatagcgaaacgaagaattccctcatgcaggatcgcgacgcagccagcgccagagcttggcccaagatgcacactgtgaacggatatgtcaataggacgcttcctggcttgattgggtgtcatcggaaaagtgtctactggcacgtgatcggaatggggacaacaccagaggtccactccatatttctcgaaggccataccttccttgttcgaaaccacagacaggcatccttggggatctctcccattacctttctcactgcccaaacgctccttcgtgacttgggtcagttccttctcttttgccatatcccgtcacaccagcatgatggtatggaagcttatgtgaaagtcgacagttgtcctgaggagccacagttgcgcatgaagaataatgaagaagccgaggattacgacgacgatctcaccgattctgagatggacgtggtgaggtttgatgacgacaactctccctccatcattcaagctcggagcggggcgaagaaacaccccaagacttgggtccactatatagcggcggaagaggaggattgggattacgctcctcttgtattggcaccagatgaccgctcatacaaaagccagtacctcaacaacggaccgcagagaattggccggaagtataagaaagtgcgatttatggcctatacagacgaaacctttaagacaagggaggccatccagcatgagagtgggattttgggacctcttctttacggcgaagttggtgataccctcctcatcatcttcaagaatcaagcttctcgcccctataacatttacccacacgggatcactgacgttaggcctttgtatagcagaagacttcccaaaggcgtgaagcatctcaaagacttccccattttgccaggcgagatctttaagtacaaatggaccattacagtggaagatggaccgactaaatcagaccctcgatgccttacgcggtactattcctccttcgtgaattgggagagagatttggcaagcggactcataggaccactcctcatctgttacaaggaatctgtagaccagaggggtaaccagattatgagtgataaacgcaatgtgatcctttttagcgtcttcgacgagaaccggtcctggtacttgaccgagaatatacaaaggttccttcccaaccccgcaggcgttcagttggaagaccctgagtttcaggccagcaatattatgcactcaatcaacggctatgtgtttgatagtctccagctttctgtttgcctccatgaagtagcctattggtacatcttgtcaattggtgctcaaacagacttcctctccgtcttcttctccggctacacctttaagcacaagggcgtgtatgaggacactctcacactctttccattttctggagaaaccgtgttcatgagcatggagaatccaggcctttggatcttgggttgccacaacagtgattttcgcaatcggggaatgactgctctcctcaaagtcagcagctgtgattggaacacaggcgactattacgaagattcttacgaggacataagtgcctactttgactccaagaataacgccattgagcccagatcattctcccagaatcctcccgtgcttaaaaggcatcagcgcgaaggtaccagaactactcttcagtctgatcaagaggagattgactatgacgacaccattagcgtggaaatgaagaaggaggatttcgatatctatgacgaagatgagaaccagtctccgcggagctttcagaagaagacgcgacactacttcattgcagcagtcgaaaggctttgggactacggtatgtcatcatcccctcatgtgttgcgcaatagagctcagagtggaagtgttccacagttcaagaaagtcgtctttcaagagtttacagatggcagcttcacacagcctctctatcggggcgagcttaacgaacatttgggactccttggtccctatatccgagccgaagtggaggacaacattatggttacctttaggaatcaagcctctcgcccctacagcttctactcctccctcatcagttatgaggaggatcagagacaaggcgctgaaccacggaagaactttgtgaaaccgaatgagacgaagacctacttctggaaagtacagcaccacatggcccccacaaaagacgaattcgattgcaaagcatgggcgtatttttcagacgttgacttggagaaagatgtacattcaggacttattggtcctttgttggtgtgtcacactaacactctcaatccagcccatggcaggcaggtgacagtccaggaattcgctcttttctttaccatctttgatgagaccaagtcctggtacttcacggaaaacatggagcgcaattgcagagccccctgtaacatacagatggaggaccctacctttaaggaaaattatcggttccacgcaatcaacggatacacgatggatacactccctggccttgtgatggctcaggaccaacgaatcaggtggtacctcctcagcatgggttctaatgagaacatacactccattcacttttcaggacatgtgttcactgtccggaagaaagaagagtataagatggccctctacaatttgtatccaggcgtgtttgagaccgttgaaatgcttccctctaaagctggcatctggagagtagagtgcttgatcggagaacatcttcacgcaggtatgagcaccttgttcctcgtgtacagcaacaaatgtcagaatccacttggcatggccagtggacacattcgcgactttcagatcacagcatctggccagtatggacaatgggccccaaagttggctcgcctccattactccggtagcataaatgcgtggtccactaaagaacctttcagctggattaaggtcgatcttcttgcccccatgatcatccacggcattaagacacagggagcgaggcagaaattctcctccctctacatctcacagttcattattatgtatagtttggacggcaagaagtggcaaacttatagaggtaacagtactggaacagacatggtgttcttcggcaacgttgatagctctggcatcaaacacaacatctttaatcctcccataatagctcggtacatcagattgcatccgacccactacagcattaggagtacactccgaatggagcttatgggttgcgacttgaattcctgttcaatgccactcggaatggagtctaaagccatctctgatgcacagataaccgccagtagctactttacgaacatgtttgctacgtggtcaccctctaaggcaaggcttcatttgcaaggccggtctaatgcctggagacctcaggtgaacaacccgaaagaatggctccaggtggactttcagaagaccatgaaagtaacaggtgtcactactcagggagttaagtccttggatactagcatgtatgtgaaggagttccttatttcctcatcacaagatggccaccagtggaccctcttctttcagaatggtaaggtcaaagtgtttcagggcaatcaagacagcttcacacccgtggtgaacagtcttgatcctccactcttgacacgataccttcgaatccatccacagtcttgggagcaccagattgcattgcgcatggaagtacttggatgcgaggctcaggacctctac

SEQ ID NO: 1618 - protein, 1457 aa, synthetic construct
  REGION 1..1457: note = Variant of human B-domain deleted Factor VIII
MQIELSTCFFLCLLRFCFSATRRYYLGAVELSWDYMQSDLGELPVDARFPPRVPKSFPFNTSQVYKKTLFVEFTDHLFNIAKPRPPWMGLLGPTIQAEVYDTVVITLKNMASHPVSLHAVGVSYWKASEGAEYDDQTSQREKEDDKVFPGGSHTYVWQVLKENGPMASDPPCLTYSYLSHVDLVKDLNSGLIGALLVCREGSLAKEKTQTLAKFILLFAVFDEGKSWHSETKNSLMQDRDAASARAWPKMHTVNGYVNRTLPGLIGCHRKSVYWHVIGMGTTPEVHSIFLEGHTFLVRNHRQASLGISPITFLTAQTLLRDLGQFLLFCHIPSHQHDGMEAYVKVDSCPEEPQLRMKNNEEAEDYDDDLTDSEMDVVRFDDDNSPSIIQARSGAKKHPKTWVHYIAAEEEDWDYAPLVLAPDDRSYKSQYLNNGPQRIGRKYKKVRFMAYTDETFKTREAIQHESGILGPLLYGEVGDTLLIIFKNQASRPYNIYPHGITDVRPLYSRRLPKGVKHLKDFPILPGEIFKYKWTITVEDGPTKSDPRCLTRYYSSFVNWERDLASGLIGPLLICYKESVDQRGNQIMSDKRNVILFSVFDENRSWYLTENIQRFLPNPAGVQLEDPEFQASNIMHSINGYVFDSLQLSVCLHEVAYWYILSIGAQTDFLSVFFSGYTFKHKGVYEDTLTLFPFSGETVFMSMENPGLWILGCHNSDFRNRGMTALLKVSSCDWNTGDYYEDSYEDISAYFDSKNNAIEPRSFSQNPPVLKRHQREGTRTTLQSDQEEIDYDDTISVEMKKEDFDIYDEDENQSPRSFQKKTRHYFIAAVERLWDYGMSSSPHVLRNRAQSGSVPQFKKVVFQEFTDGSFTQPLYRGELNEHLGLLGPYIRAEVEDNIMVTFRNQASRPYSFYSSLISYEEDQRQGAEPRKNFVKPNETKTYFWKVQHHMAPTKDEFDCKAWAYFSDVDLEKDVHSGLIGPLLVCHTNTLNPAHGRQVTVQEFALFFTIFDETKSWYFTENMERNCRAPCNIQMEDPTFKENYRFHAINGYTMDTLPGLVMAQDQRIRWYLLSMGSNENIHSIHFSGHVFTVRKKEEYKMALYNLYPGVFETVEMLPSKAGIWRVECLIGEHLHAGMSTLFLVYSNKCQNPLGMASGHIRDFQITASGQYGQWAPKLARLHYSGSINAWSTKEPFSWIKVDLLAPMIIHGIKTQGARQKFSSLYISQFIIMYSLDGKKWQTYRGNSTGTDMVFFGNVDSSGIKHNIFNPPIIARYIRLHPTHYSIRSTLRMELMGCDLNSCSMPLGMESKAISDAQITASSYFTNMFATWSPSKARLHLQGRSNAWRPQVNNPKEWLQVDFQKTMKVTGVTTQGVKSLDTSMYVKEFLISSSQDGHQWTLFFQNGKVKVFQGNQDSFTPVVNSLDPPLLTRYLRIHPQSWEHQIALRMEVLGCEAQDLY

SEQ ID NO: 1619 - DNA, 4371 bp, synthetic construct
  misc_feature 1..4371: note = Variant of human B-domain deleted Factor VIII
  source 1..4371: mol_type = other DNA
atgcagattgaactgtctacctgcttcttcctctgtttgctgaggttctgctttagcgccactagacggtactaccttggcgctgtggagctgtcctgggactatatgcagagtgatttgggagagcttcccgtcgacgcacgatttcctcctcgcgttccaaagtcatttccctttaacacaagccaggtgtacaagaagacgctcttcgtcgaattcaccgatcacctgttcaatatcgccaaacccagaccaccatggatgggtcttttggggcctaccatacaagcggaggtgtatgacacagttgttatcactctcaagaacatggcttctcatccggtaagtcttcacgcagtgggcgtgtcctactggaaagcttcagaaggagccgagtatgatgatcagacatcccagagggagaaagaagacgacaaggtatttccaggtgggtctcatacctatgtgtggcaagtgctcaaagagaatggccctatggcaagcgatccgccgtgtttgacttacagctacctttcacacgttgacctcgtcaaggacctcaactccgggttgattggagccttgttggtatgcagggaaggatctcttgccaaagagaagacacagaccctggccaagtttatccttctctttgctgtgttcgatgagggcaaaagttggcatagcgaaacgaagaattccctcatgcaggatcgcgacgcagccagcgccagagcttggcccaagatgcacactgtgaacggatatgtcaataggacgcttcctggcttgattgggtgtcatcggaaaagtgtctactggcacgtgatcggaatggggacaacaccagaggtccactccatatttctcgaaggccataccttccttgttcgaaaccacagacaggcatccttggggatctctcccattacctttctcactgcccaaacgctccttcgtgacttgggtcagttccttctcttttgccatatcccgtcacaccagcatgatggtatggaagcttatgtgaaagtcgacagttgtcctgaggagccacagttgcgcatgaagaataatgaagaagccgaggattacgacgacgatctcaccgattctgagatggacgtggtgaggtttgatgacgacaactctccctccatcattcaagctcggagcggggcgaagaaacaccccaagacttgggtccactatatagcggcggaagaggaggattgggattacgctcctcttgtattggcaccagatgaccgctcatacaaaagccagtacctcaacaacggaccgcagagaattggccggaagtataagaaagtgcgatttatggcctatacagacgaaacctttaagacaagggaggccatccagcatgagagtgggattttgggacctcttctttacggcgaagttggtgataccctcctcatcatcttcaagaatcaagcttctcgcccctataacatttacccacacgggatcactgacgttaggcctttgtatagcagaagacttcccaaaggcgtgaagcatctcaaagacttccccattttgccaggcgagatctttaagtacaaatggaccattacagtggaagatggaccgactaaatcagaccctcgatgccttacgcggtactattcctccttcgtgaattgggagagagatttggcaagcggactcataggaccactcctcatctgttacaaggaatctgtagaccagaggggtaaccagattatgagtgataaacgcaatgtgatcctttttagcgtcttcgacgagaaccggtcctggtacttgaccgagaatatacaaaggttccttcccaaccccgcaggcgttcagttggaagaccctgagtttcaggccagcaatattatgcactcaatcaacggctatgtgtttgatagtctccagctttctgtttgcctccatgaagtagcctattggtacatcttgtcaattggtgctcaaacagacttcctctccgtcttcttctccggctacacctttaagcacaagggcgtgtatgaggacactctcacactctttccattttctggagaaaccgtgttcatgagcatggagaatccaggcctttggatcttgggttgccacaacagtgattttcgcaatcggggaatgactgctctcctcaaagtcagcagctgtgattggaacacaggcgactattacgaagattcttacgaggacataagtgcctactttgactccaagaataacgccattgagcccagatcattctcccagaatcctcccgtgcttaaaaggcatcagcgcgaaggtaccagaactactcttcagtctgatcaagaggagattgactatgacgacaccattagcgtggaaatgaagaaggaggatttcgatatctatgacgaagatgagaaccagtctccgcggagctttcagaagaagacgcgacactacttcattgcagcagtcgaaaggctttgggactacggtatgtcatcatcccctcatgtgttgcgcaatagagctcagagtggaagtgttccacagttcaagaaagtcgtctttcaagagtttacagatggcagcttcacacagcctctctatcggggcgagcttaacgaacatttgggactccttggtccctatatccgagccgaagtggaggacaacattatggttacctttaggaatcaagcctctcgcccctacagcttctactcctccctcatcagttatgaggaggatcagagacaaggcgctgaaccacggaagaactttgtgaaaccgaatgagacgaagacctacttctggaaagtacagcaccacatggcccccacaaaagacgaattcgattgcaaagcatgggcgtatttttcagacgttgacttggagaaagatgtacattcaggacttattggtcctttgttggtgtgtcacactaacactctcaatccagcccatggcaggcaggtgacagtccaggaattcgctcttttctttaccatctttgatgagaccaagtcctggtacttcacggaaaacatggagcgcaattgcagagccccctgtaacatacagatggaggaccctacctttaaggaaaattatcggttccacgcaatcaacggatacattatggatacactccctggccttgtgatggctcaggaccaacgaatcaggtggtacctcctcagcatgggttctaatgagaacatacactccattcacttttcaggacatgtgttcactgtccggaagaaagaagagtataagatggccctctacaatttgtatccaggcgtgtttgagaccgttgaaatgcttccctctaaagctggcatctggagagtagagtgcttgatcggagaacatcttcacgcaggtatgagcaccttgttcctcgtgtacagcaacaaatgtcagaatccacttggcatggccagtggacacattcgcgactttcagatcacagcatctggccagtatggacaatgggccccaaagttggctcgcctccattactccggtagcataaatgcgtggtccactaaagaacctttcagctggattaaggtcgatcttcttgcccccatgatcatccacggcattaccacacagggagcgaggcagaaattctcctccctctacatctcacagttcattattatgtatagtttggacggcaagaagtggcaaacttatagaggtaacagtactggaacagacatggtgttcttcggcaacgttgatagctctggcatcaaacacaacatctttaatcctcccataatagctcggtacatcagattgcatccgacccactacagcattaggagtacactccgaatggagcttatgggttgcgacttgaattcctgttcaatgccactcggaatggagtctaaagccatctctgatgcacagataaccgccagtagctactttacgaacatgtttgctacgtggtcaccctctaaggcaaggcttcatttgcaaggccggtctaatgcctggagacctcaggtgaacaacccgaaagaatggctccaggtggactttcagaagaccatgaaagtaacaggtgtcactactcagggagttaagtccttggatactagcatgtatgtgaaggagttccttatttcctcatcacaagatggccaccagtggaccctcttctttcagaatggtaaggtcaaagtgtttcagggcaatcaagacagcttcacacccgtggtgaacagtcttgatcctccactcttgacacgataccttcgaatccatccacagtcttgggagcaccagattgcattgcgcatggaagtacttggatgcgaggctcaggacctctac

SEQ ID NO: 1620 - protein, 1457 aa, synthetic construct
  REGION 1..1457: note = Variant of human B-domain deleted Factor VIII
MQIELSTCFFLCLLRFCFSATRRYYLGAVELSWDYMQSDLGELPVDARFPPRVPKSFPFNTSQVYKKTLFVEFTDHLFNIAKPRPPWMGLLGPTIQAEVYDTVVITLKNMASHPVSLHAVGVSYWKASEGAEYDDQTSQREKEDDKVFPGGSHTYVWQVLKENGPMASDPPCLTYSYLSHVDLVKDLNSGLIGALLVCREGSLAKEKTQTLAKFILLFAVFDEGKSWHSETKNSLMQDRDAASARAWPKMHTVNGYVNRTLPGLIGCHRKSVYWHVIGMGTTPEVHSIFLEGHTFLVRNHRQASLGISPITFLTAQTLLRDLGQFLLFCHIPSHQHDGMEAYVKVDSCPEEPQLRMKNNEEAEDYDDDLTDSEMDVVRFDDDNSPSIIQARSGAKKHPKTWVHYIAAEEEDWDYAPLVLAPDDRSYKSQYLNNGPQRIGRKYKKVRFMAYTDETFKTREAIQHESGILGPLLYGEVGDTLLIIFKNQASRPYNIYPHGITDVRPLYSRRLPKGVKHLKDFPILPGEIFKYKWTITVEDGPTKSDPRCLTRYYSSFVNWERDLASGLIGPLLICYKESVDQRGNQIMSDKRNVILFSVFDENRSWYLTENIQRFLPNPAGVQLEDPEFQASNIMHSINGYVFDSLQLSVCLHEVAYWYILSIGAQTDFLSVFFSGYTFKHKGVYEDTLTLFPFSGETVFMSMENPGLWILGCHNSDFRNRGMTALLKVSSCDWNTGDYYEDSYEDISAYFDSKNNAIEPRSFSQNPPVLKRHQREGTRTTLQSDQEEIDYDDTISVEMKKEDFDIYDEDENQSPRSFQKKTRHYFIAAVERLWDYGMSSSPHVLRNRAQSGSVPQFKKVVFQEFTDGSFTQPLYRGELNEHLGLLGPYIRAEVEDNIMVTFRNQASRPYSFYSSLISYEEDQRQGAEPRKNFVKPNETKTYFWKVQHHMAPTKDEFDCKAWAYFSDVDLEKDVHSGLIGPLLVCHTNTLNPAHGRQVTVQEFALFFTIFDETKSWYFTENMERNCRAPCNIQMEDPTFKENYRFHAINGYIMDTLPGLVMAQDQRIRWYLLSMGSNENIHSIHFSGHVFTVRKKEEYKMALYNLYPGVFETVEMLPSKAGIWRVECLIGEHLHAGMSTLFLVYSNKCQNPLGMASGHIRDFQITASGQYGQWAPKLARLHYSGSINAWSTKEPFSWIKVDLLAPMIIHGITTQGARQKFSSLYISQFIIMYSLDGKKWQTYRGNSTGTDMVFFGNVDSSGIKHNIFNPPIIARYIRLHPTHYSIRSTLRMELMGCDLNSCSMPLGMESKAISDAQITASSYFTNMFATWSPSKARLHLQGRSNAWRPQVNNPKEWLQVDFQKTMKVTGVTTQGVKSLDTSMYVKEFLISSSQDGHQWTLFFQNGKVKVFQGNQDSFTPVVNSLDPPLLTRYLRIHPQSWEHQIALRMEVLGCEAQDLY

SEQ ID NO: 1621 - DNA, 4371 bp, synthetic construct
  misc_feature 1..4371: note = Variant of human B-domain deleted Factor VIII
  source 1..4371: mol_type = other DNA
atgcagattgaactgtctacctgcttcttcctctgtttgctgaggttctgctttagcgccactagacggtactaccttggcgctgtggagctgtcctgggactatatgcagagtgatttgggagagcttcccgtcgacgcacgatttcctcctcgcgttccaaagtcatttccctttaacacaagccaggtgtacaagaagacgctcttcgtcgaattcaccgatcacctgttcaatatcgccaaacccagaccaccatggatgggtcttttggggcctaccatacaagcggaggtgtatgacacagttgttatcactctcaagaacatggcttctcatccggtaagtcttcacgcagtgggcgtgtcctactggaaagcttcagaaggagccgagtatgatgatcagacatcccagagggagaaagaagacgacaaggtatttccaggtgggtctcatacctatgtgtggcaagtgctcaaagagaatggccctatggcaagcgatccgccgtgtttgacttacagctacctttcacacgttgacctcgtcaaggacctcaactccgggttgattggagccttgttggtatgcagggaaggatctcttgccaaagagaagacacagaccctggccaagtttatccttctctttgctgtgttcgatgagggcaaaagttggcatagcgaaacgaagaattccctcatgcaggatcgcgacgcagccagcgccagagcttggcccaagatgcacactgtgaacggatatgtcaataggacgcttcctggcttgattgggtgtcatcggaaaagtgtctactggcacgtgatcggaatggggacaacaccagaggtccactccatatttctcgaaggccataccttccttgttcgaaaccacagacaggcatccttggggatctctcccattacctttctcactgcccaaacgctccttcgtgacttgggtcagttccttctcttttgccatatcccgtcacaccagcatgatggtatggaagcttatgtgaaagtcgacagttgtcctgaggagccacagttgcgcatgaagaataatgaagaagccgaggattacgacgacgatctcaccgattctgagatggacgtggtgaggtttgatgacgacaactctccctccatcattcaagctcggagcggggcgaagaaacaccccaagacttgggtccactatatagcggcggaagaggaggattgggattacgctcctcttgtattggcaccagatgaccgctcatacaaaagccagtacctcaacaacggaccgcagagaattggccggaagtataagaaagtgcgatttatggcctatacagacgaaacctttaagacaagggaggccatccagcatgagagtgggattttgggacctcttctttacggcgaagttggtgataccctcctcatcatcttcaagaatcaagcttctcgcccctataacatttacccacacgggatcactgacgttaggcctttgtatagcagaagacttcccaaaggcgtgaagcatctcaaagacttccccattttgccaggcgagatctttaagtacaaatggaccattacagtggaagatggaccgactaaatcagaccctcgatgccttacgcggtactattcctccttcgtgaattgggagagagatttggcaagcggactcataggaccactcctcatctgttacaaggaatctgtagaccagaggggtaaccagattatgagtgataaacgcaatgtgatcctttttagcgtcttcgacgagaaccggtcctggtacttgaccgagaatatacaaaggttccttcccaaccccgcaggcgttcagttggaagaccctgagtttcaggccagcaatattatgcactcaatcaacggctatgtgtttgatagtctccagctttctgtttgcctccatgaagtagcctattggtacatcttgtcaattggtgctcaaacagacttcctctccgtcttcttctccggctacacctttaagcacaagggcgtgtatgaggacactctcacactctttccattttctggagaaaccgtgttcatgagcatggagaatccaggcctttggatcttgggttgccacaacagtgattttcgcaatcggggaatgactgctctcctcaaagtcagcagctgtgattggaacacaggcgactattacgaagattcttacgaggacataagtgcctactttgactccaagaataacgccattgagcccagatcattctcccagaatcctcccgtgcttaaaaggcatcagcgcgaaggtaccagaactactcttcagtctgatcaagaggagattgactatgacgacaccattagcgtggaaatgaagaaggaggatttcgatatctatgacgaagatgagaaccagtctccgcggagctttcagaagaagacgcgacactacttcattgcagcagtcgaaaggctttgggactacggtatgtcatcatcccctcatgtgttgcgcaatagagctcagagtggaagtgttccacagttcaagaaagtcgtctttcaagagtttacagatggcagcttcacacagcctctctatcggggcgagcttaacgaacatttgggactccttggtccctatatccgagccgaagtggaggacaacattatggttacctttaggaatcaagcctctcgcccctacagcttctactcctccctcatcagttatgaggaggatcagagacaaggcgctgaaccacggaagaactttgtgaaaccgaatgagacgaagacctacttctggaaagtacagcaccacatggcccccacaaaagacgaattcgattgcaaagcatgggcgtatttttcagacgttgacttggagaaagatgtacattcaggacttattggtcctttgttggtgtgtcacactaacactctcaatccagcccatggcaggcaggtgacagtccaggaattcgctcttttctttaccatctttgatgagaccaagtcctggtacttcacggaaaacatggagcgcaattgcagagccccctgtaacatacagatggaggaccctacctttaaggaaaattatcggttccacgcaatcaacggatacattatggatacactccctggccttgtgatggctcaggaccaacgaatcaggtggtacctcctcagcatgggttctaatgagaacatacactccattcacttttcaggacatgtgttcactgtccggaagaaagaagagtataagatggccctctacaatttgtatccaggcgtgtttgagaccgttgaaatgcttccctctaaagctggcatctggagagtagagtgcttgatcggagaacatcttcacgcaggtatgagcaccttgttcctcgtgtacagcaacaaatgtcagaatccacttggcatggccagtggacacattcgcgactttcagatcacagcatctggccagtatggacaatgggccccaaagttggctcgcctccattactccggtagcataaatgcgtggtccactaaagaacctttcagctggattaaggtcgatcttcttgcccccatgatcatccacggcattaagacacagggagcgaggcagaaattctcctccctctacatctcacagttcattattatgtatagtttggacggcaagaagtggcaaacttatagaggtaacagtactggaacagacatggtgttcttcggcaacgttgatagctctggcatcaaacacaacatctttaatcctcccataatagctcggtacatcagattgcatccgacccacaaaagcattaggagtacactccgaatggagcttatgggttgcgacttgaattcctgttcaatgccactcggaatggagtctaaagccatctctgatgcacagataaccgccagtagctactttacgaacatgtttgctacgtggtcaccctctaaggcaaggcttcatttgcaaggccggtctaatgcctggagacctcaggtgaacaacccgaaagaatggctccaggtggactttcagaagaccatgaaagtaacaggtgtcactactcagggagttaagtccttggatactagcatgtatgtgaaggagttccttatttcctcatcacaagatggccaccagtggaccctcttctttcagaatggtaaggtcaaagtgtttcagggcaatcaagacagcttcacacccgtggtgaacagtcttgatcctccactcttgacacgataccttcgaatccatccacagtcttgggagcaccagattgcattgcgcatggaagtacttggatgcgaggctcaggacctctac
